United States Patent Application Publication US 2005/0228172 A9 - sequence listing, part 153

SEQ ID NO: 700376 - DNA, 1259 bp, Homo sapiens
gagaaacttattctctcacagttctggatgccagacgttgcaaatcaagctatcagccaggccacataccctctggagaatctagggtagactcctccctggcctcttccagcttctgtagctgtcagcattcctkacctcgcggccgcatcactcccagcgctgccgccatggtcatgttgcctcctctctgtgtcttctcctattctgcctccgataaggatgtttgtcattggatttatggcccacctagataatccagatgatagcctgtcacggtcttaacttaatcacatacgcataaggccctttttccaagtaaggctgcattcacagatttaatggattagggcatggagatatcttttcaggagccaccactcaagtcgctacctgtgccctgtatcctaagaggaagtaaatgtaaacgggctctgtgcttgcagtgctttaccaacctgagactcaacaggacacagtggaattagccaaatgggagctcactctcaaatgatgggcttgaagttctgacattttgctattcctaaaatatacacataacttctgtcagattcaaacttgactgaggttgtattttaaaaagatatacatttaattacttcctctctgctcccactccaaatcttcatactctaaattgaagagtcaagacagcatcaccaaactacacatgcttcctgcttcaaaccaccacgacgcattgtggaacaaggcgaaggtcccgtcgccagacaccttagcaaatccaccctatgtggaagtcattgctcaggcacttcttaccaagcagtcattatattttcctaagcagttctttcccttaatctttcagggcaaagatacaccaggactgatttttaaccacagatagccaaaaactaagatttcttgagatctaaaaacatttctcctcttagtacttcaattgaagagaatctcctcttctgcaggtccccacactgatctgaagccaaaggcatttatgagctgtggttgctggttccctggtcaaaactcagctattttcatgtaatcctttcaagatttttcagattactcttaaaatgtgggctttaaccaccccagataaagtttcaggttcttttttttcaggtttatgttgtttctgggaaaggaaaccccggcatttacaaaaccaaaacaaaatcaaagtaagttttgcattaaacagatcatttttttcccatccccaaatatctatctacccaaagatgcca

SEQ ID NO: 700377 - DNA, 841 bp, Homo sapiens
aaatgaattagtaaataaatatttaacatatctccttctcccccattgaatttattcaattatttatttatatctgtatttactcatttatttatttcatactctgaaaggaaatgaagtgactaaggctaaagctttctaattagagcggagttgggagactgtgagaggatttcactcacacctgctcagggtcaaaccacagactattccaatagacttgaataaacagctgaagtcagtatctgccagccttcaacatctctcaggtgggaggaccctggttagctaaccaatcagaatgggtttacgattcaggatttccgcccagcaacgatctgcctttgaaaacactttttttttttttaaatccctggttaaaaaacctcttctgctctttctgtataggacacaactcagggctgccctgattgaatgtgcctgaattgcaattattggtttaccaaagaaatgatatttcctttgacttttgtgtcagtctttttttttttacttaacaatacttaggtttataatccaataccgtattatgtattttgttgttgaaatttttccaactttggctattgagagttctttcagttggctcctgtgtcccttgacacatcctccctcaaggtgggttttttgttttgcctttttttttttttcttttgagccggagtcttgctctgtctcccaggctggagtgcagtggcgtgatctcggctcactgcaagctccacctcctaggttcaagccattctcctgcctcagcctcccgagtagctgggactacaggtgcctgccaccacgcccrgctaaattttttttttttttt

SEQ ID NO: 700378 - DNA, 1093 bp, Homo sapiens
tcttcccatcatctccactatagctcttagtacagtgtattgcagtagaagatgcttgttacattcaaaacaagaaacagagggaagagataaggaaggaaagggccatgcctccttaactttaytcatgtaagaaacacctggcacataaaatatattcggtaaataatgaatgaatgaatacatgaatgaattaattcgtgggtaacttggtactattttcagtatttttggtcataggttcattttctctcctattaaattcctaaaggcaaatatatttttttccagtagttgagtagtcctcattgatgatctgggcatcacactttttgtaatgtacataaggaaccaaattacctggtattgtaaaaattggtcaccagagcatgtcctcaagttctgcacatttaattaaactaatgtcgtaatggtaaccagattctcacagtgtgaaagctccttctgggaagtaacttaggaatttttagacgctaatgttcgttctctctctttctctctatcagaacataacctataactatttaagttcaccaactgaaatattaatgagctaaaaatgctaatttttaatactgaaattgcccaatttatatctagaaaacaatttatgcagtaagatgccttaatgtgatacaggcacacacacccaccacccccctccacacacacacacatgtgcacgcgcacacacacacacacacattttaactattttgctataatccaaatgaataatttgcaaaaatacatttcccccatacatacctgtggactctttaatggtagctgaacttaaaactttctttctcgtgtaagtttttggaaggatattgattaattaggatgtaatgacattaactatgccactcttgtttcagtagcaatttcaattaatagtgtgagatgtagaatatgtaaaaaaggagtcagatatattgtctttgcattaaaatgacaatggattctgtttatatcattccattatgtcagacagtactgaatggtttagatgtattaatagacaccccaaatgttacctctcccttttaaatatcataactggcagaag

SEQ ID NO: 700379 - DNA, 605 bp, Homo sapiens
gtcctcactccctgttttcaatgatgaccaatgattccaggctgcctcttggggcacaagattttcagtgcaaaaacttggatcatccagggcaaattggaagggttggtcaccccagttgagaacaggaactatagagccattggctggtgtcaaatcctggctccaccatgaacccaccctgctactttggccaaattacttaacttttccatgcctccatttcctcacctataaaacaggaataatcgttgtacctacaccgtagggttgttgcgacaattaaatgagctaatgcatgtaggggatctaaaagtgccaggcacagagaaatgtccctgtgaggggtttgctatttttgtggctattmtataaaaagctttctaaaatccagaatttcatcctggggcagattctttgcctagctcttttgagatctattagaaacatttagtgatttccttacatttcctgaagttacactaggagcaacaacaacaacaacaaaatggcaatttatggttgacctgattttacactagttaaaagagagccgtcaaccctgcagaagtaacaagtccgtgcccacaggcctcctcggtgtt

SEQ ID NO: 700380 - DNA, 1310 bp, Homo sapiens
cagcatttcatctattatttagaacaggcctctcttgggtcccgtttgacctccccatccccttatcctggtaggcttagttgaccactctgtctctcattaatcacttccatttctgaacctggtttccactgaaacaaagttaaactttaattgctggtttatccaaggctaggcactataagggcatgaacataaacaccaagccaatctatgtctaaatttttgcttggccacttaggagctgtgtgactttagaaaagttgcttgacttctctgagcctcagctttcttatctgtaaaatatgaatgtaaataacaccaagataggtaccaaatcagggtttcttcaagaattgaataaaatgataataacgatcatgacggctaacatgtattttgtgtttgctgggtgccaggcactgtctaaatattatctgaatcctcacaacaaccccataacatagatactcttattttcagtttgccaatgggaaaaccaaggcacagacagsagaagctagtaagcacctcattcaggattttctcaggctccatagccctcatcatagcccttctgctgtgccatttctcctagtaaatgatcaataaaatggtagctggtaacatgggttcataattccttatctgaaactctcaggaaaccaattacattttggaattcagaatttggaggattatggaaaagttatactttgcatatcctctgtattacataatgcagagggggactggagcaacagcatataccactccccccaccacacacacacacacacacacacacacacacacacacacacacacgatgcacacatacaaacaaaaagaaaaaaactttgggttaaagctctttggatttcaggataacagacaagagattgtggcctagagtaataaaagtattaatagtagcaataattataaagcataataaataatgactgttattattgttacacattttgcggctcttgttttcctggataagttcatagcaaaatgtgctacaaaaaaggtctttctccattaacaaatgggttcggggggaaggtaccaggtatgggaccacatccacaccttgtctcatgcatggtactctctctccttttcccagtatgacttcatggaacgtctggacgggaaggagaagtggagtgtggttgagtctcccagggaacgccggagcatacagaccttggttcagaatgaagccgtgtttgtgcagtacctggatgtgggcctgtggcatctggccttctacaatgatggaaaagacaaagagatgg

SEQ ID NO: 700381 - DNA, 1310 bp, Homo sapiens
cagcatttcatctattatttagaacaggcctctcttgggtcccgtttgacctccccatccccttatcctggtaggcttagttgaccactctgtctctcattaatcacttccatttctgaacctggtttccactgaaacaaagttaaactttaattgctggtttatccaaggctaggcactataagggcatgaacataaacaccaagccaatctatgtctaaatttttgcttggccacttaggagctgtgtgactttagaaaagttgcttgacttctctgagcctcagctttcttatctgtaaaatatgaatgtaaataacaccaagataggtaccaaatcagggtttcttcaagaattgaataaaatgataataacgatcatgacggctaacatgtattttgtgtttgctgggtgccaggcactgtctaaatattatctgaatcctcacaacaaccccataacatagatactcttattttcagtttgccaatgggaaaaccaaggcacagacaggagaagctagtaagcacctcattcaggattttctcaggctccatagccctcatcatagcccttctgctgtgccatttctcctagtaaatgatcaataaaatggtagctggtaacatgggttcataattccttatctgaaactctcaggaaaccaattacattttggaattcagaatttggaggattatggaaaagttatactttgcatatcctctgtattacataatgcagagggggactggagcaacagcatataccactccccccaccacacacacacacacacacacacacacacacacacacacacacacgatgcacacatacaaacaaaaagaaaaaaactttgggttaaagctctttggatttcaggataacagayaagagattgtggcctagagtaataaaagtattaatagtagcaataattataaagcataataaataatgactgttattattgttacacattttgcggctcttgttttcctggataagttcatagcaaaatgtgctacaaaaaaggtctttctccattaacaaatgggttcggggggaaggtaccaggtatgggaccacatccacaccttgtctcatgcatggtactctctctccttttcccagtatgacttcatggaacgtctggacgggaaggagaagtggagtgtggttgagtctcccagggaacgccggagcatacagaccttggttcagaatgaagccgtgtttgtgcagtacctggatgtgggcctgtggcatctggccttctacaatgatggaaaagacaaagagatgg

SEQ ID NO: 700382 - DNA, 1310 bp, Homo sapiens
cagcatttcatctattatttagaacaggcctctcttgggtcccgtttgacctccccatccccttatcctggtaggcttagttgaccactctgtctctcattaatcacttccatttctgaacctggtttccactgaaacaaagttaaactttaattgctggtttatccaaggctaggcactataagggcatgaacataaacaccaagccaatctatgtctaaatttttgcttggccacttaggagctgtgtgactttagaaaagttgcttgacttctctgagcctcagctttcttatctgtaaaatatgaatgtaaataacaccaagataggtaccaaatcagggtttcttcaagaattgaataaaatgataataacgatcatgacggctaacatgtattttgtgtttgctgggtgccaggcactgtctaaatattatctgaatcctcacaacaaccccataacatagatactcttattttcagtttgccaatgggaaaaccaaggcacagacaggagaagctagtaagcacctcattcaggattttctcaggctccatagccctcatcatagcccttctgctgtgccatttctcctagtaaatgatcaataaaatggtagctggtaacatgggttcataattccttatctgaaactctcaggaaaccaattacattttggaattcagaatttggaggattatggaaaagttatactttgcatatcctctgtattacataatgcagagggggactggagcaacagcatataccactccccccaccacacacacacacacacacacacacacacacacacacacacacacgatgcacacatacaaacaaaaagaaaaaaactttgggttaaagctctttggatttcaggataacagacaagagattgtggcctagagtaataaaagtattaatagtagcaataattataaagcataataaataatgactgttattattgttacacattttgcggctcttgttttcctggataagttcatagcaaaatgtgctacaaaaaaggtctttctccattaacaaatgggttsggggggaaggtaccaggtatgggaccacatccacaccttgtctcatgcatggtactctctctccttttcccagtatgacttcatggaacgtctggacgggaaggagaagtggagtgtggttgagtctcccagggaacgccggagcatacagaccttggttcagaatgaagccgtgtttgtgcagtacctggatgtgggcctgtggcatctggccttctacaatgatggaaaagacaaagagatgg

SEQ ID NO: 700383 - DNA, 1076 bp, Homo sapiens
agtgacatcaaaaaatgtcctaggaaacattagagtggaatatttaatgttcatctttattaaaattaatggctattttaaagttagactgtcctttgcatatctaatcaacccagactatttcaaacaatatattgagtcaaaacatcttcacaggatatactagagagaaaaaaaattactctccttgacacctaattaacccaggatacttcttcattacacamtgttgcctcatcttactcatgaaaccaatacacttatcaaatccgtgattttttttctgtatcaatcagataaaagaagttaaacctacaccattgtaaaaatgtatttctttacagcattgttaaataaaatgtcctgggtctcatttaattcagatggatgaaatcaaagccaaggacaggatcatcttttccctggaaaaggaactggagacccagacaggctatgtacagaaactccaacttcagaaggaggctttggacgaacaactctttctggtcaaggaggctgagtgcaacatgagcagcccaaaacgagaaattccaggaagggcaggtgatggttccgaacactgcagcagtcctgtaagtccattctagttgaagttaagaatgcacaagtcatcttttatttagctcccaagttttaccttttacttaagctcttttcttgtttactacaaagaaatcaatctaccttctactataaaatcagctagtatcttgagaacagggttttctaaactcatagacaactaagtggtctgcactacattagcagatcacatgagatagatttctttaaatccttcctagaatttttctagccaggcaatacctatccaaacttaagtctattataagaaacataaattagatgaaaatattttgcctcttgcctacactggtaattttcccttttgtgaacaattgggttggaaattgataaagatggttgtcatctacaggggtcaaaatgtataactgcataaaagacaaaaccatttttaatcttcatctgaagacttattgtctgattgaacttaccacttatttccatgaattttc

SEQ ID NO: 700384 - DNA, 1076 bp, Homo sapiens
agtgacatcaaaaaatgtcctaggaaacattagagtggaatatttaatgttcatctttattaaaattaatggctattttaaagttagactgtcctttgcatatctaatcaacccagactatttcaaacaatatattgagtcaaaacatcttcacaggatatactagagagaaaaaaaattactctccttgacacctaattaacccaggatacttcttcattacacaatgttgcctcatcttactcatgaaaccaatacacttatcaaatccgtgattttttttctgtatcaatcagataaaagaagttaaacctacaccattgtaaaaatgtatttctttacagcattgttaaataaaatgtcctgggtctcatttaattcagatggatgaaatcaaagccaaggacaggatcatcttttccctggaaaaggaactggagacccagacaggctatgtacagaaactccaacttcagaaggaggctttggacgaacaactctttctggtcaaggaggctgagtgcaacatgagcagcccaaaacgagaaattccaggaagggcaggtgatggttccgaacactgcagcagtcctgtaagtccattctagttgaagttaagaatgcacaagtcatcttttatttagctcccaagttttaccttttacttaagctcttttcttgtttactacaaagaaatcaatctaccttctactataaaatcagctagtatcttgagaacagggttttctaaactcatagacaactaagtggtctgcactacattagcagatcacatgagatagatttctttaaatccttcctagaatttttctagccaggcaatacctatccaaacttaagtctattataagaaacataaattagatgaaaatattttgcctcttgcctacactggtaattttcccttttgtkaacaattgggttggaaattgataaagatggttgtcatctacaggggtcaaaatgtataactgcataaaagacaaaaccatttttaatcttcatctgaagacttattgtctgattgaacttaccacttatttccatgaattttc

SEQ ID NO: 700385 - DNA, 1076 bp, Homo sapiens
agtgacatcaaaaaatgtcctaggaaacattagagtggaatatttaatgttcatctttattaaaattaatggctattttaaagttagactgtcctttgcatatctaatcaacccagactatttcaaacaatatattgagtcaaaacatcttcacaggatatactagagagaaaaaaaattactctccttgacacctaattaacccaggatacttcttcattacacaatgttgcctcatcttactcatgaaaccaatacacttatcaaatccgtgattttttttctgtatcaatcagataaaagaagttaaacctacaccattgtaaaaatgtatttctttacagcattgttaaataaaatgtcctgggtctcatttaattcagatggatgaaatcaaagccaaggacaggatcatcttttccctggaaaaggaactggagacccagacaggctatgtacagaaactccaacttcagaaggaggctttggacgaacaactctttctggtcaaggaggctgagtgcaacatgagcagcccaaaacgagaaattccaggaagggcaggtgatggttccgaacactgcagcagtcctgtaagtccattctagttgaagttaagaatgcacaagtcatcttttatttagctcccaagttttaccttttacttaagctcttttcttgtttactacaaagaaatcaatctaccttctactataaaatcagctagtatcttgagaacagggttttctaaactcatagacaactaagtggtctgcactacattagcagatcacatgagatagatttctttaaatccttcctagaatttttctagccaggcaatacctatccaaacttaagtctattataagaaacataaattagatgaaaatattttgcctcttgcctacactggtaattttcccttttgtgaacaattgggttggaaattgataaagatggttgtcatctacaggggtcaaaatgtrtaactgcataaaagacaaaaccatttttaatcttcatctgaagacttattgtctgattgaacttaccacttatttccatgaattttc

SEQ ID NO: 700386 - DNA, 637 bp, Homo sapiens
aagtgatcctgccctcaaagagctcttgatcaggttcaataagatggggggaggggcagagtggggcaccttctttcccattctgctggtagagaatccgacgcccaaaaaagtgaaataattcaaaagatccacccttaagtcatacaccttatgaaaagaccttaaaatgaatcttcagaaggacatcatttaactacgttgttctaaagttatccaccagagtaatcctttaatatttacaaaagccttcaaactctacaaagatgaggcttgctgaagagctcaaaacattcaaatggcagagtctggatttgaatctagttcttctgatacccatcccttgctccctcaacacgaatatactatctgggaccaagagtagcccagccctactcaccatccgtatccgttcatcttcaagattcctgaggacagtggcaaactcctgcaaagaycttgctggaaaacagaaaggggccatgaggtggaaggagtgtcatgggccttggggagcctttccagctctggctattatgttatggattttaattccttggcacatacagatgcctaaagtcaattgcttcccaaggctcccttcatctttttaatcattaaccattaaggatgaccc

SEQ ID NO: 700387 - DNA, 2555 bp, Homo sapiens
tctccgatcctcatccactcactttgcatgtgctgtgaatcgggctgaactcatatttctattttgcatccggacttgatgcttctattgagctttctgttcgcgacactgctctatatgtcagtcctcctcctcctcccatccttcctcctcctcacatcttgttccctgggaggaactccaacaaaactcccttgcttccccaaggaaagagggggtggacagtatcacagcatgggcctcctcaggagatgagctgggaaggtgggaagggaggcacgttcccttcattcctgcccagtaggcctgagtgctcaccctagactcccttggacctctgacctcagatgggcaggagcaagcaggatccacagggcacgtcccttcagtgagcaggcatgagcagaagtaattctaagcagaatctgaactcctctgagaaataaggcagcttgcacaaaaataacataaaatgagacatcacatacacacctggacttgcctttggaggggcagctgtgtgtgcatgggctgagccagagcaccctgtgctgttcactcacacctttcctggcctggcccagaaacagacttcacttgggccctcagctggcccccgggagagcaaatattttgggcttagtcctcaatattttggccagtgctgacaaggcctgggcctagagaccagacataagctttttggaggacaaagactgccagccaaggcagagttatttttgcctgttgggttaaattgagttgggcataacctggctggggtttgctccttgggcagcctgttcctgatttccaatgtgcccagagctgaagtttgcctctcaaaggcttggcagaccaggtgcattcttttttttttccctttttttttttttttttttttttgagacggagtctcactctgtcacccagactatagtgcagtggcacgatcttggctcactgcaacctccgtctcccgggttcaagtgattctcctgcctcagcctcctgagtagctgggattacaggtgcacgccaccacgcccagctaatttttgtatttttagtagagacggggtttcaccatgttggtcaggctggtctcgaactcctggcctcatgatccacccacctcagcctcccaaagtgctgggattacaggcgtcagctaccgagcccgcccggcctgccaggtgcattctaattgtgggagagttttcaggagcagcaggtggcaaagccccctagaaggtcactggctccctctggaagaacaaggggcttagaagatgcatgtgtggaactgagggtgatgtgtacatatgtgtatgcatgcacttgtacacatgtgtgcacgtttaaaactgtgcacaaggagggtgcgcaggtgygtgtgcatgtatatacctgagtgttgcataaaagcatggaaataggctgttaagctggtcttgcaaccagttctagaaagaatggacttggaatgtatcatgccagtggctctggaaggacacagccagggagtgaaggaaagagaggtggcccctgtggtccccaagctcctcagtggcacttctgggggtcctggggaacccctcccacctatgtgatgtcacctcctctgacatctgcagcctgctctaggttctgaccccttgtcatgacctctggggtccaggatgccctgtgtaatcttgaacatgttccttcatctctctgagcctcagtttccccatatgtacaatggagttggggcagatggcctccaagtcccttcactctaggaggcaggaacacccaggtgcctccagggttggggcttcttcagtgggggcgctcagtctcccacatgtccagacccccactcttgggggattctggagctggaagggtcctgggcatcccgtttggtctgagcacagtcccccagccccaggcttaagccatctggagaatttggggtcatgagtagagaagcaagttgtctggggtcacccaaacagaaaggacagagcagggacagtgcaccctgtgaatgctttctccagctcagacggtgctgggcctgacaccttctcctgggtgtctccaattctaccctgggttgggagctttgcttgtcctgggacatttcctgcccctggcttcattgctattgtcacaggggtccatgttataccacaaaagatcccacagacctggagatgggaaagacagcttgttcccttcccctgcctggctgtcaggatctccgagaagactaagacctggaagggaataacagctgaaaatacacagcctccgtcatgccctgtgcttctcctcccagatattacctcatctaatgctatttttctcatcttacagaagaggaaactgaggctcacagccaaggctgctgttaacaatagggcacctttgttcaaattagaaaactcgccccttccaggtatatacctggcttgatgagcagaagtcacttttatgtgaaggaaaaggcagtgtcccccatcccgaccccacaggaagacaaattagaaaaagccccctct

SEQ ID NO: 700388 - DNA, 2555 bp, Homo sapiens
tctccgatcctcatccactcactttgcatgtgctgtgaatcgggctgaactcatatttctattttgcatccggacttgatgcttctattgagctttctgttcgcgacactgctctatatgtcagtcctcctcctcctcccatccttcctcctcctcacatcttgttccctgggaggaactccaacaaaactcccttgcttccccaaggaaagagggggtggacagtatcacagcatgggcctcctcaggagatgagctgggaaggtgggaagggaggcacgttcccttcattcctgcccagtaggcctgagtgctcaccctagactcccttggacctctgacctcagatgggcaggagcaagcaggatccacagggcacgtcccttcagtgagcaggcatgagcagaagtaattctaagcagaatctgaactcctctgagaaataaggcagcttgcacaaaaataacataaaatgagacatcacatacacacctggacttgcctttggaggggcagctgtgtgtgcatgggctgagccagagcaccctgtgctgttcactcacacctttcctggcctggcccagaaacagacttcacttgggccctcagctggcccccgggagagcaaatattttgggcttagtcctcaatattttggccagtgctgacaaggcctgggcctagagaccagacataagctttttggaggacaaagactgccagccaaggcagagttatttttgcctgttgggttaaattgagttgggcataacctggctggggtttgctccttgggcagcctgttcctgatttccaatgtgcccagagctgaagtttgcctctcaaaggcttggcagaccaggtgcattcttttttttttccctttttttttttttttttttttttgagacggagtctcactctgtcacccagactatagtgcagtggcacgatcttggctcactgcaacctccgtctcccgggttcaagtgattctcctgcctcagcctcctgagtagctgggattacaggtgcacgccaccacgcccagctaatttttgtatttttagtagagacggggtttcaccatgttggtcaggctggtctcgaactcctggcctcatgatccacccacctcagcctcccaaagtgctgggattacaggcgtcagctaccgagcccgcccggcctgccaggtgcattctaattgtgggagagttttcaggagcagcaggtggcaaagccccctagaaggtcactggctccctctggaagaacaaggggcttagaagatgcatgtgtggaactgagggtgatgtgtacatatgtgtatgcatgcacttgtacacatgtgtgcacgtttaaaactgtgcacaaggagggtgcgcaggtgcgtgtgcatgtatatacctgagtgttgcataaaagcatggaaataggctgttaagctggtcttgcaaccagttctagaaagaatggacttggaatgtatcatgccagtggctctggaaggacacagccagggagtgaaggaaagagaggtggcccctgtggtccccaagctcctcagtggcacttctgggggtcctggggaacccctcccacctatgtgatgtcacctcctctgacatctgcagcctgctctaggttctgaccccttgtsatgacctctggggtccaggatgccctgtgtaatcttgaacatgttccttcatctctctgagcctcagtttccccatatgtacaatggagttggggcagatggcctccaagtcccttcactctaggaggcaggaacacccaggtgcctccagggttggggcttcttcagtgggggcgctcagtctcccacatgtccagacccccactcttgggggattctggagctggaagggtcctgggcatcccgtttggtctgagcacagtcccccagccccaggcttaagccatctggagaatttggggtcatgagtagagaagcaagttgtctggggtcacccaaacagaaaggacagagcagggacagtgcaccctgtgaatgctttctccagctcagacggtgctgggcctgacaccttctcctgggtgtctccaattctaccctgggttgggagctttgcttgtcctgggacatttcctgcccctggcttcattgctattgtcacaggggtccatgttataccacaaaagatcccacagacctggagatgggaaagacagcttgttcccttcccctgcctggctgtcaggatctccgagaagactaagacctggaagggaataacagctgaaaatacacagcctccgtcatgccctgtgcttctcctcccagatattacctcatctaatgctatttttctcatcttacagaagaggaaactgaggctcacagccaaggctgctgttaacaatagggcacctttgttcaaattagaaaactcgccccttccaggtatatacctggcttgatgagcagaagtcacttttatgtgaaggaaaaggcagtgtcccccatcccgaccccacaggaagacaaattagaaaaagccccctct

SEQ ID NO: 700389 - DNA, 1168 bp, Homo sapiens
tggggaaggaagaggaagaagacagggaggatttgggccttaatcacaggcccaaaacttcagtttttccaactctcttcttttactcctatacccagtcaccttggttctaccttaaaatacatccagagtctgatcacctccactgtcaccatcctggtccaacctaccatcatctctcacctggataatgcagcagcctatcattaaactagggagtaacactggtttgtgacttgagaaatatctaaaagcaggcatttcaaagcctgcaatgtctaactgctcagatcccaaagctatgggtaaatacgtcaatcttcactaatgtatgctttcccaagatatttgcatggcacctccccacaacaaacccccaggatctctaataaaaacaatccttttttacctgtggtattaaagtaatcaggtttagacacccacccccttccccaaaataagaactgcaaaggaaagggttttggatgagatttcagactacgaaaatcaataaacttcagaatacaaaaatcaataagccctcaggtgagtcaacacagaatgtggaacacacacacacacctaaaaatttgctcctagttttcacacattccaccactagaaaactgtacacagcaagggataggaaaggcatttaaatcattccttcagtgatcatcaacagctttacaagcaagtactagactgctgtctctatagagagctgcttctattattatgaagaagttaaggcacagagaggacaagagtcaaatcaaagcagagctttatgctgcagtgtgggttacagttacatgcaggtgtactggaatcacacatgctgcggtgtgggttaaagttaaatgcaggtgtactggaatcacacatgctgcagtgtgggttaaagttaaatgcaggtgtactggaatcacacttgctgcggtgcgggttacagttacatgcaggtgtactggaatcacacatgctgcggtgtaggttacagttacatgcaggtgcactggaatcacacatgctgcggtgtgggttacagttaaatgcaggtgcaytggaatcacacatgcggttatattttatcaaaccacctgactctgaacactgagttaggggagaatagtaaatagaaagattcttattcacacactaactc

SEQ ID NO: 700390 - DNA, 543 bp, Homo sapiens
caaaaatcatttgaaaaatgaataaaacggtaagataaaaatggtaaaagccctatgaaaatggtgtaactgtttgcatcagcagataaactaaaattcacaaaaaaagttattaaaataaataagatacaattcattaaaaagttcataaacgggatgggcacagtggctcacacctgtaatcccagcactttgggaggccaaggtggaccgcttgaggccaggagttcaagatcagcctggccaacgtggtgaaaccccatctctactaaaatacaaaaattagccggttatggtggcgcaccctgtaatcccagctactcgggaggctgaggcaggaaatcttttgaatctgggagtcagaggctgcagtgagccaagamtgcaccactgcactccagcctgggtgacagagtaagactccatctcaacaacaacaacaaaaaaaagttcataaatactcaaggaatctaaacacaggaacatgcatgctactattctaagtatcatatattttataagacaggataaagcactataaat

SEQ ID NO: 700391 - DNA, 655 bp, Homo sapiens
tgaggaagaaggtaagagtcagggatgacttctgggtttctgactggaactgggtgcctggtggtggtgtttacagaggttgggaacaagagaaaggaatcatgattggttgagagagagaacaaactgagttagtttgaggtttcaaagtatctatgagacattcaagtggagctgtcaggtaagcaattgtatataaacctgaagcttggaggagaggttgggctagagatgtcaatgtggagagccttggcatgttgatgatcattgaaactgtggccgtgagtaagatcaacttggatggaaatatggagggaaaaggaaagatggcagtgtagggctgagctttaaggaattctggatggatctgcaaaggagtcagagagagaaagctaggagaatgggatgtcctgagagctgagtgargatgtattgggaagagaggattgattagtaacatcaaatgttgctgagagattaggtaaagtgagaacgcaaaagtgtctacactgttttcactgaggaggtggacttttctccagttcttgttctgtgaaggaaatcaacagaaggaaagacaagactgcttggaactagaagacagggctcctcaggcctggagaaaggcagacatgtgtgtaagcatggaacaggc

SEQ ID NO: 700392 - DNA, 2185 bp, Homo sapiens
agggcttggtgctctgtaagatataacatttataaacattcctgggaaaaaagacattactacctgaaaatatcaacaactaaaatgacctatccttagccaccaggtattggtgtcccattcctccctaatgtttagagcagacagcctttctttttatagcgggtctatccttttttcttataaactcttcaataaagacatatttttaagtaaaaccccaaataaatacataaaaacaccctatcctttgaacgagcaattctacctttaggaatttatcttacagatatatactagtgccagccggtatgccaaaaaaaaaaaaacccaactttatacacatgcatatatattaaatataatgttcatcaatatgagaatggttaaataaaccatggtatttccaatccatggaactgctgctatatgacgcttcagaagaataagttagaactacctgtgctgatatgaaaaagcaccaacatggtgggaaaaaaacaaattgcaacacagtgcattctattaccccatttgggtttaaaaataaacttctatttctaaacctgaatagatcacacagttacactaatgaatacaattattgattaaactgtacatttatattatacatacttttttatacatatgttatatttaacaatgaaagttaaaacccttgctaatcatctttaggtaaagtagccacatggcttttacaagaaaataatcaattttttaactcattaagcaggaaagccatgctcctagatgcttccaacaatccatctaaccacatgggaagacaatttggtccagttgctrcctgggaaaacctagcttcagggcaggatccacagctgcaaatagtcctgtgggttccaggctaacctcacccaagggctccttctccagccttcattcatcatgtatggtcctctgcaaaagctagaggactgcctggatgcagtattcccctctgcattcagcttatggaagggtccccacaggtaagcctcagccccttgtctaatggatcctggcattgtcagcaaaccctgattataataccttccccatactgctgggacccccatatgggggaggagcacatccagcctcacccaaccactcagttcagggactctggtcagtaccccaccaacactgctatctgaaagccagtagagaaatgaaggttggcttctcctcagaaaaatagggtagggatctctgaattacatctagtcactgggacatataggacagcattataattggaacttcaaatagtcaaccctcaaagtgagaatggagagaaaatggggcccagcaagagagaggctcaaaagagagggcagtattgaacagaagggaaaggaaaagggaagaaagctgtgaacacagaaagtgagttggggaattgaaaggagcggttagggcatggagagagagaaaagggaagaactctgccccctgccaagttgagaggacacactagaaagggacaggtccatccctcccaacaagcctgataaggccacttcccaggccaggtcccctgccagcccagcccctgaaagacaggctctgcctgcctcctcccagagcattagattaggctttgtgggaaagttgaaatcttgatgatttagaaagaggcccctacagcttaacgtgctggcaatttaactaagcgctcctggttcctgatgaataccaagccagcctggctttgctccatcatgaaagcacgctctcctgaccctctgagggagcagcagctcagtcagcactgcggggtggctcttaatggacaacagtgaatttcacatcaaaccaggaagtaccactcatgcctatcatgtgctgcaccctaagagaccatacaacccagggcagctcaccctccccctttcttctgttttcataggattcttaaaggaataggctttacggacaatgaagattgggggaaaaaaattctagatgataacttcagtttctatcattagcaacatccacaaacagttctctatatgtgaaaggaactcaaagtagtttgggttattgatgagttaaaaaaaaaaaaagcatccctcctgccccccaagaaagatctgagtttcccaggagaatctgagttttctaagagcacgctggcacagaaagaacaatgtaacac

SEQ ID NO: 700393 - DNA, 1943 bp, Homo sapiens
tgcacctctcacccacccctttctcctctctaagttcaatgttttcagattccacgtgtaagtgagatcatgtggcatttgtctttctgtgcctggcttatttcacttattaataaataaactaagattcaaagctgttggggttttgtagctttcttgtaataaataatagccaattagttatcctgcaatgggcgttaggactcagacatttctctgtccatacttgaactcctataaaccttattacccagcacgttgtcttttcacagcctgatttatgctgtggatttgattgtttcctaggtatagtggaaaaagagcatctcttaataccattcatttattcagtgcatctttacttagaattttcttcaaacacggatattaagctgccctaagtggtctgtgtggcctcatctttaatctcatggccacaccatgaggctcctgttaataccctccccattttcaggtgaggaaactgaatattagaaaaggcaaataaattgcctgacgtcttaggatcatgaaagttgttctttgtctcattaagacatttaaggtggtgttagacaagatatacaaaaagtttagttacaagtcattagaatttatatatacaactctctgtcatgcatgctctctctctctctctctytttttatatatatatgtatataaaattagcccgttttcaagttgctaataaagacatacccgagactgggtattttatacaggaaagaggtttaatggacttacagttccatgtggctggggaggcctcacagtcatggtggaaggcaaggaggagcaagtcacgtcttacgtggatggcagcaggcaaagagagagtttgtgcaggggaactcccgtttttaaaaccatcagatctcatgagacttattcactatcacaagaacatcaggggaaagacctgcccccataattcaattacctcctaccaagttcttcccacagcctgtgggaattcaagatgagatttgggtggtgacacagccaaaccgtatctcctatatgtgtatatatacatatctatatatgtatatatacacacacatatatacacacacccatatatacacacatatgtgtatatatacacatatatatacacatatacacatatatatttgtgtgtatgtgtgtgtgtgtgtatatatatatatatatatgctatcctgtaaactgtataatctaatctagatgatgtgatgaaagcaagacatgggactatagtccccaactttcacaaaatatttatccagtagaaacatagaatatgtatccaaaatatgaatgtgaaaactagaatgtgatatgagatgaactttcagatcttcctcctaaatcaaaattacaatgacctgatttggatgattcaggagtgctttgaaggagatagtatattagtagaaacttgaaagaccctcaccgttagagataggaaggtaaaagattccaggagaaatcacaggaaagcagaaaaattgaaatagtgaaagatagtatggcttgggtaaaaatgtttatgaaagggtttagtaagagttaaagcaaaacagtggattcgggtgaggaaatggataacccgaaaaacaagccaatgaacttggtaagaatgaagtttctgaacttggaggtaccatgttcatagtggttttggaaagttttatttgtacaggcttgagtacaatgggttatggcagaagcttgggagaggcaaagcatgcagagaaattggccaggtggttgtttttctttgtttgtttgtttgtttgttgtttttttgagacagagtctcagcctgtctccgagcctggagcacatggagcgccatggtgcaatcatggctcaccgtagccttgacctactgagctcaaataagtgatcttcacaccttagcctcccaagtagtt

SEQ ID NO: 700394 - DNA, 587 bp, Homo sapiens
gagcacttcattacttcattcccattttcaacacatgatggacagtttctgaacacctgaagttttgtttttcctccttttcccatttctaattattaaaattcaccttatgcttaacttctaagagtagcatgcacagacattctagtgttgcaaagtagactaatattactgtttctgaaaactcaagaattcctagaagttctgtttgtgctcatcatgggccatccttccagaaaactttctctaacaagatgtgggatgggcrtggtggctcacgcctgtaatcccagaactctgggaggtcgaggaaggtgaatcacctgaggtcaggagttcaagaccagcctggacagcatggtgaaaccccgtctctactaaaaatacaaaaattagctggtcatagtggctcacacctgtaatcccagctactcaggaggctgaagcaggagaatcgcttgaacccgggaggcagaggttgcaatgagccgagatcgtgccactgcactccagcctgggcgacaagagcgaaacttcgtctcaaaaatatatatatatatgtgaatagaatacatgccagcttatag

SEQ ID NO: 700395 - DNA, 828 bp, Homo sapiens
ttttttttctcaaacaagagtaataatgacctatcttaccttcatttgttattgtaaattttattttacctaaggtgagtatattagtccattctcacgctgctgtaaagatactacctgagactgggtaatttataagcaaaggaggtttaatggactcacagttccacacgactggggaggcctcaggtaactttcaatcatggctgaaggggaagcagtcaccttcctcacaaggcrgtaggagagactgtgagcatgtgagggtggaactgtcaaacacttataaaaccatcagatcttgtgagaactcactcactatcgcgagaacagcatgggagaaaccacccccatgttccaatcacctctctccaggttactcccttaacacttggggattatggagattagaattcaagatgagatttcagcggggatactaccaagccataacagtgagtctagctttaaggaccaagtttattaaacttactgctgaatccaaaattaggattcatttcctccaatttggctgggcaacttatgtttcgttgtatgctgcatgccttgattatagtgtatgacatatggctaaaatcagcaaagcacccgaagtccgaactacttcaggtgaatcactgtgcagttggagcctccttatacacagtattagtacgtggggagaccttgcttacgtgagaaaatcattagtaacagtttacaaactaagtcagaactcggccaaatttgtattacttatacaaattacttgaataagtaatttatgttcctacaaaacaaagttaaagatacactttggaaaaatca

SEQ ID NO: 700396 - DNA, 987 bp, Homo sapiens
aaagtttgtattataggaaatacaatgtaaggaagtagaaaatctatggaaatcctgctgggtaacctgcatatgatcattgttaaaatgagtagtgagactgaaagtactacaggaatttggagaagaccaggcaggggtgataggggcagctgaggtaacctcaaggcctgtgtaaaagcaggagtaagaaaaagagccagtcagccaggaaaaaaaatgggagaaagtgtagaatcaactgtccattgtggagagtttgctgtgggcagccctgagagaaggtctagaggtttccttgacaggtttggcttcagatttatgcctacgtacttttcaaatcaggaaacttttcctgagtaggtatgagttgtcatgaaacaggatgaattggtcattaagaaccatctgctttagaattgaagagatttgggttcaaatcccagcttttaaaatgtttagttctgggaatgggaataagtgattaagcctttctgagtctaagcctttcttgtctctaaaacttagggagatagcacctattttatatgactacagttaggtataaattggataatccatttaaggcatcactttggcccagcttgtcacaatattccatgttagtggatgttgttgttcatgtcagtttcttgtaactagccatacaactcatgatctttctcatcaaacttgcacctcctcagtgaatagctgctccaacagcttgcatcatctagaaaccaggtagttattctgatagcagtctttccttgcctcctacatttaaataatgacaagtcctgctcattttctttcctaaagagatcctagtctatttctctctatcattcatcsaaagtaatatcatttcttgaagaaatcactcaacactttcctaattattccctccaaatatgttttattccctccccatccacttgtcgctcacaagatcaaaagccatccttttaaaatgctgctcta

SEQ ID NO: 700397 - DNA, 1337 bp, Homo sapiens
tgcctaatgtgaagcactgaatgacacccataaagcatcctacaaaaaaagtgtgctcttcaaaaatgtcaatgcaataaaaaaaaacaaaagattaaggaacaagtgcagattagaagagactagagacatgatagctaaatgcaatgtgtaattatagattccatgttggacaaggaaaaaaaattactgttaagacattattgagataatttccaaattttaaaaatggattatagattatattgcatcaacatttcctgaatttgataactgtactacagaatggaagagaattattcttaggaaatgcccactaaactattttagagaaagaattatacacatgtgggcaagtggtgacagctgctctaggtaaggagtatataggagttagtgtactattattccaagttttctgtaagtctgaaatttcaagtgtttttaaagatatgcacaacagttcattgtttcttttttcatgtattggatcactacaaaataatcattcctacacatacctcaggagcaaggacaaacgtttgcatgaatctcctcaaagcctggttgttgttagagagaagccccatcacctggactaccacaccatcatttagcgtggcatgagcatcaacatggcgaatcttggtgtggcagttggtgaagttttgtgacatcactttcctgtggatttccttaaaaaaataataataataataataatcaactgagaatgccttaaaatttaaataacctccaactaaaaaaaaccttccaacacaacacaaagagaatgtgtatatttaaattacaggatatgcagactgaattttgatgtttctttgtatactctattcccagtgaccgcgcttgagttttttaaataactgtcctgaattaacacacttttcaaagtttagaaaagatgatccccatgctaaagccaattatcttccaacacacaaaagctttagaatatatcatacaaaattaacaaatctgacatcacataagtatttcaacaaatatattaatcaaatagtaataaaacacatcaacttttactaaaaagttgagaaactggatctttatcagcaaatctattaagtatgatccacttcaattttatgagttattttctacctgcttaacagcctaaataaggcttgaaatgcttactttctgtccgtagactgcatctgctggctttccatttgaatccaatcccccatggacataagaagagttctttccataaaatctrtaaaatgggaagatgatttacttgtcatcttcaagtatcttaagtttatttttcacgtctgatactggcaaac

SEQ ID NO: 700398 - DNA, 630 bp, Homo sapiens
ataatcatgtggtatccaatatgcaagctggtcaaggtgtaagggaaaaaatagttctggtccagcaaatacacattttgaaacttctatgaaattattctaacaagtccacataaatagacagttttgtataaagcgacattgtaagagaaaataatagaagcaatctatagatccatcattaggagattaaagtacactacatctctataaaaagctgtgtagccactaaaattaatgggatacaagtattaccctgaaagatgactccagattatcaagtaagaaagttaagacagtatattaaaacatgtttctatatatatagaaaaattgtttctgtggttttactactttcataatttatctgtgttctaattttcaataagcatgcatcatttctactaaagacactaattttttaaagcgcatcaacacaaaagtatggtattacaggaacagtcatggattgtcttcaatacattcttattttttacatccacctcagctccagcaatctttaatacattcttagtaaataatgcatgactatacctttacatttcaattgttattttccaataatgtrcaagtttagataacttagtttaactttcaaaaattattttt

SEQ ID NO: 700399 - DNA, 798 bp, Homo sapiens
tgtgctagtgaacttttctaaacttgttttatttcctttaaaacgaggatagcactactttttcttttagggttattgtaagagttagtgataaagtatgtaaaatacttaatagtataaatttcatacacagtagatgttattattatcataatacctccatttactataaaatacaataactgagcagaaagcacatttagctctgggagcatggaaaatcatgttgcttctctgtgtcagactcaaacttcagagaaacaaataaacaattttattatttgaaaactcactctaggctttataaaacagaaactaaaaattgtaggaaatagattcttttctaattaatgaggttaatcatcagataattcagaacatctaaaaatcctttaaatatttctgaagttcatcttgctttaccagtacaatggagacctaacacatttatcacttaggcaaatgtccaaacaaagtttgagaaatatgaataaagtagcatagtttttatgtcagtgggagctttataagatttattatggttccactctagtacagacaggtgaattcactgcacagctggcaactttttacttcactttgtgtagtgaagacctggcatcaaccaaaggttcccattttcttcatccaaatggataattttgcccaaagagatcactttgtcatatgwgctttcatgtggtgagctggcagaattgctgctgccttatatgatcaaacaacaacaataaaaatcacaggggatgcagtgtataggcaaagtacaattagagccat

SEQ ID NO: 700400 - DNA, 866 bp, Homo sapiens
cgagagtgtgaatcaagcctgggaaacacagggagaccctgtctcttaaaaacaacaacaacactrgtgctgctgtccactcccagcaatgtttatatccgactaacacacctgccatgaactatgtaaaccgaataaaatccaaagaaaagaataaaccagttgttggaagcactggtgaccaaccagagcggccaggattttggggatcaagctcctggaaaggagggaaatgccctttctggagggagccctttctggcctctaccttttccccatggggagggcagaaaacggccacctcgacctttcagcagcttccttgggtggggaaagcaaaatgggagctcagggttaccaaggcagctcggattcaaggggctgtgatgtcaaagcaaagggaaataagtgcaggagggcaaggtgggcggtgcacactcagtgcgcttgtgaaattggccaactcctgagctttgagcgaggcagggcatcagaggctaagacaccaagcagaaagccgctaataagaggctcaacgccaggtgcagtggcttatgcctataatcccagcactttgggaggccgaggcggacggatcacctgaggtcaggagttcaagaccagcctgagtaacacagtgaggccccatatctacaaaaaaataaattagccgggcatggtggcacactcctatagttccagctacttgggaagctgaggcaggaggatcacttgcgtctgggagatcgaggctgaagtaagccatgaagtgattgagccactgtactccagcctggggaacagagtgagatcctgtttcaaaaaacaataaaagctaacgggtggttcagcagcatattggtaat

SEQ ID NO: 700401 - DNA, 866 bp, Homo sapiens
cgagagtgtgaatcaagcctgggaaacacagggagaccctgtctcttaaaaacaacaacaacactagtgctgctgtccactcccagcaatgtttatatccgactaacacacctgccatgaactatgtaaaccgaataaaatccaaagaaaagaataaaccagttgttggaagcactggtgaccaaccagagcggccaggattttggggatcaagctcctggaaaggagggaaatgccctttctggagggagccctttctggcctctaccttttccccatggggagggcagaaaacggccacctcgacctttcagcagcttccttgggtggggaaagcaaaatgggagctcagggttaccaaggcagctcggattcaaggggctgtgatgtcaaagcaaagggaaataagtgcaggagggcraggtgggcggtgcacactcagtgcgcttgtgaaattggccaactcctgagctttgagcgaggcagggcatcagaggctaagacaccaagcagaaagccgctaataagaggctcaacgccaggtgcagtggcttatgcctataatcccagcactttgggaggccgaggcggacggatcacctgaggtcaggagttcaagaccagcctgagtaacacagtgaggccccatatctacaaaaaaataaattagccgggcatggtggcacactcctatagttccagctacttgggaagctgaggcaggaggatcacttgcgtctgggagatcgaggctgaagtaagccatgaagtgattgagccactgtactccagcctggggaacagagtgagatcctgtttcaaaaaacaataaaagctaacgggtggttcagcagcatattggtaat

SEQ ID NO: 700402 - DNA, 1390 bp, Homo sapiens
tcttaaactattcttgtattgccatttaaatcctacaaatacaacacagttgattgttccctcatctataatggaactgctacaaagctttaaaaatatgatctgcaattaatctgttaaataattccagtgaaaagccagtaggatttcccttaggtcacaaaaaatgattttacagatcacttggaataaacaggtggtaataacaccgacattttaggcaagaaaatcagagctggtacagacatgctggaattaaaataggagtgagacttctggctaaacccaaatgaggaggtgggcaaatttcctccccaaaagcaactataaagccggacaaattgacagagtgagcatttcagagctcagcgagttgaccaaaggtctactagaatcattgaaccttaaaaaactgaacttcaggtgggaagagtgggagtttgtagcacttttactgtgggccactttcacttcttctgcctcagctctggacacatgaacctcttacagctggagagctgcaggccatgaggcttggcagggaggtggaaggggctcagtcacttgtagaaggaagcaatgcccacagccagtggcactgctaatggaggtgagatcagccacggtagggaaaagcgtatcactggctgaggctgagtctgtgcatatgcaaagagacgccaaaggactcagcaaagcataagtgccagggagaacccgacaatggcccaaatgtggaatgcacctcctcatacaactgaaccatcagcaggagaaagaaggcgcgtgtctgagcacaaactgtggccaatctttggatgaccactaagtgacaaagaaacactgcctgcccctaatgaaccaggaaaaaaatcacgaataagataaaaccaaaaaatgtttaaaagaattgaggaaatacagcagaggctatacacactatgcaggaaccagatttcacagactgagccccaggaaattactaaacagactagacgccaccacaacctcccagagttttaaaagtcagactccagggtagctaaagtacgcttcaactaaacatgaagaggtaagcaaaaaaataggagaggccaggcgtggtggctcacgcctgtaatcccaacactttgggaggccaaggcaggcagatcacctgaggtcaggagttcgagaccagcctgaccaacatggtgaaaccctgtctctactaaaaatacaaaaaaaaattagccgggtttggtggcatgcacctgtagtcccgggaggctgaggcaggagaatcacttgaayccgggaggcagagattgcagtgagccgagattgctccactgcactccagcctgggtgacagagcgagactccgtctcaaaaaaaaaaaaggcactat

SEQ ID NO: 700403 - DNA, 1135 bp, Homo sapiens
taaataaataaataaaaacaaataaataaaatgcggctactagaaaattgcaaatttcacacgtggcttgtgttatgtttctttattggccggtaatgatctagaagacacttagaataaatcatctcaggataagtttaagaattcacaaatattttaagagattctattttactagaaagtaagcaaaatgatttttagatgtagatgtgatctctatctagtaagaactcatgtaattttgacaaataattactctatttggtgtcccacaaatacagttagacatggcctctatcctcaagggttttgcatggatggggtgagaaagaaaaggagacatacacagataattccttacgtggcaaaaggtaacaggtgcagactccagatggaacagggtaccataaacaatggggcaggggagtctgggcagcatcccgtcctggaccctgctggaggtggggtagggaaaatcaggcagaggtgtaaacaaggggagggtgtgtggggcagggaasgggtcaagagaccaagctgggtggagctcggggaataaagggggaaataggatggaccacttggagaaagtctacgaatgcgagtcagagcccctggactgcaccacaggggcagaggtcaggaaactaccgcccaccacccaaatctggcccagccgctagcctgtttgtgtatggcccatgagctaagaatggcttttacattttgaagtggttagaaaaaaatcaaaatcaaaatattctgtgatgcatgaaaattacatgaaattcacatttcagcatccataaataaagtttgattggcacacggccaggcccaagctctcacatgttgtctacatctgctttcaagctccatcgggagagctgagtagttgagatagtgaccatctgggcctcaaaagctaaaacatttactatctagccctttatagagaatgtttgctgatccccacttccttggaatactaaaacatcctgtgggcttcctttgctcaaataaaataaaggcactgctcaaataaaataatggcacttgcgccaatctgcagaaatatttattgaataggttcctcgaatttaaaacattttccctaccaatatttcttaaaccc

SEQ ID NO: 700404 - DNA, 1323 bp, Homo sapiens
tgccacctactctggaggctgagaccggagactcacttgagcacaggagttcgaggccagcctgagcatcatagtgagactcccatcttgaaaaaaacttttaaaaattagctgagtatggtggcacatgcctatagtcctaggtactttggaggataaggtgagaggatccttygaacccaggagttcaaggctgcagtgaactgtggatcatgccactgcattccagcctgggtgacagagtgagaacctgtgtctgaaaaaaaagtaatacaagattttaaaaaatttaatgtaaaagcagggataaggatataaacatatttgtagccatcatcgtctttttttttttttttttttttttgagacagggttgcccaggctggagtgcagtcgtgcgatctcggctcattgcaacctccgcctcctgtgttcaaacgatcctcctgcctcagcctcctgagtagctcagattacaggcgtgagccactgcgcctggcctgatcatcttctgtatattgatgtatttcctttcagcctttcattgcatttttaaatgtagtagagatagaactaaagatagaaatttgtatcttagtcttatgtttttaacctgtaattgaattataagcattttcttgtgtaacaaagagctctttggaagctgtgtctcacaagcagttatccatgtcacccaaatgtgccagtgctgccttgaagcccatctactgcctctgcttttggaaagcatgctccttcccccactgaaagaaaactccagtttcccctctctcttcctctctttcatgtaactttttttttttcagcacactccttgccttttctcttgtatttgaagagccaacagaagttcagagtggcgggaacttggagaataaggaggagaatagccctagatgtgaggtagaacaccatccttttgctggagatagagcagtaggcagagatggacaatgaataaattaacaatcaatagataataaagtcaggagatgagaaatgccatgaagtaaagagagttgtgggtaggtagctgctattttagataggtggacagggaaggcatctctggtgaggctatatttgagcagagatctgagtgttttacagattagaaagctcagaaaggtaaagtaacttttctaaggttacaaggcagatttagtattaaattagtttagtttagtttagttttgtttttaaattcagaagccctctgtaaatagtacttcagtgttcttagaaatccttttatttcaggctgggtgcagtggctcacacctgtaattccagcactttggg

SEQ ID NO: 700405 - DNA, 573 bp, Homo sapiens
aatgaaatgagaaactttctatcttttctgtgttccgagatggtttatatacagagacgatctgtttctttgaacttctggtaaactatgaacataaaagtgatgaggcttttttttaaaatgtaaatgttcgttatccttaaatttcttctatagttattcttttattcaagtatgttacttctcattgtcatatctgataatttttttagacaattcatttattttagtgtagattttcaaatttaatggtataaagttgttctgtattttatcattattttaaaatgtsttttgtatctgaatttttattcccttcctcaatcccatgttgtttgtgttttctctttttattctcatccatattgccacatttattttcttggtcttttcaaagaaactgtttttagttgtattgaatgagccttttgggggaaagggtgtggagcggttctatttaattagtgtctgctcttatttttatgaatcccttcttactttcatcaggtgtatttttattacccccctccctagtttatggaattgaaggctttgttcatttgttttcaattc

SEQ ID NO: 700406 - DNA, 573 bp, Homo sapiens
aatgaaatgagaaactttctatcttttctgtgttccgagatggtttatatacagagacgatctgtttctttgaacttctggtaaactatgaacataaaagtgatgaggcttttttttaaaatgtaaatgttcgttatccttaaatttcttctatagttattcttttattcaagtatgttacttctcattgtcatatctgataatttttttagacaattcatttattttagtgtagattttcaaatttaatggtataaagttgttctgtattttatcattattttaaaatgtgttttgtayctgaatttttattcccttcctcaatcccatgttgtttgtgttttctctttttattctcatccatattgccacatttattttcttggtcttttcaaagaaactgtttttagttgtattgaatgagccttttgggggaaagggtgtggagcggttctatttaattagtgtctgctcttatttttatgaatcccttcttactttcatcaggtgtatttttattacccccctccctagtttatggaattgaaggctttgttcatttgttttcaattc

SEQ ID NO: 700407 - DNA, 573 bp, Homo sapiens
aatgaaatgagaaactttctatcttttctgtgttccgagatggtttatatacagagacgatctgtttctttgaacttctggtaaactatgaacataaaagtgatgaggcttttttttaaaatgtaaatgttcgttatccttaaatttcttctatagttattcttttattcaagtatgttacttctcattgtcatatctgataatttttttagacaattcatttattttagtgtagattttcaaatttaatggtataaagttgttctgtattttatcattattttaaaatgtgttttgtatctgaatttttattcccttcctcaatcccatgttgtttgtgttttctctttttattctcatccatattgccacatttattttcttggtcttttcaaagaaactgtttttagttgtattgaatgagccttttgggggaaagggtgtggagcggttctatttaattagtgtctgctsttatttttatgaatcccttcttactttcatcaggtgtatttttattacccccctccctagtttatggaattgaaggctttgttcatttgttttcaattc

SEQ ID NO: 700408 - DNA, 648 bp, Homo sapiens
ggtgtgagcgattcagcatattatcattgggtgaatcagggggcgtggtggggaatttcccgcagggcggaagctccagaactcccggcaaagcccagctacaggcgggcgactgcggggggcccctgaggcggcgggggccatggctggggtcgcgtgcttgggaaaagctgccgacgcagatgaatggtgcgacagcggcctgggctccctgggtccggacgcagcggcccccggaggacctgggttgggcgcggagttgggcccggggctgtcgtgggctcccctcgtcttcggctacgtcactgaggatggggacacgtgagtgaaccttaggctgccaaacggagccctaggacccggcgtcacattcctcattaatctctgatccctgaggcttsctaacctcatactcctaaatctgacttccgatgctgaacttcctgacctctaacccccgagtcctaacttttaacaaaaccaatcttctatctagctatgatcctaacccaatcatttcttaccttcttttcttgaactatgattctcagctcctggaatccacattgtatccactgatacccaaacctgactccagtcctgagacttctgttagaactgtggcttctcctgacttctaacctccaa

SEQ ID NO: 700409 - DNA, 2523 bp, Homo sapiens
tgtaatgacatgagtacaatgaagtgacagaataaacatatatatttttaacttctgttcttgtcaactaagtaaaattaggaacaaaaaaggaaagggggaggggtcttatgcaaaaaaaaagtcacgatttacaacaaaaagtattaactatgtagaaataagcataaccagaaatgtccaagatacgtatggaaaaacactacagatagtcaaacaaataaaaatattgggttaatagaaatccatcacatgttcctgaaagtgttgtatctagatctacatcaattctacccaaattaaagcaaccacttgatgaaactgcagcaatttaaaaaactctcaaagagcatgtaatatgggaatacgaagttgacaagatgttattaaagacgaataaaattataccaatacctagacacctgatcccaacattaaacatgaaatacactaaaccagagttattttctggaggagtatttaaaatgatggggatgttattacttgggtcgcmatgaacctgaaaacccattttctacagaatatacagcagcagggaagcaaggggaccagcagacccctttttaagtacgcatgtgataagcaatgaacacgaactgcccagagcagtctccaacactgacacgattcgcttccccaccacgacgccctagcgctactgtgcaacgaagacctcccaagcactggttccaatgcggagaccatgggctcccagactctgggaactccaacacgactgcgaaacgaactccgagcgaggactccccgagagctccccgcaacacggacctcacgcgctagcgaacaacagaaaaaaaaaagcgcgctctccctgcccctgaaacattcccagaagcccacgcagaccagaccgatgacctgtctccactgctggaggcgagtcagggacccgaagtctctaaacactcgcctctacccgccgccccgcgaaccccacacactgcagacgcgacactcgcaagtttcggggatggcggccggcgagggccatactgcgtctttccggagacacggaatacggcaccagccgtccctttatgatgcaatatgtctgcgcccaggggacgcttgctgggagcagccattttcaaccctactgccgtagagcaggcggagtccctcttttcgcgccttaagacaggtaggttctgacgatgaaaagcaattgaaaacgacccatttcaccctttttccagtccacgtgaactgctagatcttggctttgcaacattagccaggggcgctacataaactgcttagtttctcaaaggctcaagcctgccctgatctgtctacaggatgggtagagatggtcacagacatttaggcactttgatcctaagaagaatggaaagaaaccatgtggcgcggcagtcttacaggaatttcaagagggagggacctgagcaacaatcggaggggttattactcctgaggatgcatctggctggagaaagcagcctttgagaactgcctaagaagtatctttacatctacatcagatgtagcctcagaggaaggagtcagtcatagaatggataaaacaaccgcgtgttaaagctttggttataattggtgtggagaatggagaacacagttgatcagcagttgacaaagtggggaaccaacacgaaaacagggctctctcaccctggaaaagccaaaggcagaacaagcctttacatccaggaaggtgggagcaacttgaaatcaaaactctgaaggggagatgattctgttcaatactgaaactcagctgatcaattaactgatgaattctagcaccaaacctgctccctataattttataaccagcctcagagaacctttaaagggattgatcattcactcatttatccagcgaatgtttataaaatgcctaatgtgtcaaacactgttgtgcgtgctgggaatacaacagttggaaattcaggcacaaagactctcattcatggagattacattctactggcaatttcagtgtgtgagctaaattgagtggtgctaactgttgacttggctggttgactgaaacttggactcaaaatttgcctacactaaatgaagtttaaatgccagaaatttcctcatatattataaagtacccaaagataaatggagtttggaatgctagaatgaatttatcatgtaaaatcaagattacccatacctcaaatatgtattccagtagcatctagaagacaatctcttcactgacactgatctggtcacaggaaatagagatatactactgtaagattattttattatacagtaagtgatataatgtccttgaagttagaatgataagttcatgattttctttcagtcagttcaggctactagaaaaaatacaccatagactgactgactgccttaacaaacattcatttctcacgttccagaggctgaggagtctctagaactggactctaaaacacaatcaaggtgttggcaggtctagtgtccagtgagagtcca

SEQ ID NO: 700410 - DNA, 2523 bp, Homo sapiens
tgtaatgacatgagtacaatgaagtgacagaataaacatatatatttttaacttctgttcttgtcaactaagtaaaattaggaacaaaaaaggaaagggggaggggtcttatgcaaaaaaaaagtcacgatttacaacaaaaagtattaactatgtagaaataagcataaccagaaatgtccaagatacgtatggaaaaacactacagatagtcaaacaaataaaaatattgggttaatagaaatccatcacatgttcctgaaagtgttgtatctagatctacatcaattctacccaaattaaagcaaccacttgatgaaactgcagcaatttaaaaaactctcaaagagcatgtaatatgggaatacgaagttgacaagatgttattaaagacgaataaaattataccaatacctagacacctgatcccaacattaaacatgaaatacactaaaccagagttattttctggaggagtatttaaaatgatggggatgttattacttgggtcgcaatgaacctgaaaaccmattttctacagaatatacagcagcagggaagcaaggggaccagcagacccctttttaagtacgcatgtgataagcaatgaacacgaactgcccagagcagtctccaacactgacacgattcgcttccccaccacgacgccctagcgctactgtgcaacgaagacctcccaagcactggttccaatgcggagaccatgggctcccagactctgggaactccaacacgactgcgaaacgaactccgagcgaggactccccgagagctccccgcaacacggacctcacgcgctagcgaacaacagaaaaaaaaaagcgcgctctccctgcccctgaaacattcccagaagcccacgcagaccagaccgatgacctgtctccactgctggaggcgagtcagggacccgaagtctctaaacactcgcctctacccgccgccccgcgaaccccacacactgcagacgcgacactcgcaagtttcggggatggcggccggcgagggccatactgcgtctttccggagacacggaatacggcaccagccgtccctttatgatgcaatatgtctgcgcccaggggacgcttgctgggagcagccattttcaaccctactgccgtagagcaggcggagtccctcttttcgcgccttaagacaggtaggttctgacgatgaaaagcaattgaaaacgacccatttcaccctttttccagtccacgtgaactgctagatcttggctttgcaacattagccaggggcgctacataaactgcttagtttctcaaaggctcaagcctgccctgatctgtctacaggatgggtagagatggtcacagacatttaggcactttgatcctaagaagaatggaaagaaaccatgtggcgcggcagtcttacaggaatttcaagagggagggacctgagcaacaatcggaggggttattactcctgaggatgcatctggctggagaaagcagcctttgagaactgcctaagaagtatctttacatctacatcagatgtagcctcagaggaaggagtcagtcatagaatggataaaacaaccgcgtgttaaagctttggttataattggtgtggagaatggagaacacagttgatcagcagttgacaaagtggggaaccaacacgaaaacagggctctctcaccctggaaaagccaaaggcagaacaagcctttacatccaggaaggtgggagcaacttgaaatcaaaactctgaaggggagatgattctgttcaatactgaaactcagctgatcaattaactgatgaattctagcaccaaacctgctccctataattttataaccagcctcagagaacctttaaagggattgatcattcactcatttatccagcgaatgtttataaaatgcctaatgtgtcaaacactgttgtgcgtgctgggaatacaacagttggaaattcaggcacaaagactctcattcatggagattacattctactggcaatttcagtgtgtgagctaaattgagtggtgctaactgttgacttggctggttgactgaaacttggactcaaaatttgcctacactaaatgaagtttaaatgccagaaatttcctcatatattataaagtacccaaagataaatggagtttggaatgctagaatgaatttatcatgtaaaatcaagattacccatacctcaaatatgtattccagtagcatctagaagacaatctcttcactgacactgatctggtcacaggaaatagagatatactactgtaagattattttattatacagtaagtgatataatgtccttgaagttagaatgataagttcatgattttctttcagtcagttcaggctactagaaaaaatacaccatagactgactgactgccttaacaaacattcatttctcacgttccagaggctgaggagtctctagaactggactctaaaacacaatcaaggtgttggcaggtctagtgtccagtgagagtcca

SEQ ID NO: 700411 - DNA, 571 bp, Homo sapiens
tttaatcagtagtatattaaacatttttactgtaccacatgttccccttacattttcttctgtatttttcatatattttcctctctgttatattttaagtgaattggctcctgttttaatttccaatttacttattttttaaagctgtgtttaatttgctactaaacacttctattgagtacacaatttcagccattaaawtttttcagatctagaattacattttattcttaaaaagtattcttgggagaacttcatcttgcctattttcctgaacatgctaaccatagttattttagtcaatgtctgataaccttaaatctatgaagatgttcctatttgtatgatttctagccaccccccacttggttttgtttccttctgtgcttgataatttttaaattttataccagacatactctctgaaaaattgtagaagctttcagtgattatcttcttctacatgacagtgagagtataaacataccaatttgattcaatccagaactgagctgactcctgtctgggtttcactgtttgtaaggctgattctatctctggtttgtccttc

SEQ ID NO: 700412 - DNA, 649 bp, Homo sapiens
gagagagagagagagaatatatgtaaatatattccacacatgtacggtgttgtaactttagagaccctgtctctaaaatagaaatattatatatattattacatattatgtatatatacatatatatatatttttgagacagagtcttgctttgtcacccaggttggagtacagtcgtgcaatctctgctcactgcaacctctgcctcctgggttcaagtgattctcctgcctcagcctcatgagtagctgggactacaggtgcccaccaccacgtccggctaattttttgtacttttagtagaaatggggtttcaccatattggccaggctggtctcgaactcctgacctcgtgatccgcccacctcggcctcccaaagtgctgggattacaggcgtgagccaccacgccaggctaaagatattattttttagagacagggtcttgctgtgtcacccaggagggagtgcagtggtgcaatcatagttcattgcaaccttgaactcctgggctcaagccagcctcctgccacagcctctctagtagcggggtctacaggcacacaccataagtaagcctggcttatttatcttttyttgtgtgtggtggagacaggatcttgctatgttgtccaggctggtcttgaatt

SEQ ID NO: 700413 - DNA, 609 bp, Homo sapiens
gtcaaaggcaatccatcaatgagtgttacatcctctacaagtcgaacttccttcctttgtttttttttttccttttgagacggggtcttgctctgttgcctaggctggagtgcagtggcacgatcttggctcactgtaatctctgcttcccaggctcaagcaattctcctgcctcaccctcccaagtagctgggattacaggagcacgccaccatgcccagctcacttttgtatttttagtagaaatggggtttaacccagctgagtatctggacactaaaataaaatagcaacgtgctccttagttcacatccaacagctttatycttagcatgtgtggcaattcttgattaattggaattaaaataaacaatagcacctgtggtgcaaatactatttaaaaaaaaaaaaagaaatggggtttaaccttgttggccaggctggtctcgaacgcctgacatcaggtgatccgcccacacttggcctcccaaagtgccgggattatgggtgtaaaccattgctcccagcctgaactttccattttttattttatctatttgttttttttgagacagagtctcgctctgtcactcgggctggagtgcggtg

SEQ ID NO: 700414 - DNA, 1086 bp, Homo sapiens
catatacatatgtatacatatacatacgcatatacatatacatatgtatatacgcatgtacgtatacacacgtatatatgtatgtacatatatataaatatatgtatatgtgtatatatacacatatatacatatatgtacatatatgtatatatgttatatatacacatatatatatatttgttcttttttttttttttttaagcagagatgaggtttcaccatgttggccaggctggtgttgaactcctgacctcaagtgatccgcccacttcagcctcccaagtgctcgggttataggcatgagccactgtgcccggcccacctgataaagatttaagaatatgcattcaacattagcacagggcctgaaaatgtgaaaaaatgaaacttatcacaaactataattattttataccacctgacatttatcacaaacttcaactcttttatgcatttagtttttgtcagccccctagcttataatgtaagctccatgagaaaaataccttgtctttttgcctcaatagttccagcctcttcagcctctgatatctgataggtactcaatgaacgtgaaaaagattcatatcctgggaccttaagtttactggtactactatttaccttaaaaaggcagcaagagtctctctgcacaaatgtgtratacaattactaactgtatgcaaagtctccacataaaaattctagaacttacacttcattgtagttgtatcctctgaatcagtccaagatgggttccaggacatccccaaatgacatcaaaatctccagatactcaagtccctgatataaaatggtataactgcatataacctacacacatcctcccatgtagtttaagtcatctctaggctgcttataatatctaacacgatgtctacacattgcttcatttgtgtggattcttcccacgtaggttaagtcatctctaggctacttataatatctaacacgatgtctacacatcgcttcaatttgtgtggactcaacgcaccgctcagcatgtagcaaattcggatttcgctttttggaactttgtggagttttcctgaatatttttga

SEQ ID NO: 700415 - DNA, 1086 bp, Homo sapiens
catatacatatgtatacatatacatacgcatatacatatacatatgtatatacgcatgtacgtatacacacgtatatatgtatgtacatatatataaatatatgtatatgtgtatatatacacatatatacatatatgtacatatatgtatatatgttatatatacacatatatatatatttgttcttttttttttttttttaagcagagatgaggtttcaccatgttggccaggctggtgttgaactcctgacctcaagtgatccgcccacttcagcctcccaagtgctcgggttataggcatgagccactgtgcccggcccacctgataaagatttaagaatatgcattcaacattagcacagggcctgaaaatgtgaaaaaatgaaacttatcacaaactataattattttataccacctgacatttatcacaaacttcaactcttttatgcatttagtttttgtcagccccctagcttataatgtaagctccatgagaaaaataccttgtctttttgcctcaatagttccagcctcttcagcctctgatatctgataggtactcaatgaacgtgaaaaagattcatatcctgggaccttaagtttactggtactactatttaccttaaaaaggcagcaagagtctctctgcacaaatgtgtaatacaattactaactgtatgcaaagtctccacataaaaattctagaacttacacttcattgtagttgtatcctctgaatcagtccaagatgggttccaggacatccccaaatgacatcaaaatctccagatactcaagtccctgatataaaatggtataactgcatataacctacrcacatcctcccatgtagtttaagtcatctctaggctgcttataatatctaacacgatgtctacacattgcttcatttgtgtggattcttcccacgtaggttaagtcatctctaggctacttataatatctaacacgatgtctacacatcgcttcaatttgtgtggactcaacgcaccgctcagcatgtagcaaattcggatttcgctttttggaactttgtggagttttcctgaatatttttga

SEQ ID NO: 700416 - DNA, 2010 bp, Homo sapiens
tatatagcatatatatatatatatatatatatayacacacacatatatatatttatgtgtatatgtattttttttttcttcttgagacagagtcttgctctgtcgcccaggctggagtgcaatggcgtgatctcagctcactgcaaactctgcctcctagattcaagtgattctcctgcctcagcctcccgagcagctgggattacaggagcccaccaccacgcctaattttttgtatttttttttttagtagaggcggggtttcaccatgttggccaggctggtctggaactcctgacctcaggtaatctgcccacctcgacctcccatagtgctgggttacaggcgtgagccaccacgcccagccttacatagcatattaatacacacagggcatcaccgtcctcactccagggttcaaagctgaggttctgtggtgttgactgggttgctctgtttcaggggaaagtacgttaatgcatacaggatgataacgcctggtatttgccagttgtcagagtgggaactgatcaatcaagccccagagaaagatgactggacggcctaaggattaatctgggataggcagtcactttttcccgtgaagtcgggtgggtgaggagttggggagaagctagttattcgagtccaggcaggaatacagctggagggaggtaaaggaaggctgctggttgaggttattttctgaggatgagtgacttccctaagcttgcattttgtctctatgctttttctacagaccgtacccctcccacctcacctttctacccaggtgtcctgaatgattagaaagcagcagttaagattatagggcttgaagtctcagacccagctttgaatgatttgctgctttctaccccaggcaagccatttaacttatctggggctcagcttcctcccttggtaaacaggacaaacaacaccgtcagaattgtatggcatttcaataactaagttacggttaaccatagtatttgcacaattagcaccaaaacaccctctggactcctaccaaatgcagaccagacattagctaatcctgacattcaagttgcagtaccccctactctgtacttaatttttacttgagacgaagtctcactctgtcacccacgctggagtgcagtggcgtgaccttggctcactgcaacctctgcctcctgggttaaagcgattctcccgtctcagcctccctagaaggtgggattataggcacatgccaccacgcccagctcatttttgtacttttattagagatgaggatttcaccatgttggccaggctggtcttgaactcctgacctcagatgatccacctgcctcggcctcccaaagtgctgggattataggcgtgagccactgcacccagccctctgtacagtattttagaccgaatgtctgaaaaggacgagagacttacctaaataccccaagtaaatatgaggttttagaggaagatcttttcagcaaaatggggtaactggactttgttctttcaaggaatcctttggtcctgggctttgagcagccagaagggagagggtgggggcacctagtaagctcaatacgcgggttctaatcagcagtggagaacaaaagcgggaagggcagagagcaagacaggaggaatactcaccagcttcacacctcaccaccaagagcaggtccagctctgggccagctggcaatcacggaaaaaagaaggccacgcccagctccacgcccacgtggcgatagttcctggggagcgctgagccagtgatgttgctgctgctcattggctgcaaccggctctgaaccaccagccccagggaacaggcacttttctgcacctgtgtgcaccacttacaggtgctgctgctggcaagaggctgcctttaccaccacacacctgtgctgagggcgcccggatgctcacagccttcagctggctgtcctgaagcaattagtgtgtgtgtgtgtgtgtgtgtgtgtgtgtgtgtgtatgtga

SEQ ID NO: 700417 - DNA, 2010 bp, Homo sapiens
tatatagcatatatatatatatatatatatatacayacacacatatatatatttatgtgtatatgtattttttttttcttcttgagacagagtcttgctctgtcgcccaggctggagtgcaatggcgtgatctcagctcactgcaaactctgcctcctagattcaagtgattctcctgcctcagcctcccgagcagctgggattacaggagcccaccaccacgcctaattttttgtatttttttttttagtagaggcggggtttcaccatgttggccaggctggtctggaactcctgacctcaggtaatctgcccacctcgacctcccatagtgctgggttacaggcgtgagccaccacgcccagccttacatagcatattaatacacacagggcatcaccgtcctcactccagggttcaaagctgaggttctgtggtgttgactgggttgctctgtttcaggggaaagtacgttaatgcatacaggatgataacgcctggtatttgccagttgtcagagtgggaactgatcaatcaagccccagagaaagatgactggacggcctaaggattaatctgggataggcagtcactttttcccgtgaagtcgggtgggtgaggagttggggagaagctagttattcgagtccaggcaggaatacagctggagggaggtaaaggaaggctgctggttgaggttattttctgaggatgagtgacttccctaagcttgcattttgtctctatgctttttctacagaccgtacccctcccacctcacctttctacccaggtgtcctgaatgattagaaagcagcagttaagattatagggcttgaagtctcagacccagctttgaatgatttgctgctttctaccccaggcaagccatttaacttatctggggctcagcttcctcccttggtaaacaggacaaacaacaccgtcagaattgtatggcatttcaataactaagttacggttaaccatagtatttgcacaattagcaccaaaacaccctctggactcctaccaaatgcagaccagacattagctaatcctgacattcaagttgcagtaccccctactctgtacttaatttttacttgagacgaagtctcactctgtcacccacgctggagtgcagtggcgtgaccttggctcactgcaacctctgcctcctgggttaaagcgattctcccgtctcagcctccctagaaggtgggattataggcacatgccaccacgcccagctcatttttgtacttttattagagatgaggatttcaccatgttggccaggctggtcttgaactcctgacctcagatgatccacctgcctcggcctcccaaagtgctgggattataggcgtgagccactgcacccagccctctgtacagtattttagaccgaatgtctgaaaaggacgagagacttacctaaataccccaagtaaatatgaggttttagaggaagatcttttcagcaaaatggggtaactggactttgttctttcaaggaatcctttggtcctgggctttgagcagccagaagggagagggtgggggcacctagtaagctcaatacgcgggttctaatcagcagtggagaacaaaagcgggaagggcagagagcaagacaggaggaatactcaccagcttcacacctcaccaccaagagcaggtccagctctgggccagctggcaatcacggaaaaaagaaggccacgcccagctccacgcccacgtggcgatagttcctggggagcgctgagccagtgatgttgctgctgctcattggctgcaaccggctctgaaccaccagccccagggaacaggcacttttctgcacctgtgtgcaccacttacaggtgctgctgctggcaagaggctgcctttaccaccacacacctgtgctgagggcgcccggatgctcacagccttcagctggctgtcctgaagcaattagtgtgtgtgtgtgtgtgtgtgtgtgtgtgtgtgtgtatgtga

SEQ ID NO: 700418 - DNA, 2010 bp, Homo sapiens
tatatagcatatatatatatatatatatatatacacacacacatatatatatttatgtgtatatgtattttttttttcttcttgagacagagtcttgctctgtcgcccaggctggagtgcaatggcgtgatctcagctcactgcaaactctgcctcctagattcaagtgattctcctgcctcagcctcccgagcagctgggattacaggagcccaccaccacgcctaattttttgtatttttttttttagtagaggcggggtttcaccatgttggccaggctggtctggaactcctgacctcaggtaatctgcccacctcgacctcccatagtgctgggttacaggcgtgagccaccacgcccagccttacatagcatattaatayacacagggcatcaccgtcctcactccagggttcaaagctgaggttctgtggtgttgactgggttgctctgtttcaggggaaagtacgttaatgcatacaggatgataacgcctggtatttgccagttgtcagagtgggaactgatcaatcaagccccagagaaagatgactggacggcctaaggattaatctgggataggcagtcactttttcccgtgaagtcgggtgggtgaggagttggggagaagctagttattcgagtccaggcaggaatacagctggagggaggtaaaggaaggctgctggttgaggttattttctgaggatgagtgacttccctaagcttgcattttgtctctatgctttttctacagaccgtacccctcccacctcacctttctacccaggtgtcctgaatgattagaaagcagcagttaagattatagggcttgaagtctcagacccagctttgaatgatttgctgctttctaccccaggcaagccatttaacttatctggggctcagcttcctcccttggtaaacaggacaaacaacaccgtcagaattgtatggcatttcaataactaagttacggttaaccatagtatttgcacaattagcaccaaaacaccctctggactcctaccaaatgcagaccagacattagctaatcctgacattcaagttgcagtaccccctactctgtacttaatttttacttgagacgaagtctcactctgtcacccacgctggagtgcagtggcgtgaccttggctcactgcaacctctgcctcctgggttaaagcgattctcccgtctcagcctccctagaaggtgggattataggcacatgccaccacgcccagctcatttttgtacttttattagagatgaggatttcaccatgttggccaggctggtcttgaactcctgacctcagatgatccacctgcctcggcctcccaaagtgctgggattataggcgtgagccactgcacccagccctctgtacagtattttagaccgaatgtctgaaaaggacgagagacttacctaaataccccaagtaaatatgaggttttagaggaagatcttttcagcaaaatggggtaactggactttgttctttcaaggaatcctttggtcctgggctttgagcagccagaagggagagggtgggggcacctagtaagctcaatacgcgggttctaatcagcagtggagaacaaaagcgggaagggcagagagcaagacaggaggaatactcaccagcttcacacctcaccaccaagagcaggtccagctctgggccagctggcaatcacggaaaaaagaaggccacgcccagctccacgcccacgtggcgatagttcctggggagcgctgagccagtgatgttgctgctgctcattggctgcaaccggctctgaaccaccagccccagggaacaggcacttttctgcacctgtgtgcaccacttacaggtgctgctgctggcaagaggctgcctttaccaccacacacctgtgctgagggcgcccggatgctcacagccttcagctggctgtcctgaagcaattagtgtgtgtgtgtgtgtgtgtgtgtgtgtgtgtgtgtatgtga

SEQ ID NO: 700419 - DNA, 3867 bp, Homo sapiens
ggtgtttggttttctgttcctgcattagtttgctgaggataatggcttccagctccatccatgtccctgcaaagaacataatctccttcctttttatggctgcatagtattccatgctgtatatgtgccacattttctttatacagtctatcattaacggtcatttgtgttgattccatgtctttgctattgtgaatagtaatgcaatgaacatacacatacatgtatctttatgatagaatgatttatattcctttgggtatatacccagtaaagggattgctgggtcaaatggtatttctggttctagatctttgaggaatcaccacactgtcttaataattttctataagctgaagaggactgcgatttctccagtgatgcaaaattcatgagtaaatgagcaaatggaggtacatggctaattgattacatatggctgatggggacagggctgaaacttcaggaagtgaggcttctgagggtgtctctggaatctggtcctgcttgggtcttacaggctgaatttctgcatgacaagcgtgagaatgtacacacacacacaccccacgttcacacactcatgttcccacacccaaacacactcacacagtctttcacacacacatgaaggtgatctctttttggaaagtaatatcttaaagtacaacagttccgaagaattcaggatccggggacttccctggggcacccccttgctttctccttttgggccactcaggtgggtttagttccatacatgtgtgggagcagcaatgagtccaatgcttcatctttatggctctgttaacatgagggatgcatgtcacattggagtgccttcactttttaaaataaaaataaaagggaagaaaacatgggcttaactcaaaggtctcctttggtgctaaagattaccatgcaacaatagagtgagatgtgtcagaagctacccctttctcatctacactggatgcgtccctgcatgctgggttattgtgcatgaggaatgacccagccaatgggaagcctataggtggcttgtgcatgttgtgataaaatgtaaatgcactagaaaggtcaccggcagagtgatcattaccattgtggaactctgaccaatttgccattcaagagcatcattgatgactcaagccgctcacggggcccttaaatacacacacccaggggcacacccacagccgatgggcattgtggccgccagtgtctctcggtatgtgtgtcagcacctgcagacgctcctctggcatttaaggagagcaaagtagagggggaggagcaccttgctgtttggcccataatcatctctcttgtaaagagcatcacactgctgagccaagctcccccagagggctcccagcccctttctctggagctgaggctgtgcatgggggcaggacactgtcacctgtgccctattacagaaggatgccatgccagcaccacgttacacagaatagtggcacagtgcccctcgcccctcgtagctgtgtggacctagcttatcattaaaaaaagcacctactcgactagctcaccataaaaagcatctactcgaggccaaccccggaccatcactctcacctgtatccctggagaccttgagcatccagtgcattgagaaggcccaggtgctgcccaaacccccccatctctactactgctttacctccggaatgtcatttccttcccccaactgcctctgctgcctttccccatatgtaattccgacagcaatgcaataagacatttgttccttcagttaacagactttcactgcagacctactttgtgcagttccctctgctgatactcatyaaatctcagctcactgctcagtgctctggcatgggacaggacaaacaagtagaaggatcattagatatgccctcctttgtccccaggcaggagacactaagagccttaaaacaacatttcaaaggaccatggcatccccagaagtgacaatgtctgcttgtggagactgattcaataaggaaagcttcctggaagagctggcaatccggctgagtgttaagagatgggtggaagtttgacaagtcgagaactcagagggtattccagagacagaacagaaagtttgtagggactgagctacttccaggatggcccaggatcattgcatggtacagggtatggggacagagagccaggagcagtggaaaaggcaacccaagtctcaagccctccttacacctggagaccagattccccaggaacgcccggagagtggacattccttcaagacattcatccaacaaatatctgtaaagtacctactatgtgccaggcactgaatacaccctggcatcattatggaggctgttgcagtacaagcaagaaacaaaattatcattgcaactgaatcctgatgcttttgactaccctgacaaagataagatccactgcccattactgaaaccatccgctacaaagtctggactccctccccggcctctactggagtctcttgctgtgactttccctgcgttgtgtctttcttctctgagtcacacccttcctgctttgccatgaccccaaccactgcctgacactgaatcccagcctgactgcacacttggggctaaaaggattttcttcagatacccccataaagaacagctgggctgagactgagttggtaaactggtcccaagttctgtcttggatgtgcaaccttggacaaatcccttctgccctgtgggcctacgctccatgtgtataagaggttgtatttgcctgctatctctccatcagatgattctatgattctgtagacaactttctctctgttcgaaacaccagcatgcctctgcttgttcagaggctgacttagcctccttccaggtctccttccccattttcctttcctagaacagcataaggatcctacacttgtctgttcattcatttattcaacaaatatttattaactgctgacttagtaccagatactgctgcaagctcagagacaccacaagcacacaagacttccttttcttcctggaccttagcctgtcctttgctctggcactggagtcttcacttgcagggtctcacgcagctcagcctataccttatagccaacatctcactgcattctcacatctttctatgaggaggcatcacaaatgggtaaggccagttaagtaatgtactatgtgaaaggtagtgtttacaaggtttacttggtgtcccaataccacagcaatagtgaagccaagacctgggtctgctgactcttagcctaactcacagttaggcttttggccataatgtgtaatcttggaaatattcacaaagaccaatctgatgtgcttcatagagaacagctgagggggcttttttttttttttttttcttttttgagacggagtctcactctgttgcccaggctggagtgtagtggtatgatcttggctcaatgcaacctccacctcccaggttcaggcaattctcctgcctcagcctcccaagcagctgggattataggtgcacgccaccacccccggctgatttttgtatttttagtagagatgggttttcaccatgttggccaggctgttcttgaactcctgaccttaagtgatctgcccaccttagcctcccaaagtgctgagattacagggtcttaagttctgaaataccctcaaaaaggccccggacattaatttggagcaatgtccttgggtcctgttcttgagccataggttagatggaaggaaggagggatgacaggatggggcacccatagagctgacccagtactagaaactgagcccaaagtccacgtgagctgggtcagaagcatcgccactgcctgca

SEQ ID NO: 700420 - DNA, 3867 bp, Homo sapiens
ggtgtttggttttctgttcctgcattagtttgctgaggataatggcttccagctccatccatgtccctgcaaagaacataatctccttcctttttatggctgcatagtattccatgctgtatatgtgccacattttctttatacagtctatcattaacggtcatttgtgttgattccatgtctttgctattgtgaatagtaatgcaatgaacatacacatacatgtatctttatgatagaatgatttatattcctttgggtatatacccagtaaagggattgctgggtcaaatggtatttctggttctagatctttgaggaatcaccacactgtcttaataattttctataagctgaagaggactgcgatttctccagtgatgcaaaattcatgagtaaatgagcaaatggaggtacatggctaattgattacatatggctgatggggacagggctgaaacttcaggaagtgaggcttctgagggtgtctctggaatctggtcctgcttgggtcttacaggctgaatttctgcatgacaagcgtgagaatgtacacacacacacaccccacgttcacacactcatgttcccacacccaaacacactcacacagtctttcacacacacatgaaggtgatctctttttggaaagtaatatcttaaagtacaacagttccgaagaattcaggatccggggacttccctggggcacccccttgctttctccttttgggccactcaggtgggtttagttccatacatgtgtgggagcagcaatgagtccaatgcttcatctttatggctctgttaacatgagggatgcatgtcacattggagtgccttcactttttaaaataaaaataaaagggaagaaaacatgggcttaactcaaaggtctcctttggtgctaaagattaccatgcaacaatagagtgagatgtgtcagaagctacccctttctcatctacactggatgcgtccctgcatgctgggttattgtgcatgaggaatgacccagccaatgggaagcctataggtggcttgtgcatgttgtgataaaatgtaaatgcactagaaaggtcaccggcagagtgatcattaccattgtggaactctgaccaatttgccattcaagagcatcattgatgactcaagccgctcacggggcccttaaatacacacacccaggggcacacccacagccgatgggcattgtggccgccagtgtctctcggtatgtgtgtcagcacctgcagacgctcctctggcatttaaggagagcaaagtagagggggaggagcaccttgctgtttggcccataatcatctctcttgtaaagagcatcacactgctgagccaagctcccccagagggctcccagcccctttctctggagctgaggctgtgcatgggggcaggacactgtcacctgtgccctattacagaaggatgccatgccagcaccacgttacacagaatagtggcacagtgcccctcgcccctcgtagctgtgtggacctagcttatcattaaaaaaagcacctactcgactagctcaccataaaaagcatctactcgaggccaaccccggaccatcactctcacctgtatccctggagaccttgagcatccagtgcattgagaaggcccaggtgctgcccaaacccccccatctctactactgctttacctccggaatgtcatttccttcccccaactgcctctgctgcctttccccatatgtaattccgacagcaatgcaataagacatttgttccttcagttaacagactttcactgcagacctactttgtgcagttccctctgctgatactcattaaatctcagctcactgctcagtgctctggcatgggacaggacaaacaagtagaaggatcattagatatgccctcctttgtccccaggcaggagacactaagagccttaaaacaacatttcaaaggaccatggcatccccagaagtgacaatgtctgcttgtggagactgattcaataaggaaagcttcctggaagagctggcaatccggctgagtgttaagagatgggtggaagtttgacaagtcgagaactcagagggtattccagagacagaacagaaagtttgtagggactgagctacttccaggatggcccaggatcattgcatggtacagggtatggggacagagagccaggagcagtggaaaaggcaacccaagtctcaagccctccttacacctggagaccagattccccaggaacgcccggagagtggacattccttcaagacattcatccaacaaatatctgtaaagtacctactatgtgccaggcactgaatacaccctggcatcattatggaggctgttgcagtacaagcaagaaacaaaattatcattgcaactgaatcctgatgcttttgactaccctgacaaagataagatccactgcccattactgaaaccatccgctacaaagtctggactccctccccggcctctactggagtctcttgctgtgactttccctgcgttgtgtctttcttctctgagtcacacccttcctgctttgccatgaccccaaccactgcctgacactgaatcccagcctgactgcacacttggggctaaaaggattttcttcagatacccccataaagaacagctgggctgagactgagttggtaaactggtcccaagttctgtcttggatgtgcaaccttggacaaatcccttctgccctgtgggcctacgctccatgtgtataagaggttgtatttgcctgctatctctccatcagatgattctatgattctgtagacaactttctctctgttcgaaacaccagcatgcctctgcttgttcagaggctgacttagcctccttccaggtctccttccccattttcctttcctagaacagcataaggatcctacacttgtctgttcattcatttattcaacaaatatttattaactgctgacttagtaccagatactgctgcaagctcagagacaccacaagcacacaagacttccttttcttcctggaccttagcctgtcctttgctctggcactggagtcttcacttgcagggtctcacgcagctcagcctataccttatagccaacatctcactgcattctcacatctttctatgaggaggcatcacaaatgggtaagsccagttaagtaatgtactatgtgaaaggtagtgtttacaaggtttacttggtgtcccaataccacagcaatagtgaagccaagacctgggtctgctgactcttagcctaactcacagttaggcttttggccataatgtgtaatcttggaaatattcacaaagaccaatctgatgtgcttcatagagaacagctgagggggcttttttttttttttttttcttttttgagacggagtctcactctgttgcccaggctggagtgtagtggtatgatcttggctcaatgcaacctccacctcccaggttcaggcaattctcctgcctcagcctcccaagcagctgggattataggtgcacgccaccacccccggctgatttttgtatttttagtagagatgggttttcaccatgttggccaggctgttcttgaactcctgaccttaagtgatctgcccaccttagcctcccaaagtgctgagattacagggtcttaagttctgaaataccctcaaaaaggccccggacattaatttggagcaatgtccttgggtcctgttcttgagccataggttagatggaaggaaggagggatgacaggatggggcacccatagagctgacccagtactagaaactgagcccaaagtccacgtgagctgggtcagaagcatcgccactgcctgca

SEQ ID NO: 700421 - DNA, 3867 bp, Homo sapiens
ggtgtttggttttctgttcctgcattagtttgctgaggataatggcttccagctccatccatgtccctgcaaagaacataatctccttcctttttatggctgcatagtattccatgctgtatatgtgccacattttctttatacagtctatcattaacggtcatttgtgttgattccatgtctttgctattgtgaatagtaatgcaatgaacatacacatacatgtatctttatgatagaatgatttatattcctttgggtatatacccagtaaagggattgctgggtcaaatggtatttctggttctagatctttgaggaatcaccacactgtcttaataattttctataagctgaagaggactgcgatttctccagtgatgcaaaattcatgagtaaatgagcaaatggaggtacatggctaattgattacatatggctgatggggacagggctgaaacttcaggaagtgaggcttctgagggtgtctctggaatctggtcctgcttgggtcttacaggctgaatttctgcatgacaagcgtgagaatgtacacacacacacaccccacgttcacacactcatgttcccacacccaaacacactcacacagtctttcacacacacatgaaggtgatctctttttggaaagtaatatcttaaagtacaacagttccgaagaattcaggatccggggacttccctggggcacccccttgctttctccttttgggccactcaggtgggtttagttccatacatgtgtgggagcagcaatgagtccaatgcttcatctttatggctctgttaacatgagggatgcatgtcacattggagtgccttcactttttaaaataaaaataaaagggaagaaaacatgggcttaactcaaaggtctcctttggtgctaaagattaccatgcaacaatagagtgagatgtgtcagaagctacccctttctcatctacactggatgcgtccctgcatgctgggttattgtgcatgaggaatgacccagccaatgggaagcctataggtggcttgtgcatgttgtgataaaatgtaaatgcactagaaaggtcaccggcagagtgatcattaccattgtggaactctgaccaatttgccattcaagagcatcattgatgactcaagccgctcacggggcccttaaatacacacacccaggggcacacccacagccgatgggcattgtggccgccagtgtctctcggtatgtgtgtcagcacctgcagacgctcctctggcatttaaggagagcaaagtagagggggaggagcaccttgctgtttggcccataatcatctctcttgtaaagagcatcacactgctgagccaagctcccccagagggctcccagcccctttctctggagctgaggctgtgcatgggggcaggacactgtcacctgtgccctattacagaaggatgccatgccagcaccacgttacacagaatagtggcacagtgcccctcgcccctcgtagctgtgtggacctagcttatcattaaaaaaagcacctactcgactagctcaccataaaaagcatctactcgaggccaaccccggaccatcactctcacctgtatccctggagaccttgagcatccagtgcattgagaaggcccaggtgctgcccaaacccccccatctctactactgctttacctccggaatgtcatttccttcccccaactgcctctgctgcctttccccatatgtaattccgacagcaatgcaataagacatttgttccttcagttaacagactttcactgcagacctactttgtgcagttccctctgctgatactcattaaatctcagctcactgctcagtgctctggcatgggacaggacaaacaagtagaaggatcattagatatgccctcctttgtccccaggcaggagacactaagagccttaaaacaacatttcaaaggaccatggcatccccagaagtgacaatgtctgcttgtggagactgattcaataaggaaagcttcctggaagagctggcaatccggctgagtgttaagagatgggtggaagtttgacaagtcgagaactcagagggtattccagagacagaacagaaagtttgtagggactgagctacttccaggatggcccaggatcattgcatggtacagggtatggggacagagagccaggagcagtggaaaaggcaacccaagtctcaagccctccttacacctggagaccagattccccaggaacgcccggagagtggacattccttcaagacattcatccaacaaatatctgtaaagtacctactatgtgccaggcactgaatacaccctggcatcattatggaggctgttgcagtacaagcaagaaacaaaattatcattgcaactgaatcctgatgcttttgactaccctgacaaagataagatccactgcccattactgaaaccatccgctacaaagtctggactccctccccggcctctactggagtctcttgctgtgactttccctgcgttgtgtctttcttctctgagtcacacccttcctgctttgccatgaccccaaccactgcctgacactgaatcccagcctgactgcacacttggggctaaaaggattttcttcagatacccccataaagaacagctgggctgagactgagttggtaaactggtcccaagttctgtcttggatgtgcaaccttggacaaatcccttctgccctgtgggcctacgctccatgtgtataagaggttgtatttgcctgctatctctccatcagatgattctatgattctgtagacaactttctctctgttcgaaacaccagcatgcctctgcttgttcagaggctgacttagcctccttccaggtctccttccccattttcctttcctagaacagcataaggatcctacacttgtctgttcattcatttattcaacaaatatttattaactgctgacttagtaccagatactgctgcaagctcagagacaccacaagcacacaagacttccttttcttcctggaccttagcctgtcctttgctctggcactggagtcttcacttgcagggtctcacgcagctcagcctataccttatagccaacatctcactgcattctcacatctttctatgaggaggcatcacaaatgggtaaggccagttaagtaatgtactatgtgaaaggtagtgtttacaaggtttacttggtgtcccaataccacagcaatagtgaagccaagacctgggtctgctgactcttagcctaactcacagttaggcttttggccataatgtgtaatcttggaaatattcacaaagaccaatctgatgtgcttcatagagaacagctgagggggcttttttttttttttttttyttttttgagacggagtctcactctgttgcccaggctggagtgtagtggtatgatcttggctcaatgcaacctccacctcccaggttcaggcaattctcctgcctcagcctcccaagcagctgggattataggtgcacgccaccacccccggctgatttttgtatttttagtagagatgggttttcaccatgttggccaggctgttcttgaactcctgaccttaagtgatctgcccaccttagcctcccaaagtgctgagattacagggtcttaagttctgaaataccctcaaaaaggccccggacattaatttggagcaatgtccttgggtcctgttcttgagccataggttagatggaaggaaggagggatgacaggatggggcacccatagagctgacccagtactagaaactgagcccaaagtccacgtgagctgggtcagaagcatcgccactgcctgca

SEQ ID NO: 700422 - DNA, 1389 bp, Homo sapiens
ccactcccagggacctccactgcccagagaagccactcccaggaaccgccactacccggagaggccacacgcggggaccgccactacccagagaggccacacacagggacctccactgcatggaaaggccacaggcagggatccctccactgcccagagaggccacatgcggggaccctcactacctggacaagmcactcccggggacttccactacccaaagaggccacatgcagggacccccactacccggagaggccacatgtggggacctccactgtccggagaggccacaggcagggatccctccactgcccggagaggccactcccaggaacctccactgtccggaaaggccacacacagggacctccactgtccagaggggccacatacagggacttccactgtccggagaggccacaggcagggatccccccactgcccggagaggccactcccagggacctccactgtccagctctgaatctcagccccgttgtttacatgcgagtgatcttaggtgtgacaagatgctgctcggtgcctcagtttccccatacttaaaatgagaataataaatactccatccacatccttgggttttcatgaggatgaaatgtaagaagctaatttgtactctcatctgtacagagcttagaacaggacttgccacagaggaagtctttattatttacaactttgcttggaaggttagtgggtgagttcggaggaccagatcctgctgctgggataaagggagctgttccttgggcatggagatattttggggaaacagtcatctgccccagacccaggatgcccccacacggctggtttttgaacggaacaaaacgtcccggtggtaactgatttctgggtgacccctcatagacactcagggtgtggggcagggttaggagccgtggctgactgagttctcctctaggctgcccaaaggccacgactgattttacatagttgccctgaaagtgactttctttattccacgactgcttgattttagcatccaagcgtgacctgggatattttattactttgtttttttctgtttgttggtggtcacagcctgacgttataaatgctgtgtcttggaggactggtgtgatgcggttgatgacactgattgctgtcatctgtgagatgggctatcaggttcggtgcttggcattggaggtgtgtgtctcagggaattcccctccctgactctgcaacagctatcctcactcctggtgttcagctggccaagctgaggctcagaggggccccctggagtgggaaggtcataacctgaggcgctggaagagtagaaaatgacagcaagagcagacagcaggcattggagatgacagaaggtggggatgtggg

SEQ ID NO: 700423 - DNA, 1389 bp, Homo sapiens
ccactcccagggacctccactgcccagagaagccactcccaggaaccgccactacccggagaggccacacgcggggaccgccactacccagagaggccacacacagggacctccactgcatggaaaggccacaggcagggatccctccactgcccagagaggccacatgcggggaccctcactacctggacaagccactcccggggacttccactacccaaagaggccacatgcagggacccccactaccyggagaggccacatgtggggacctccactgtccggagaggccacaggcagggatccctccactgcccggagaggccactcccaggaacctccactgtccggaaaggccacacacagggacctccactgtccagaggggccacatacagggacttccactgtccggagaggccacaggcagggatccccccactgcccggagaggccactcccagggacctccactgtccagctctgaatctcagccccgttgtttacatgcgagtgatcttaggtgtgacaagatgctgctcggtgcctcagtttccccatacttaaaatgagaataataaatactccatccacatccttgggttttcatgaggatgaaatgtaagaagctaatttgtactctcatctgtacagagcttagaacaggacttgccacagaggaagtctttattatttacaactttgcttggaaggttagtgggtgagttcggaggaccagatcctgctgctgggataaagggagctgttccttgggcatggagatattttggggaaacagtcatctgccccagacccaggatgcccccacacggctggtttttgaacggaacaaaacgtcccggtggtaactgatttctgggtgacccctcatagacactcagggtgtggggcagggttaggagccgtggctgactgagttctcctctaggctgcccaaaggccacgactgattttacatagttgccctgaaagtgactttctttattccacgactgcttgattttagcatccaagcgtgacctgggatattttattactttgtttttttctgtttgttggtggtcacagcctgacgttataaatgctgtgtcttggaggactggtgtgatgcggttgatgacactgattgctgtcatctgtgagatgggctatcaggttcggtgcttggcattggaggtgtgtgtctcagggaattcccctccctgactctgcaacagctatcctcactcctggtgttcagctggccaagctgaggctcagaggggccccctggagtgggaaggtcataacctgaggcgctggaagagtagaaaatgacagcaagagcagacagcaggcattggagatgacagaaggtggggatgtggg

SEQ ID NO: 700424 - DNA, 1537 bp, Homo sapiens
gcatgaatttgtctagccttatgactttcctttgggaaaggattatgagtgagctcacttatttatccacattttcctatcttaataaaacatatcattcctgtctccatctgcctctcccacatacatgtactttgcacttcagacctccatgaggcagatttccatgccacccttaaaattgctgtgggtatggtgggatcctgttctctctactatcttgagtgctgatttaatatctggacctcagtgaatgagggatagaatgcttaaaagcagagctacccatgaccccagatactctatgggggagcagtggtctgtctggaaatttcagggttaactgaaccctcagaatcatctgataagtctgatttaggttctgagggaggataaggctgtgatgccactgcctgctgatgtaggaaagtaggaaagtgggaaagataaagaagaaattgagagagaattgtgcatcttggtcttaccttccagtctcaggctctccatctctacaatgaagttacctctgaaacagccaggtggattgacgggttatgtgagtagggagtctttgaaagcaaaagtctagtgaagttggtgtatgctgtttctcctgctgggtaacgaagtgaaaaagttggccaattataataatacacacttacagggagataaccacttcctgtgtgaacattcagttctatccagtctctttcagagttcctagaacacttcacaaggtaacctttctgaagcttttccagaccaccccaagccttgcacaactctggtgctgagaactggagcccaccagagctctctgcaacagatttcattgtcagacctctctgaccccagccctcttcctgggggtctgaccaagcctctagcccagggataatcagatgggtttgtgcttaatgcattttccaatcaaaacaacaatttgcagattaacttatgaacactgaatatgaggacaaaatgctacattcaaaacctacttatcttgatgaattaaaagttagtgttgcagatggacatacmgcaggcttggggagtgcacaaaacaataagtagacagatctctcctttttcccaaagaagcactgatactgtccctaaggatgcaaagagggcttggaaattgaaggctcttcccagggagctatatctcttccttccaatatgttccaaatgcattgcttcttccttttcatcccggtaacagaacactgactcttcagtctcctaaatgtgccaccacctctaaaaatgacatttgggagtgtgtcctcatatctgagcaaaaccccaaagcaagccagttctccaaaactgggtcacttttgggtggacctgggtcaaacagccagtggtttccacactcctgaatttccttctgggcagaagagaatcttgcatctaagagcagaaaagaatcttgcatctaagtacctatccctggactctgatgctaggaacatgtgttagacagatctgtgttactgctctcacaacaggctttaaagaa

SEQ ID NO: 700425 - DNA, 609 bp, Homo sapiens
gcccagcccagctatgtgtacctggagtttccacgacagtcctgtccattattaatgcaatttccatttctgttgtaaagactgcttccaccacacctgcctaatgacaaagcctcaccttcaaagctggggcataaggatgtctgtggctgctagatctggagtaggggctctcagccccctactctcatttgaacaaggcagcaaccatgctcacgggatgccaaggagagagacaagtgaggctggtggcagctggccgagagggtccccgtcctacctggccaggccaagaaagctgttgatgcatcccaagacctagcaagacttactttctcagtcaccttgaaaggaaggacaagcctccaagtcggctccttgggagtggagagaagaagtttcctccactccactgctgagagttacaamaggagccattagcacttgccaagcaaggccaccttccatctgagggagaaagtgcaaaagacagtttaaaagcctcattaacacaaggcaacaagtcacaggtgaaaattgagcctctgaggccctgctgattgcacgggggggaaggcatttgcatctcttctcaccacagaggggtgg

SEQ ID NO: 700426 - DNA, 1979 bp, Homo sapiens
attttgaaaggtaagggcagaatagacaggacaccctgagagagtggatttaaggctggctgctcctaaggataagatagcaaagacctgctcaagagcgactccctttctccatccccagacaattttgaaacatattgatgcctgactctcaccctcaagagatacgagtttgagtcgatacttggaaatcaggtttaaaaaatttttccaggtaattctaatgtgcaacaaaggttgagaaccactggtgtacagtataaagagaaatttctagcatctcgcttcatttactgtaacctcgtggccctcaaatttttaatgtgcatataattcaccctcagatcttgttaaaatgcagggtctgattcagtgacaggctccaggtgaggcacatgctgctcgtcaatagaccctcatttcagtggtgaggaggcagtctcctctgggttccagctttgcatcaactgagcaaaatcttaccatctcttactgctcaagtcagcatcttgaggccagtgtctgataagtgcatttgaaatattcaatccttctggtttcttacccagaatgctacactaagtgttttatttctcccacatccgctcctacccaacggctttccacccattatcacatggcagccatactgagtatgaaagtgagcaaatctaatcctgctgttacactctttacattttattttctatggattctattctttttagcaaaaagaccatgtgctttatgtggcctaagctattcaactaaatgaccactgatcccagcactttgggaggccaaggcaggcagatcacgagggcaaaagatcaagaccatcctggctaacacagtgaaatcctgtctctactaaaaatacaaaaaattagtcaggtgtggtggcatgcacckgtagtcccagctacttgggaagctggggcaggagaatcgcttgaacccgggtggcagagattgcagtgagccaagatcgtgccactgcactccagcctgggcaacagagctagactccgtgtaaaaaaaaaaaaaaaaaagaccactgatgacccttgtgactgtcagtctctgttaccctccgtacttcaggaagacccttctgtattcagtgactgactgggggtgcctttctccatgatgtttaatttttttgaatgggggatgtctatggcccatttttggtgcttttctgtgtagttgaagatacactagttttggacttttggcctttatccactttctagcgtattctttctctggggaaaaatgattgggagtttcgaaagagaatctgcattgagaagctgtatcagtcagagtccaatgaagagaaaaaaacccacagcaatttgcacaagcagcatttaatataaagcaggggctggcacacgatggcctgctaccttcaatagcccacagctagaaaatagttttgtgtgtgtgtgttttacagggtcttattctgtcactcaggatggagtgcagtagcatgatcatagcttactgaagccttgatctcctgggcaccagcttccagcaggtgattgtgttaagtgaaataagccagtccaagttatcctgcccgctcagcctggctaatttttaaatgtttttatagagacagtgtctcactatgttgcccaggccagtctcaaagtcctgagctcaattgatcttcctgccttggccttccaaagcgctggaattacagatgtgaaccagcacacctgggcaagaattgttttttatatttttaaagtgtggtaatatgagcaaaccagagaagaatatccaacatagaccaaatagcctgcaaaacctaaaatatatattctctgctcctttgtggaaaaaagctttctgacctccaaaataaagatttattgaccacaacatgggcctaactataaagaaaaaagaattctgaaggatacctagggaggaaggtttctcagaggaatggg

SEQ ID NO: 700427 - DNA, 615 bp, Homo sapiens
ttcttgagagaggcccttacaaatcagcacacggctgggcacggtggcccgtgcctgtaatcccagcactttgggaagccgaggcgggtggatcaccagaggtgggagttcgagaccagcctggccaacatggtgaaaccccatctctactaaaaataccaaaaaattagccgggcgtggtggcgggtgcctgtaatcccagctactcgggaggctgaggcacgagaactggttgaacctgagaggtagaggttgcagtgagctgagattgtgccattgcactccagcctgggcaacagagccagactgtctcaaaaataaataaataaaacaaatcggcacaggccctcaataaataaagatccccacagggcaggacacctggtccagaccccagtctcctcacgtgggaaatgggaagataatatctgcaagacagccctgaacaccccctctccagccctgtagctctctgcccgcttcccctctcatgcccactcccgataccagctccctctccactgccccagcttcttcagtaaatcccccccagctacctccagcccccaaccgcgtctccccccacatccctgactagacacggccrgtgtcact

SEQ ID NO: 700428 - DNA, 1472 bp, Homo sapiens
  misc_feature 347, 348, 349, 350, 351, 352, 353, 354, 355, 356, 357, 358,359, 360, 361, 362, 363, 364, 365, 366, 367, 368, 369, 370,371, 372, 373, 374, 375, 376, 377, 378, 379, 380, 381, 382,383, 384, 385, 386, 387, 388, 389, 390, 391, 392, 393: n = A,T,C or G
  misc_feature 394, 395, 396, 397, 398, 399, 400, 401, 402, 403, 404, 405,406, 407, 408, 409, 410, 411, 412, 413, 414, 415, 416, 417,418, 419, 420, 421, 422, 423, 424, 425, 426, 427, 428, 429,430, 431, 432, 433, 434, 435, 436, 437, 438, 439, 440: n = A,T,C or G
  misc_feature 441, 442, 443, 444, 445, 446: n = A,T,C or G
gaaattcatatagggagtcaggacacaaagagagtgaggagggaggcagagatgggggcaagggcctgagccacagaactttaaagaaaccatttacaggaaacagcaaacgacagggtgagcatctagctgggctctccagcaaggaaccacctgagatgcctgggacagtgacggacagctccaagtgccagcccgagcagcttccacgtgtaactcatgtaatcctaataaccatttaggaaggagagatgcttgtacccacagtttacagaggaggaaagtgaggtcctgtcattgaagagatatacccagggacactcaactggtaagggggcttgaacccnnnnnnnnnnnnnnnnnnnnnnnnnnnnnnnnnnnnnnnnnnnnnnnnnnnnnnnnnnnnnnnnnnnnnnnnnnnnnnnnnnnnnnnnnnnnnnnnnnnnttgtctttcttttttctttccttctttcttctcttttttttttttttcctttgagacagcaggatcttgctgtgtcgcccaggctggagtgcaatggtgcactctcagctcactgcagcctcatcctcccaggctcaagtgatcctcccagctcagcctcccgagtagctgggactacaggcacacaaaaccatgcccggctaatttttgtgttttttgtagagatgaggtttcaccatgttgcccaggctggtcttgaattcctgggctcaagcgatcctcccgcctcagcctcccaaagtgctgggattacaggtgtacccaggaatccattgcacccagccataggcgaccctatctcacccatgggaaacggggctgcacacctgcctgtatgttcgcatctaagccctgcgtctgtctcaagtcaagggtcggtgcggcagggtgggccactgaggcccagactctgtcctcgggtgccctgtgatggggatggggagagcaacaggaggagaagcggctgctgggggagagggggcgcctctagcctgccctagcctgcagttgccatggcaaccctctgcgtgctcgagtgggtgggagtctgagtgccttgggtggggggtgggggaaccaaggtggggatctgggatctgggcccccttcatggtctcctcccttcctggcagcagccggcccctccacacacagccctctggctgcatctcctgcctcctgcccactccccaaacccagccgcccatgagcccgcctccttcaggaagccctcaggcatccggcaggtccataaggaagcygcaggccctggggtgactatgaaggatcagctgagagttgaagcccctgaatttcaatctgctgtgtagcttcagagcaagcacttggcctctctgaacctatttccccattgctgctcagggactaacagacctacctcgcagagacagagcacgtgcccagagagggcccaggtacatgatcctcgggcagggcagggttctc

SEQ ID NO: 700429 - DNA, 1466 bp, Homo sapiens
gcactgggtggcctgctggatcaggacatcccagcggccagcatagttccgctgccggcgtaggcccatcacctgcgggcaggaattggtgaggggtgagtgattttagttgcagggcagcactcagtaggttggaggtgagtaaggagagtccagtggctggccttacccgcatcttatccatgatggcattggtacccaggatgttgtacttcttggaagggttggaggctgcatgtttgatggcccatgtggtcttgccagcagcaggcaggcccaccatcatcagaatctacaagaacaagacagggaaggtgttgcggcatggtggtatggcaccacttggctcggtggtgactgtgagtgtgactctggacctctgagctgtggctgcctctacaaagcggaagcagtaataccatctacctcacagtactggtatcgggattcaaaaagatcaggcttgtcagactctgagcacagtgcctgggacagggtgagcattaagtcaagtgctggccaggcacggtagctcacgcctataatcccaggactttcgggggaaaacaaaaacaaaaaaccaagtgctgtcatcattagcatttatagtattttgtttttttgagacagggtctcactctattgcccaggctggcgtgtaatggcccaattacagctcactgcagccttgaactcccaggctcaagcaatccttctacatcagcctccagagtagctagaactacagatacaaaccatcacacccagctaatctttttctctctttttttggtagaaatgagagtctccttatgttgcccagactggtctcaaactcctatactcaagggatcctcctcccttcttggcctcccaaagtgctggaattataggcatttgccaccaaacccagcccatttacaggattatgtgacccattccccgccccctgcaatagcccagggaaggctgtgtactgggactggccccatggagtgggtagaagtggtacaactttctttaagtatgaaataggaacagagctgcacacacaaggacrtgaattgtatctaatcagtacatttagaatttggtaaacacagatgcatcttaaatgcccgactaggggggagtggcgagtttgtaaggccattaagaatgacgttcattcccttgaaggatttttaaaaaagaaaaaatgatgttcaaagagaggtttttatgtgatgggataaagctcacaaaataatgtgaagtgaaaagagcagggtatcataatgcttataccatagaatctcaatgataaatgtttgtgagcataaaacaggcacttagacattaaaaagaacagatgaactccaaaactctgcaagtaaacttatttgtagatgatggcattatgaaaatttaaattttttacttcttaattttctagaacaagcataaataacttacacatacaagaa

SEQ ID NO: 700430 - DNA, 1009 bp, Homo sapiens
tcattcagtggcccacattttccttaggaaaaacatgagcatccccagccacaactgccagctctctgattccccaaatctgcatccttttcaaaacctaaaaacaaaaagaaaaacaaataaaacaaaaccaactcagaccagaactgttttctcaacctgggacttcctaaactttccaaaaccttcctcttccagcaactgaacctcgccataaggcacttatccctggttcctagcaccgcttatcccctcagaatccacaacttgtaccaagtttcccttctcccagtccaagaccccaaatcaccacaaaggacccaatccccagactcaagatatggtctgggcgctgtcttgtgtctcctaccctgatccctgggttcaactctgctcccagagcatgaagcctctccaccagcaccagccaccaacctgcaaacctagggaagattgacagaattcccagcctttcccagctccccctgcccatgtcccaggactcccagccttggttctctgcccccgtgtcttttcaaacccacatcctaaatccatctcctatccgagtcccccagttcctcctgtcaaccctgattcccctgatctagcaccccctctgcaggtgctgcacccctcatcctgtctcggattgtgggaggctgggagtgcgagaagcattcccaaccctggcaggtgcttgtggcctctcgtggcagggcagtctgcggcggtgttctggtgcacccccagtgggtcctcacagctgcccactgcatcaggaagtgagtaggggcctggggtctggggagcaggtgtctgtgtcccagaggaataacagctggrcattttccccaggataacctctaaggccagccttgggactgggggagagagggaaagttctggttcaggtcacatggggaggcagggttggggctggaccaccctccccatggctgcctgggtctccatctgtgttcctctatgtctctttgtgtcgctttca

SEQ ID NO: 700431 - DNA, 1039 bp, Homo sapiens
gagaacctgtttcttgccaagtgctctgtggctctaagggctggagattctttgatttcaaaatttcctaagtccagtgcttctggttgaggttggctgctttccatagcatctaggaactacattcccatggacaatcaccatttatccatccagccatccatccagccacttatctaacaaatactaacagaatacggcacatggcgctcattctaggagctcaaaaaattgctgtagacaaggatggacaagatccttgcccttgtgtgctgactttcagttatttagagcctctatagatacatgtttgaatgtcacgaagtaatttatcagggttgcctaggttaaaaactgattgaggtggagaagatatggtggcaagagaagaactcttcggggaggtggcattttatctgggacagaaggttgaggattcagctatgaggaaagtatgagagagtatattccaggtgacggggaccacaagaacaaagccctggaatcagaaggagcttgatgtgtttgagaaacaaaataaaggccactgtggctgaattttggtcacatgagatgaggtagaggaggagatttgggacaggtcttttaggaccaaacagatcttggtaagaaatttggattttattctcatttgaatgagaagtcatctcatttgaatgagagggttttaagcaggaaagtgacttaacagaatgtgtattttaaaaagatgattctggatgcactgtggagaatggaagacaggaggatatggatgaaaactgaggactgttttagactttcagggcgaggcaacagtggcctgaatgcctrtggtggtgatagagatggagggatgtggaataatttgagatgccatgacactgtttttccaattatttttttgccaaatctgccattactgcacctttgggatggaagtcactcagtgtggtgtttccttcagtgaatcccgtctagtattccctgggtccactctggaaggagatattggtctgccatgcttttgggaaccaga

SEQ ID NO: 700432 - DNA, 404 bp, Homo sapiens
cagtactcacgacagaagtccggccgcctccactcgccgagctgggccccagcggcctgacaggctgccacgtaggtagccactgcaggacagaggcctccaggatggccctgaacttggcaggcgtccagcaagcagccctggaagtactgcgcgggcggcacaaggccgtggcagggtgccagcgggccgtcggtggcggagatcacgccgcaggcgtccgggccgccgaaggactcctgctgctctggggtgcacggcgacgggcatggcttggacacacattccccgcagccctgggccccgcccacctgccatccagcgggcttcccgcccacagccttsaggtcgtctgcggggtcctggttgtagttcccgcataagccacagagagaggccgcgta

SEQ ID NO: 700433 - DNA, 404 bp, Homo sapiens
cagtactcacgacagaagtccggccgcctccactcgccgagctgggccccagcggcctgacaggctgccacgtaggtagccactgcaggacagaggcctccaggatggccctgaacttggcaggcgtccagcaagcagccctggaagtactgcgcgggcggcacaaggccgtggcagggtgccagcgggccgtcggtggcggagatcacgccgcaggcgtccgggccgccgaaggactcctgctgctctggggtgcacggcgacgggcatggcttggacacacattccccgcagccctgggccccgcccacctgccatccagcgggcttcccgcccacagccttgaggtcgtctgcsgggtcctggttgtagttcccgcataagccacagagagaggccgcgta

SEQ ID NO: 700434 - DNA, 2877 bp, Homo sapiens
caatacatattctttcccagaagagactctaaaagcagatatgtgatttgttcattttctgcctcttgcttcagcaattatggaggcattgagacagagcttccctcagtttgcatccttgagtcaggataaggtagagcagcggtcacagctgaccagcaatggatgcacagactaagccatgaatcaatctatattattactattgctatgaacaataaaacctagagaatttttatttacatagcatgagctacctattctgacttaaaccgtactatttataggactttagcattatttagactgttttgactctgtctctatactaacccacttgaagaaaaacccaatttctctttttgttttatctgatataaaatttggaaacatctatataaaattctaataaaaaatgaaaatattccatttcattttccccaaattatttggttaatttgacctttgattatgccacattattctactcagcttaaaatgggaatgctttattaaatccttcttttccaatatagaaaaatttgacctccaattaattactattttgggctcccttctgaaggaaaaagttagaagaggttagttaacagaaaagctctggtctattgaccaattaaccacccacgctgtaaattctgttaattgacaatttataagcagttggagagcgaaactaggatgcttatatatatacaaatgagtatttccaaaatttctagggatgcaagtactctcctaattgtgactattaacacgttggaatctgtatttagggctgggtgtggtggctaatacctgtaatcccaacattttrggaggccgaggggggcagatcacttgagatcaggagttcgagaccagactggccaacatggcaaaaccccatctttcctaaaaatacaaaaattagccggtgtggtgatgcacacctgtaatcccagctactcagctggctgagacaggagaattacttgcactcgggaagtggaggttgcagtgagctaaaatcatgccactgcactacagcctgagagacagagtgagactccatctcgaaaaaaaaaaaaaaaaaaaaaatctgtatctagaccacctctttttctaatcgtaatatcatcacatattgtatgcattacttaagtcctctggccctccgtttctttatctgtaattatctcatcaaggcatcttgtccagaaatattcttaatatgtttaaatcattcatcatggaaatttgtatataagtaatcaacacataattgtttggtttgcttgctcaatacataattattattatttatactgcttcttgtttttaactttttggaaatcatggtatcatttcctcaaaggtgtttttcaatcagtattcagcattagatgtaaaaccacttattaaaaatttgctttttaaaacagtgggggaaaaaatagacctcagaattaatggaatgcacaactctcatatcaatgggctgatatttggcacttgataaatgtctcctgaatgaatggatgaatggtgaattaattagttcaagtcagaaaatctttattgagcatcaacgctttgctcatgccagaaatagaagtcgaggtcatgaactggaacagaacaggcaaagctagccagggccggcctggagaaccctggcttgagattgctgacaaaaacatacagtgacttgaagcttattagcaaacctaatctttttgctgaatgtaagtaacctaagagggtttactgtgtaaacttttaatttgtgaatccatagatatttttgtcctacatatctgacatatagaataaatttaggtgcagagaagtttagtgactgacctggagctatgagatgattcgataactcatctagaaatgtaaaaccctaggctttccaaatccaagtaactgtgaagatgttcttgactaaattcagtgctaaccagataaaatgaagccttcaaggaaaaaatatttaagacccatatatactgcataaagaaattagattgtcacaatacagtgagcaccttggtaggtacatcagatcacaagaaccagtataatattaacttagtaaatgagctcccagagacctacaggagttaaaacaccttaaagaaagacatacaaacactcacaaaataacttatgcatttgacagacttctctggtaagtttataccaatgagtctcacacagatggctatgtgctatgtaagttacagttttaactgcagttttattttgagttttaaatctgcgatcttagaaccataaaatgcatgaacctgtatattgaattctcttcattaacttggagaaagtgtcaagcctgatattttaaagtacttgttgggcagtaaaggactgtgatgcatataagaaagccagatcaacgagtaccaactatttgcagtccaggtcaattggctcacatagacaacatccacaaatagacaggtaagagccactatccagcaacagaatctggtgtggcttgtcagtaaccactttaacaacctttctaggtcacagcatgattattcattctgacctcagatctgggattgaatgactttcttgactgtgtattcactcattcagcaaatatgtattcggtaactgtggtgtatcaggttatatgatttgtgctagggataccaaatatgtcagcattagacctgctctcaataaatagaaagtctcatggagagacaaatacctgaggaaataattataataccttctgaaatgtgttataatagaggttaagtacaaggtcttatagaagcagagtaacagggcaattaattccagagaagaaaatcacagaaagactaatataaatgc

SEQ ID NO: 700435 - DNA, 2877 bp, Homo sapiens
caatacatattctttcccagaagagactctaaaagcagatatgtgatttgttcattttctgcctcttgcttcagcaattatggaggcattgagacagagcttccctcagtttgcatccttgagtcaggataaggtagagcagcggtcacagctgaccagcaatggatgcacagactaagccatgaatcaatctatattattactattgctatgaacaataaaacctagagaatttttatttacatagcatgagctacctattctgacttaaaccgtactatttataggactttagcattatttagactgttttgactctgtctctatactaacccacttgaagaaaaacccaatttctctttttgttttatctgatataaaatttggaaacatctatataaaattctaataaaaaatgaaaatattccatttcattttccccaaattatttggttaatttgacctttgattatgccacattattctactcagcttaaaatgggaatgctttattaaatccttcttttccaatatagaaaaatttgacctccaattaattactattttgggctcccttctgaaggaaaaagttagaagaggttagttaacagaaaagctctggtctattgaccaattaaccacccacgctgtaaattctgttaattgacaatttataagcagttggagagcgaaactaggatgcttatatatatacaaatgagtatttccaaaatttctagggatgcaagtactctcctaattgtgactattaacacgttggaatctgtatttagggctgggtgtggtggctaatacctgtaatcccaacattttaggaggccgaggggggcagatcacttgagatcaggagttcgagaccagactggccaacatggcaaaaccccatctttcctaaaaatacaaaaattagccggtgtggtgatgcacacctgtaatcccagctactcagctggctgagacaggagaattacttgcactcgggaagtggaggttgcagtgagctaaaatcatgccactgcactacagcctgagagacagagtgagactccatctcgaaaaaaaaaaaaaaaaaaaaaatctgtatctagaccacctctttttctaatcgtaatatcatcacatattgtatgcattacttaagtcctctggccctccgtttctttatctgtaattatctcatcaaggcatcttgtccagaaatattcttaatatgtttaaatcattcatcatggaaatttgtatataagtaatcaacacataattgtttggtttgcttgctcaatacataattattattatttatactgcttcttgtttttaactttttggaaatcatggtatcatttcctcaaaggtgtttttcaatcagtattcagcattagatgtaaaaccacttattaaaaatttgctttttaaaacagtgggggaaaaaatagacctcagaattaatggaatgcacaactctcatatcaatgggctgatatttggcacttgataaatgtctcctgaatgaatggatgaatggtgaattaattagttcaagtcagaaaatctttattgagcatcaacgctttgctcatgccagaaatagaagtcgaggtcatgaactggaacagaacaggcaaagctagccagggccggcctggagaaccctggcttgagattgctgacaaaaacatacagtgacttgaagcttattagcaaacctaatctttttgctgaatgtaagtaacctaagagggtttactgtgtaaacttttaatttgtgaatccatagatatttttgtcctacatatctgacatatagaataaatttaggtgcagagaagtttagtgactgacctggagctatgagatgattcgataactcatctagaaatgtaaaaccctaggctttccaaatccaagtaactgtgaagatgttcttgactaaattcagtgctaaccagataaaatgaagccttcaaggaaaaaatatttaagacccatatatactgcataaagaaattagattgtcacaatacagtgagcaccttggtaggtacatcagatcacaagaaccagtataatattaacttagtaaatgagctcccagagacctacaggagttaaaacaccttaaagaaagacatacaaacactcacaaaataacttatgcatttgacagacttctctggtaagtttataccaatgagtctcacacagatggctatgtgctatgtaagttacagttttaactgcagttttattttgagttttaaatctgcgatcttagaaccataaaatgcatgaacctgtatattgaattctcttcattaacttggagaaagtgtcaagcctgatattttaaagtacttgttgggcagtaaaggactgtgatgcatataagaaagccagatcaacgagtaccaactatttgcagtccaggtcaattggctcacatagacaacatccacaaatagacaggtaagagccactatccagcaacagaatctggtgtggcttgtcagtaaccactttaacaacctttctaggtcacagcatgattattcattctgacctcaratctgggattgaatgactttcttgactgtgtattcactcattcagcaaatatgtattcggtaactgtggtgtatcaggttatatgatttgtgctagggataccaaatatgtcagcattagacctgctctcaataaatagaaagtctcatggagagacaaatacctgaggaaataattataataccttctgaaatgtgttataatagaggttaagtacaaggtcttatagaagcagagtaacagggcaattaattccagagaagaaaatcacagaaagactaatataaatgc

SEQ ID NO: 700436 - DNA, 1153 bp, Homo sapiens
gtaaaaatttggataaataaatctgtacgttcgaagtgagatccaggctggggattttcctttgtgattcatcagcttataggtacaatgttaagctcctggagtgaatgattgaatatggagataagtaaagagatctatagtcaggcctacaggacactcttaatatttagagttcaaacaaatgaggacacaccagcgaaagttactgaaagaaacagcctattgaggaaggagaaaaagtataaattagtggaaggcaactaaggaaagtgtttcaaggaattcagagtgatggtctgtctcaaacactgcagataagaactacaaattcattaatgaattttgcaatgtgtacatcatatgcaattatttgggtaagaacatctttggttgagtgtgaggaatgaaataggttaaagagagaaaaagaggaagcatggagatagtgaatattgataactctctccaagggctttattattaagataaacaggggctttcagggatacatgaagcaagatatggagagtcaaaagagactttgtaaaattttcaattcactaaatttattcccaaattttaaaataaacttctaagtttttcctgtatttttaaattagagactttatttctaaataagttttatgtttacagagaaattgagcagaaagtatggagtttccacataccctcccatttctcactcccccaccacggtttcccatactgtctttccattactatctgtctttgcatgtggatatctacttgttctagcacaatttgtttaaaagattatccttttcccattggattctatttactcatttgtcagagataattgactatgtttgtatccctcccttttygtggctctttattctgattcattgcaatttttgtcttttcttttgccaatacaaatccaatacattagcatagatgagccagtatttatttattattacatagagtctacagttcacattagggttcgcgctttatgttgtacattctgtgggttttgataaatgtgtaatgaaatgtatacaacatgagcataacatgcagaatagtttcattgcccaaaaatcttctgtgctccagctattcatccctctatttattctgctaatgtcgtagaaaccac

SEQ ID NO: 700437 - DNA, 670 bp, Homo sapiens
taaataaggccctaatgtacatattgtatttttactcaatacaaactgtcacaaaatgccaaagtgcaattcaggaaaagcaatttcatggaacaccaaaataatgtttttcctaaatttttatcataatcataatcttaaaaatcatctatgttctatgttctccggattaagataaatgtacattacagaaagaaaaaatacattttasatcatatcataagaccctattgtaaaatagttttctttattgtggtattgagcctttaattttatagcaataaaggtacatttagatgattaagaagaagagaggaggaataagagccattttatttcttattggaaacacaagccctggcctgcttgtgttaaaaataaaatatcttgtattttaaaatgctggtatttaaaataaaatactttggctacttctccaagaaaaataaaacacactaaaggaaacaagaaaaaagtttgacgaaataaagttcaggaaaatgtgaacttaattataatcttctaaaaaaaaccataaaatagttctcctgtattttttccaataatgaacatcccttttatgtttctagtacatataattgtcttattttaatgatgtacaatttttaatagccaataattactcccccaccacacacacacacacaca

SEQ ID NO: 700438 - DNA, 1040 bp, Homo sapiens
tttagattattttaaagtatatagttttacaaatcagaaagctatattaggaagcctttaccattttatctctgacatcaatgagtcaaagtatgtttggtacaaatgcaagtgacttatcactaggttataatggatgtctgtggttcaaggtagcaggggatcccagaacaaagagtacgattttattcacaggagaaagaaaacaaaaaatagcagtgtattctagtgcaatttcctggaaagttgtgaaatagctttctttttatagtgttaaaactgttgtcaatgtatattttaaaaacacacttttatcttttatttttaacatatttgcatcaaacattatctaattttaaacttgtcatgcaaagtttcttcaaagatagctattttaaattgttagtgttagcactaataatgggggatatttttacttttagttatcttctataaaaagtaagttaagaaatataaattactattttgttaaattaattatcctaaatattttacagaaactgtgcagaattaattgtttgtctctctcagaccattcaagccatatttgtttattaaaactatattatttcagtaattttataattatgccaatgctggaaaaagatgctgtcttctgattgaacagaaaatctaatggtctaattcatatttttctatacttctaaagatataaaatttactttgaaataaactactttttattattttattttatttttaattgacacacaataattgtacatatttatgagatacatagtgatgtttcaatacttataatggatagtgttcrgatcaggtgaactgacacatccgtcatctcaaacattcatcatttatttgtgttgggaacataccatatcctccctctagctatttgaagctatgtaacatattactgttaactatcatccaacagtggtagagaacactagaaattatttctcctatctagatgtaattttgtattcttcaacaaaccactccctacctcaacctttccctttccttctcag

SEQ ID NO: 700439 - DNA, 659 bp, Homo sapiens
atttattcttgaatttattatgtaaggaataaggatttwaaaaatatttattttgaacttaatatcaaggaactcaaaagtaaataaaatgtaggaaaaaacttattgataagtcagttaaagaccaataacaaatgttacagcagtaaaaacacttattatagcctcaatcattctggaactcacttttaaaatcctttaaagttatggcattataaattgatgtttaaggtgtcctaatattgatatcaagaatttatgtccttcatttgatcctgactactactttgcaaaagacagtatcatcttatttagatttagatcatttggtagccttaagaaattatctgacaataccaacaaatacaaaagcaaatatcattgataaattgatttgagatgtgaagaaacattttcttacatctattttacataaatcattgctataggcacactgcattttaaaaaaacaaggtgatagtgtaacttaaacaagttcaaaagctagtaaaaacaataaaatatatcccacaaaacaatcatatagacaaaatataggtgccaaagggagatgtgaccaaaatactttgagaaaaaaagagacgaatatgaagggtcaaaaatgaggaagaaagagtgttggaatttaagagtattga

SEQ ID NO: 700440 - DNA, 1817 bp, Homo sapiens
tttcaaactatattttctggattcttttggtagttctttcccagagtaagtccctaatacttagaacctgccaaagagagtaagaatgtgtattttggaaagaaaatgtrggtggaagagaaatattttaaataatgtatattaatgaaaaaattatatacagaatttcatacactaatttcttaaattcctaaattcagggagctattttgccttcactattaagcaactatatttttataacattttttaaactgtaaatattttagtttgagacttctttaaatataatggaatgtattcatagccctgttgtatttggcaaatgtatttgttaatatttcaaaaactatttttaggtgttttataactgtagttgtgtggaagtaactggtctccagaacagaaattactcagcacacttgggtgaatgcccaagagataatacttgtacaaggaaatttttcatctatgttgcaattcaagtcataaactctttgttctctgcaacaggaggtaccacatttatcttgttgactgtgaagtaagtatgatcctgtaaaacattgtcatgtatattagactaaaacacacctaatgataggcatatttttctgtattttgagctcaaattcatattttgtcaatttttaattctttgagaatgcattttcttagaattattttgatatttcaataacatcattaataatttttgtctctaatacttccattgtcaaatctaggctctatactttcttctctttaataaaaatcttaaggcacacactgattgacagttgccttgattgtaggagaatctttgtgtgattgtaaaagaacttttaattttgagttgcgttgcatcctaatgagccagttaagagtaaatcatctgttgatttcattgaaagaaaacatttagcaaccaggtataaatacaaacttcaatttgtaatgaaattctaatgctttcaattcacccacagcatggcttttgacctggtatttcatgatacccttgtagggcataagaaaaatatgtgtaaataattcattccttttttcacttattagacagttatttagacaggatatgatgttcgatgaagaatatttcctagtaagtaaaaccaataaggtacttgttttctcacagcttagaaaatgacaagactgatgtgagacaaataagtataaaaataaacacataattacaaattgctgtttgtcttaataaggaaaaagactgccaattaaaggaataaaaagagaaactaaatttaggattaaagtaaggggatgtgaggggaaagactcccagagtacatctcaaaagaagtgacattatatctaaagatgtaaagaaaaagccaaatgaagggctttcagggagagggtctaggtgctgtttccttaagacaggaaagagctagaatttttgaggaatgaaaagaagccagtttattggaacacactgagtgagaggggtatggcagatgatgtttggagagttgaggggaagcagataatgtgtgccctactggccaaaataagcacacaatcacctaaaacgggaaacatgtaaagacatgcatgtagatcttaaaaatatacatgataagtagagtgacctggggtaacacctaattgtacttttaaaacctactagttgatcggaagttcatggccagccaacagcatgacatggtagaaaaaaaaaaagcaaccaacaatgtgttttaacttttgttaatatgaatataaacctgtaaactaagtcagtttacagttgttaaattttcaccctgcctgca

SEQ ID NO: 700441 - DNA, 1817 bp, Homo sapiens
tttcaaactatattttctggattcttttggtagttctttcccagagtaagtccctaatacttagaacctgccaaagagagtaagaatgtgtattttggaaagaaaatgtaggtggaagagaaatattttaaataatgtatattaatgaaaaaattatatacagaatttcatacacyaatttcttaaattcctaaattcagggagctattttgccttcactattaagcaactatatttttataacattttttaaactgtaaatattttagtttgagacttctttaaatataatggaatgtattcatagccctgttgtatttggcaaatgtatttgttaatatttcaaaaactatttttaggtgttttataactgtagttgtgtggaagtaactggtctccagaacagaaattactcagcacacttgggtgaatgcccaagagataatacttgtacaaggaaatttttcatctatgttgcaattcaagtcataaactctttgttctctgcaacaggaggtaccacatttatcttgttgactgtgaagtaagtatgatcctgtaaaacattgtcatgtatattagactaaaacacacctaatgataggcatatttttctgtattttgagctcaaattcatattttgtcaatttttaattctttgagaatgcattttcttagaattattttgatatttcaataacatcattaataatttttgtctctaatacttccattgtcaaatctaggctctatactttcttctctttaataaaaatcttaaggcacacactgattgacagttgccttgattgtaggagaatctttgtgtgattgtaaaagaacttttaattttgagttgcgttgcatcctaatgagccagttaagagtaaatcatctgttgatttcattgaaagaaaacatttagcaaccaggtataaatacaaacttcaatttgtaatgaaattctaatgctttcaattcacccacagcatggcttttgacctggtatttcatgatacccttgtagggcataagaaaaatatgtgtaaataattcattccttttttcacttattagacagttatttagacaggatatgatgttcgatgaagaatatttcctagtaagtaaaaccaataaggtacttgttttctcacagcttagaaaatgacaagactgatgtgagacaaataagtataaaaataaacacataattacaaattgctgtttgtcttaataaggaaaaagactgccaattaaaggaataaaaagagaaactaaatttaggattaaagtaaggggatgtgaggggaaagactcccagagtacatctcaaaagaagtgacattatatctaaagatgtaaagaaaaagccaaatgaagggctttcagggagagggtctaggtgctgtttccttaagacaggaaagagctagaatttttgaggaatgaaaagaagccagtttattggaacacactgagtgagaggggtatggcagatgatgtttggagagttgaggggaagcagataatgtgtgccctactggccaaaataagcacacaatcacctaaaacgggaaacatgtaaagacatgcatgtagatcttaaaaatatacatgataagtagagtgacctggggtaacacctaattgtacttttaaaacctactagttgatcggaagttcatggccagccaacagcatgacatggtagaaaaaaaaaaagcaaccaacaatgtgttttaacttttgttaatatgaatataaacctgtaaactaagtcagtttacagttgttaaattttcaccctgcctgca

SEQ ID NO: 700442 - DNA, 1817 bp, Homo sapiens
tttcaaactatattttctggattcttttggtagttctttcccagagtaagtccctaatacttagaacctgccaaagagagtaagaatgtgtattttggaaagaaaatgtaggtggaagagaaatattttaaataatgtatattaatgaaaaaattatatacagaatttcatacactaatttcttaaattcctaaattcagggagctattttgccttcactattaagcaactatatttttataacattttttaaactgtaaatattttagtttgagacktctttaaatataatggaatgtattcatagccctgttgtatttggcaaatgtatttgttaatatttcaaaaactatttttaggtgttttataactgtagttgtgtggaagtaactggtctccagaacagaaattactcagcacacttgggtgaatgcccaagagataatacttgtacaaggaaatttttcatctatgttgcaattcaagtcataaactctttgttctctgcaacaggaggtaccacatttatcttgttgactgtgaagtaagtatgatcctgtaaaacattgtcatgtatattagactaaaacacacctaatgataggcatatttttctgtattttgagctcaaattcatattttgtcaatttttaattctttgagaatgcattttcttagaattattttgatatttcaataacatcattaataatttttgtctctaatacttccattgtcaaatctaggctctatactttcttctctttaataaaaatcttaaggcacacactgattgacagttgccttgattgtaggagaatctttgtgtgattgtaaaagaacttttaattttgagttgcgttgcatcctaatgagccagttaagagtaaatcatctgttgatttcattgaaagaaaacatttagcaaccaggtataaatacaaacttcaatttgtaatgaaattctaatgctttcaattcacccacagcatggcttttgacctggtatttcatgatacccttgtagggcataagaaaaatatgtgtaaataattcattccttttttcacttattagacagttatttagacaggatatgatgttcgatgaagaatatttcctagtaagtaaaaccaataaggtacttgttttctcacagcttagaaaatgacaagactgatgtgagacaaataagtataaaaataaacacataattacaaattgctgtttgtcttaataaggaaaaagactgccaattaaaggaataaaaagagaaactaaatttaggattaaagtaaggggatgtgaggggaaagactcccagagtacatctcaaaagaagtgacattatatctaaagatgtaaagaaaaagccaaatgaagggctttcagggagagggtctaggtgctgtttccttaagacaggaaagagctagaatttttgaggaatgaaaagaagccagtttattggaacacactgagtgagaggggtatggcagatgatgtttggagagttgaggggaagcagataatgtgtgccctactggccaaaataagcacacaatcacctaaaacgggaaacatgtaaagacatgcatgtagatcttaaaaatatacatgataagtagagtgacctggggtaacacctaattgtacttttaaaacctactagttgatcggaagttcatggccagccaacagcatgacatggtagaaaaaaaaaaagcaaccaacaatgtgttttaacttttgttaatatgaatataaacctgtaaactaagtcagtttacagttgttaaattttcaccctgcctgca

SEQ ID NO: 700443 - DNA, 1817 bp, Homo sapiens
tttcaaactatattttctggattcttttggtagttctttcccagagtaagtccctaatacttagaacctgccaaagagagtaagaatgtgtattttggaaagaaaatgtaggtggaagagaaatattttaaataatgtatattaatgaaaaaattatatacagaatttcatacactaatttcttaaattcctaaattcagggagctattttgccttcactattaagcaactatatttttataacattttttaaactgtaaatattttagtttgagacttctttaaatataatggaatgtattcatagccctgttgtatttggcaaatgtatttgttaatatttcaaaaactatttttaggtgttttataactgtagttgtgtggaagtaactggtctccagaacagaaattactcagcrcacttgggtgaatgcccaagagataatacttgtacaaggaaatttttcatctatgttgcaattcaagtcataaactctttgttctctgcaacaggaggtaccacatttatcttgttgactgtgaagtaagtatgatcctgtaaaacattgtcatgtatattagactaaaacacacctaatgataggcatatttttctgtattttgagctcaaattcatattttgtcaatttttaattctttgagaatgcattttcttagaattattttgatatttcaataacatcattaataatttttgtctctaatacttccattgtcaaatctaggctctatactttcttctctttaataaaaatcttaaggcacacactgattgacagttgccttgattgtaggagaatctttgtgtgattgtaaaagaacttttaattttgagttgcgttgcatcctaatgagccagttaagagtaaatcatctgttgatttcattgaaagaaaacatttagcaaccaggtataaatacaaacttcaatttgtaatgaaattctaatgctttcaattcacccacagcatggcttttgacctggtatttcatgatacccttgtagggcataagaaaaatatgtgtaaataattcattccttttttcacttattagacagttatttagacaggatatgatgttcgatgaagaatatttcctagtaagtaaaaccaataaggtacttgttttctcacagcttagaaaatgacaagactgatgtgagacaaataagtataaaaataaacacataattacaaattgctgtttgtcttaataaggaaaaagactgccaattaaaggaataaaaagagaaactaaatttaggattaaagtaaggggatgtgaggggaaagactcccagagtacatctcaaaagaagtgacattatatctaaagatgtaaagaaaaagccaaatgaagggctttcagggagagggtctaggtgctgtttccttaagacaggaaagagctagaatttttgaggaatgaaaagaagccagtttattggaacacactgagtgagaggggtatggcagatgatgtttggagagttgaggggaagcagataatgtgtgccctactggccaaaataagcacacaatcacctaaaacgggaaacatgtaaagacatgcatgtagatcttaaaaatatacatgataagtagagtgacctggggtaacacctaattgtacttttaaaacctactagttgatcggaagttcatggccagccaacagcatgacatggtagaaaaaaaaaaagcaaccaacaatgtgttttaacttttgttaatatgaatataaacctgtaaactaagtcagtttacagttgttaaattttcaccctgcctgca

SEQ ID NO: 700444 - DNA, 1817 bp, Homo sapiens
tttcaaactatattttctggattcttttggtagttctttcccagagtaagtccctaatacttagaacctgccaaagagagtaagaatgtgtattttggaaagaaaatgtaggtggaagagaaatattttaaataatgtatattaatgaaaaaattatatacagaatttcatacactaatttcttaaattcctaaattcagggagctattttgccttcactattaagcaactatatttttataacattttttaaactgtaaatattttagtttgagacttctttaaatataatggaatgtattcatagccctgttgtatttggcaaatgtatttgttaatatttcaaaaactatttttaggtgttttataactgtagttgtgtggaagtaactggtctccagaacagaaattactcagcacacttgggtgaatgcccaagagataatacttgtacaaggaaatttttcatctatgttgcaattcaagtcataaactctttgttctctgcaacaggaggtaccacatttatcttgttgactgtgaagtaagtatgatcctgtaaaacattgtcatgtatattagactaaaacacacctaatgataggcatatttttctgtattttgagctcaaattcatattttgtcaatttttaattctttgagaatgcattttcttagaattattttgatmtttcaataacatcattaataatttttgtctctaatacttccattgtcaaatctaggctctatactttcttctctttaataaaaatcttaaggcacacactgattgacagttgccttgattgtaggagaatctttgtgtgattgtaaaagaacttttaattttgagttgcgttgcatcctaatgagccagttaagagtaaatcatctgttgatttcattgaaagaaaacatttagcaaccaggtataaatacaaacttcaatttgtaatgaaattctaatgctttcaattcacccacagcatggcttttgacctggtatttcatgatacccttgtagggcataagaaaaatatgtgtaaataattcattccttttttcacttattagacagttatttagacaggatatgatgttcgatgaagaatatttcctagtaagtaaaaccaataaggtacttgttttctcacagcttagaaaatgacaagactgatgtgagacaaataagtataaaaataaacacataattacaaattgctgtttgtcttaataaggaaaaagactgccaattaaaggaataaaaagagaaactaaatttaggattaaagtaaggggatgtgaggggaaagactcccagagtacatctcaaaagaagtgacattatatctaaagatgtaaagaaaaagccaaatgaagggctttcagggagagggtctaggtgctgtttccttaagacaggaaagagctagaatttttgaggaatgaaaagaagccagtttattggaacacactgagtgagaggggtatggcagatgatgtttggagagttgaggggaagcagataatgtgtgccctactggccaaaataagcacacaatcacctaaaacgggaaacatgtaaagacatgcatgtagatcttaaaaatatacatgataagtagagtgacctggggtaacacctaattgtacttttaaaacctactagttgatcggaagttcatggccagccaacagcatgacatggtagaaaaaaaaaaagcaaccaacaatgtgttttaacttttgttaatatgaatataaacctgtaaactaagtcagtttacagttgttaaattttcaccctgcctgca

SEQ ID NO: 700445 - DNA, 829 bp, Homo sapiens
ttttataaattacccagtctcaggcagttctttatagcagtatgagaacagactaatacataacatctctagaagtaacatggtcctttgtatttataggtgagataatcagggtttagatgtataggtgacaattgtagatcacacatttagtaaatgtcagtttggggttttagttcaaggcatttgacttcagagtccacacttaccaacatctaatctcttatgattaagagtatttaatcatactcagatactcaggaggctgatgtggaatgattacctgagcccagaaggagaaggttgcaggttgcgatgagccttgatcacatacaacactgcactctagcctgggcaacagagttagtgagaccctgtctcaaaaaaaaaaaaaagtatttgcctggcaataaagaaaccaaaataaagatagcactgagataatataactgtatacatggctataccattgatactcattgtatgagggggtctcatttctatgtccatgaaattctcctgaattgaattcagcaaaaatagtagagctcttcctgtgtactgtacctggaactttaccaggtttctgcaaatacaaatggaaacaactcattgctcctgcctatgaagaagtagaactatggtaaaaataagaaaatggcttcccaataatagggagttatactatggaagtaatgtggaagcccagcaatgggaatcatagtccagccatgatggcatagtcatgggagaagagagagggtggggatggcttccaggagggtgtgaagagggggtccagtactgaasggggaaaagttggatcagg

SEQ ID NO: 700446 - DNA, 1026 bp, Homo sapiens
gaggctcagctcccaggatgtgtcctttagcatttaattatgtgccacgtgggcccttctctccataaggacatctrctggtccccaccaacaggccggcacacctggacagtggcagagttcacgtggcagacgctctgacatagctgttgcccttggaaggcaaccagggccacacatccatcagggatgtgggtggagaatcagtgagcactcgggtggactttttcacttaatatgtaattacttccttgagtaacatccttttcccgccagcctgggcctctctctgctatttcattttttcctttgatctctcaaaggatgttcagttaacatggttgagcaccaacccaagggcacggagggcacaggtggcagggatcctggcaaagtgtcctcaggagagagccgggactagagtgcagacagggcagcagagtggccaggagcacaggatcagggctcacacactgtgtggggtgtgatccacacactgccgctcagcctccctggacctcagccccctcatccttgactgcatgctagggcgtgccaggccttaccccaaacattttgcacatatgcacttctgtaatcctcacagtaacaccgcgggggaggcgctactgtcagccttggtgcatttgtttgctagggatgctgtaatgaagtattgcacactgcgtggcttcaacaatggaaatttatttcctcaccgttccaaatcaaggttgggcagggttggtttttctgagggccgtgagggagaacccttggctggcagaaggcttccttctccctctgtcttcatctcttcacattgtcttccctctgtgtgcatttctatgtccacatttcctctttttatgaggatagcagtcatattgaactatgactgatatccttataaatgacctgattttaacttgattaactgtaaaattaattttcactagattaactctaaataacttgattaactctatctccaaataaggacacttcctgaagtaccaggagtta

SEQ ID NO: 700447 - DNA, 1262 bp, Homo sapiens
gggggaacacttcccagctcattctattactatgataccaaaatcagacaaagacatcacaagaaaaggacagacatatatcctgtataaatataaatgcaaaaatcctcaataaaatattagcaaacaaaatccaggaatctataaaaagaattatataccatgaccaagttggaggaataaggagtgagagctaatacgtataggacccctacacattgttgaaccccaacacggaactactaaatctgaaactcaggtagagcttttgatttattgggtcgaggatgggacctgagaatgtgcatttcttttctttttagagatggggtsttgctctgttccctaggctggattacagtggtatgatcacaacttactgcagccttgacctcctcagctcaagcaaggagccttagcctcctgagtagctaggactaccagtgtatgtcatcatgtctggctaattttttttttttttaatttttgtagagatgtggtcttggctatgttgcccaggctggtcttgaactcctggcctcaagcaatcctcctgcctcaacctcccagagtattggtattacaggtgtgagccaccacgctcagccagaatgtgcatctctaacaagttcacagataattctgatgctgcccgtccactgaccatactttgaaaaccaccggtttggaggaagaaatagactagccataaactcaatgaacagatatggtaatcaaagcaaaagacagcactaaacaagagagtggcagtgaaatttataaaaaatattaataccagagaatgatgatacaattaacagaaacaaaaaactccagaataaaagtgggtttgggagaaatagtgatgaattttgttgccatttttatccttgaaacagagaaaacaaaaggtaattaaaataagaattacaaatttagcactcactatagagtattattgtctggttttcccttctttaggtctattttaaaataaaactgtttggataaagacaatcataaatatatttattacaaagaacaaaatggactaaatttttactttctaggatttagttttctccagtgaaatataatatcaatatatgctgctgcaatatagttagattaaaaccagtaaactggacattagatgaggtttcaaagtccatttgatcaactacatcaattacatgaagacaaagcaagtctagatattttttcacatgtgcttcagtataaagagaccatctagtaaccta

SEQ ID NO: 700448 - DNA, 2291 bp, Homo sapiens
tgactgcccataagagggaatcactaaccataactttggttaagactattgccaaagaatgtattcaactactcttgatttatagttgttgaaaagtatcaaacgtgttttttttttttcaaacaccacgacttggaacccaacatgcataagatacagataatgatccatatttaaagattttctttgcagtattatctactctatgaaaatgaaatattggaaaccaattgaatgtcttaaaaagataagtaaatttttttgttaagatcatggtatgaatttggtaataaaaatattttggatagatttttagtgattagaaatatgatcaaagactaatagtaagcaataaataaataagaattcaaagttatctattttctgtattccaatcacattattttttctattgttgagaaagtactgaaagcaataaatatattaaagcattaaccataattttaaatataataattgtaggacatttgtgagagttgttaatactttgcacaataaagtaacaagtggtttttcttttcttcagtaaacttttctgtaatgataatgttctctttttataatcagaaaataatgaaatttaatttaaaagccaatatgtgacttataacaacatagtttaagaagaaggaaagatttctatgagttgcttctgatggagttttatatttagaaaaaaggaacaataaatggagaggctaacataaacgttctaatatatggaggtttgaatctcatttaagtaacaaggatttccacagccctatttatttaaatatatttaaataatgatacttattaaagaaaaacatgttggttatgtagacggcaaataagcatattaaaagacactccaactatatgccatcagggaaatttaaattaaaacaacagtgagatgccattacatacctcttagagtggtcaaaatccagaccactgaaacaccaaaatgctgataagaatatggagcaacaggaacactcattcaatgctgatgggaatgcaaagtggcatagccactttggagacatgctggcagtttcttacaaagcttaacatccttttctcactgatccagcaatcacacttcttggcatttacccaaaggagttaaaagctgtatccactgataaacttgcacacagctgtttacagaaactttttcatcattgccaaaacttagaagcgattaagatgtccttcagtattcagtaggtgaatggataaactgtgatatagccagataatgagacattacccagcattaagaagaaatgagctatcaaagcatgaaaagacatagaggaaactaaaatgcatatttctaagtgaaagaagccaacatgaaaaggctacatactatatgattccaactgcatgacattctggaaaaggcaaaactataaagacagtagtaaaaagatcactggttgccagggactagaggagaggaaggaatgaataggcagaagaaagatttttaagactgaaaatgttctgtatgatactataatgtgaatacattcaacatatatttctccaaactcataaacgtacagtaacaagagtgaaccctagtgtaaactattgactataggtgacaatgatgtgtcaatgtaggttcatcaattttaacaaatgtaccgctttggcraaggatgttaatagtgggagaggttatgagtgtgtgaaggcagtgagtacacgggaaatcttagcactttctgcttatttttgctataaacttaaaattgctaaaataaaaaagtttactttaaaatgtttgatttatagaatttctgctttcactttcaaatttattctggtttattttaacataaaagtaaatttattttaaatatgtacttttcaaagaaaactatatcaaaataataagagctatttataacaaacccacagtcaatatcatgctgaatgggcaaaaactggaagtgttccctttgaaaaccggcacaagacaaggatgctctctctcactgctcctattcaacagagtatttcagggcaatcaggcaaaagaaagaaataaagcatattaaaataggaagaaaggaagtcaagttgtctctgtttgcagatgacatgatcgtatatttagaaaaccccatcgtctcagcccaaaatctccttaagctgataagcaacttcagcaaagtctaagaatacaaaatcaatgttcaaaaatctcaagcattcctatacaccaataatagataaacagagagtcaaatcatgagtgaactccc

SEQ ID NO: 700449 - DNA, 773 bp, Homo sapiens
tccactatacaacacctctactgttaagtggataaaaattaccaacagtcaaagcgactcagcaagacactgaggtactacttagcttttaaacgggtcacattaacctgagcaagtaacttacgaactgaggaatcctggttcagcagttttatttttgtttttagrtaatactaaattgagtggctacaatctcagagggtaatattaaaattgacttcaaagtgacctttaaatttaaatattatcagaaatacgtagaatgaagttttattttctttaaaagcagactaaagagactgcataaaaacaaaagagaaaaataatttataatttgggcagtcaataatcgtcataggaatgtagaattcaaagtgtaggtaatatgataaataaagcaataatttgatttttataactgtattcccaatgtgtataacagtttctaaaacattatagccccttagtacatatttgttgagtggatagatgaatgaatatactgttatatcaaatttttcaaagataatcataactaataaaagttaataagtactatatgtttagtttggtgctctcacatgtaaaagaaaaaatgaaaatagtaagccaggataattgaagtctaaaatatcaccaaattaaaaaactgacattgtataaattaagttacacattgattttagctgataaaaataattaatgaaaatctttaaaaatataaatttattaatgaataatactagaagttttttctttctactgaaaataat

SEQ ID NO: 700450 - DNA, 773 bp, Homo sapiens
tccactatacaacacctctactgttaagtggataaaaattaccaacagtcaaagcgactcagcaagacactgaggtactacttagcttttaaacgggtcacattaacctgagcaagtaacttacgaactgaggaatcctggttcagcagttttatttttgtttttaggtaatactaaattgagtggctacaatctcagagggtaatattaaaattgacttcaaagtgacctttaaatttaaatattatcagaaatacgtagaatgaagttttattttctttaaaagcagactaaagagactgcataaaaacaaaagagaaaaataatttataatttgggcagtcaataatcgtcataggaatgtagaattcaaagtgtaggtaatatgataaataaagcaataatttgatttttataactgtattcccaatgtgtataacagtttctaaaacattatagccccttartacatatttgttgagtggatagatgaatgaatatactgttatatcaaatttttcaaagataatcataactaataaaagttaataagtactatatgtttagtttggtgctctcacatgtaaaagaaaaaatgaaaatagtaagccaggataattgaagtctaaaatatcaccaaattaaaaaactgacattgtataaattaagttacacattgattttagctgataaaaataattaatgaaaatctttaaaaatataaatttattaatgaataatactagaagttttttctttctactgaaaataat

SEQ ID NO: 700451 - DNA, 619 bp, Homo sapiens
ttaacttgaatactgctgaaaggtgtaattaacatttaataatctatattaatatgcatgcgataaccaagatgatttatgtagtacggggaagaaatttcaactctactctttgaaaagatatcaaactctttgcttgtcattggacatgtttttcagaaatactcatgcagactttgtcaaastcattgaaaaacagaaatgtttgctaaagctttcttgcgtagaatgtgcatttttcaaaagatgtcagacaataagctgggtcagaggaaataatgaaagctgaatgtggcatcaactccagttatagaataaaagccactgttttagtctttatagtgcaacagttgcgagtaatacaaaatgaatttaatggagcaccaaaatgtaacaacttgaataaaatgtatttttgttgatgaaaaaaggaaacaatcttgtgggtcacaattacttgatcctgtgaattcagatccctttgaagggtacaatattgatttgtggagtgtcttgttattactgaaggctattctctttactgggatgcttttcccttgcaaaaagaaattagattatacagctgatatcattaaagcaagaggaaaattgcattaaa

SEQ ID NO: 700452 - DNA, 790 bp, Homo sapiens
gaacatctcttatgcctttcctaaattgattttgaactgtctttaccagtataatataaattaaaattatgccagtccaggaaatatttagtgcagtgaagttattctgyataataaagtaatggtagctacctatcatacatttgtcaaaatccatagaatttacaagacaaaaagtgaaccctaatgtaaactatgaattttagttaataataatatatcaattttggtccctcagatataacagctatatcacagtaatgcaagctattaataggagaaacttggtggggctaagagatgatacaagaattctacttttggctcaatttttctattaacctaaagctgctcaaaaaataaagcctgttaattaaaaaaaataatacaggcaaatgttacttaagtttcttatggcaaatgttccaaggtctattatagttcaaggtttcatccaacgattaatgaatgcaataactttttatgtttctcttagttacattatatttttttaggtgtatcatgctttctaaatcacattttatttaaaagaaaaataggtaaattgttaaaatctccaaaaagttgaataattcttgtgtctattgaaacattcataaatagagtaacaaaataaataaactcagattttacatgtatacttcactctcatttccttcaagttaatttttgcaatgggagctgggtattatgaagtggtcacacaaagcagtttcttttctgataatttagaagtgaagatagtaaccatttaattatagtagttaaa

SEQ ID NO: 700453 - DNA, 790 bp, Homo sapiens
gaacatctcttatgcctttcctaaattgattttgaactgtctttaccagtataatataaattaaaattatgccagtccaggaaatatttagtgcagtgaagttattctgcataataaagtaatggtagctacctatcatacatttgtcaaaatccatagaatttacaagacaaaaagtgaaccctaatgtaaactatgaattttagttaataataatatatcaattttggtccctcagatataacagctatatcacagtaatgcaagctattaataggagaaacttggtggggctaagagatgatacaagaattctacttttggctcaatttttctattaacctaaagctgctcaaaaaataaagcctgttaattaaaaaaaataatacaggcaaatgttacttaagtttcttatggcaaatgttccaaggtctattatagttcaaggtttcatccaacrattaatgaatgcaataactttttatgtttctcttagttacattatatttttttaggtgtatcatgctttctaaatcacattttatttaaaagaaaaataggtaaattgttaaaatctccaaaaagttgaataattcttgtgtctattgaaacattcataaatagagtaacaaaataaataaactcagattttacatgtatacttcactctcatttccttcaagttaatttttgcaatgggagctgggtattatgaagtggtcacacaaagcagtttcttttctgataatttagaagtgaagatagtaaccatttaattatagtagttaaa

SEQ ID NO: 700454 - DNA, 790 bp, Homo sapiens
gaacatctcttatgcctttcctaaattgattttgaactgtctttaccagtataatataaattaaaattatgccagtccaggaaatatttagtgcagtgaagttattctgcataataaagtaatggtagctacctatcatacatttgtcaaaatccatagaatttacaagacaaaaagtgaaccctaatgtaaactatgaattttagttaataataatatatcaattttggtccctcagatataacagctatatcacagtaatgcaagctattaataggagaaacttggtggggctaagagatgatacaagaattctacttttggctcaatttttctattaacctaaagctgctcaaaaaataaagcctgttaattaaaaaaaataatacaggcaaatgttacttaagtttcttatggcaaatgttccaaggtctattatagttcaaggtttcatccaacgattaatgaatgcaataactttttatgtttctcttagttacattatatttttttaggtgtatcatgctttctaaatcacattttatttaaaagaaaaataggtaaattgttaaaatctccaaaaagttgaataattcttgtgtctattgaaacattcataaatagagtaacaaaataaataaactcagattttacatgtatacttcactctcatttccttcaagttaatttttgcaatgggagctgggtattatgaagtggtcacacaaagcagtttmttttctgataatttagaagtgaagatagtaaccatttaattatagtagttaaa

SEQ ID NO: 700455 - DNA, 643 bp, Homo sapiens
tatattcctatatatgtgcacatatgcatgtgggtaacttccgatgctgctttctctccatcctgagatgtgacactgctatccagaccaggccagcagctgccaagtaaggggagttccccagctctgctacggtttccacaacatacccaccctcagtcacattgactctattcttccccatgtactcttctctcccagagcttccaatccagagactcatcaactcagacagtcagagctggaggagacctccaggatggatcaagtatttttgatctctcttgcaccatgggccctttggctgtgtgatgaaactcatgggatcccatctccaaacaatcattttacatgcataaaataaaacacacagaatttcaaaggacaccatacattccttgagyggtaaggttttaggccatgtccttcatgtttcatataagggaactcatctgtggtcagcattttggcccctggccttctgtcactctgtgaccttctttcctctgaatgacttatgtgattctattgcagctttccacatttaacctccctttctaccagacctaggaaatgaccccttgattttcagagaacttttcaaggtcagtaccattgtcttcacttctagatgcagagacta

SEQ ID NO: 700456 - DNA, 2020 bp, Homo sapiens
tgcctcctatttyttaaaagagactttgcacaggatgccctccatgcctgcctcccatccacttgacaccttgttcttagtccctgcaattttttctccagatatcattgcccttgatgcatcttggaaagatgtcctagaaccagactgttatcctacccacaccctgcttctttgcttcccatatcttgtcagcctttcatggccttgcctaggtcacacctcttcaagcaaactctccccggtgacttgatccactctgatctccctcgtctgtgcctccctggccttcagctctgtacctctcagcaggtcctgccagtattccatcttccctacagccttgtaaatacagatctccagacatgtgagaaaaagacttggagccaactcattagggtgaggtggactggcactcattggagaatgttaagattcctggatgttagagctggtgaaactatcaaaaaccatctgcttctacccatcaatatacctatacttagagttaaattgaagcccagaagagaagagtgacttgcccaaggtcacacagcaaatttattaaagaaaagaacaaaagccaggcacagtggtacacacctgtagttccagtcaccagctacttgggaggctgagagggagaggaacccttgagctcaggagttcaaggctagcctggggaacatggtgagacctcatctcttaaaaaacaacaacaacaacaacaacaacaacaacaaaaaacagaacagacctgggtcctggaccctgatttgtcacttattggctgtgtgagttgggacagaccacttctttatctgagcctcattttgtttggtgctgacagcctatgaatctagaaaggatcctatagtcatttgccaagatgctatttgaaggtctcttacaaaggtcctcatcttagtttaagtgagatctcaagcctgttgtgggtcagaaatctggtgatatcttaggtgctttcagaaacagtgctaacggatggaaatgttcaagtctgtgtggtatcaggctcctgaggtgtcggagccctgaagaatgccaagggcctgtgaacacaggtaacagtttgctcctcaggctattcaaacaaaaagtattctctctttggttctatttccagccatagattgagccctaatcccaatacagactaagttgcaattccagccacaagccaagccctagtcctccaaccttggccacaggttgaacaccaattccacccctatacaagaccccttacccaggctgggtccctgacctggttactgaccagtactggtcccagccccaggctgagccacagacatgtgtgatgctggtcactctagacactcggctctttgtggatgagtgtccaccagaggcctactatcttcttacctccctcttcagtgctttctgccctactcctctcagctcctctctttggttctcttccctaattgtcccttgtaggtgtctagtatgctctgctttctcttccctccctccatccaatcctgctttcaggagagtcagttaccaagtaaaaacatggggctgggtgcagtggctcacgcctgtaatctcagcactttgaaaggccgaggtggatggattacttgagcccaggagtttgagaccagcctgagaaacatagcaagaccctgtctctagaaaaaataaagaaattagcctggcatggtggcacatatctgtggtcccagctattcggcaggctgaggtggaaggattgcttgagcccagaagatgggggctgcagtgagctgtgattgcaccactgcactccaacctgggtatcacagtgagaccctgctgagaaaaaaacaatccatgtattttttttcttcaagggttttgtttattatgggaatcgaagctttcgttcccaggtgatgaattccggaccctagacgcaggcatgggacaggaagggagctccgctggtaggatgtgatgtggagggcaaacctggaatcagaaagtcatg

SEQ ID NO: 700457 - DNA, 1833 bp, Homo sapiens
  misc_feature 655, 656, 657: n = A,T,C or G
taacaaacctcaggtgctgggtgatgattaaaataattgatgggcttataggagcctatgaagtgaaaattctgattataatcttttaaacactaagtaactactccagagtgtatattccctgttagtacttaagatgttaactagccatccttggaatgtagactaaaacatatatacatgccacactatttcaaataaggcattttaaaatatatttcataacacccagaacatatctcatatctctatcacagacttctaatataaattacttgtgtttggttgggcgcggtggctcatacctgtatcccaacactttgggaggccgaggcacgcagatcactaggtcacgagatcgagatcatcctggctaacacggtgaaaccccgtctctactaaaaatataaaaaattagccaggcgtggtggtgggcgcctgtagttccagctactagggaggctgaggcaggagaatagcatgaacccrggaggcggagcttgcagtgagcagactgcaccactgcactccagcctgggtgacaaagcaagactctatctcaaaaaaaaaaaaagaaaattagcctggcatggtggtgggcgcctgtagtcccagctactcagggaggctgaggcaggagaatggtgtgaacccnnnggaggcggacttgcggtgagccgagattgccccaatgcactccagcctgggcgacagagcaagactccgtccccacccccccccaaaaaaaataacttgtgttcaattacttgttttcaaatcccttttcccccagatactgtgagctttttttaatcagcaacctatgcatccttgatttccactcccctacttgagttccagatacagggtctgtgttcaataagctcagttccgcaaatatttacagtgcatcagattctatatgttaggcaattttttagtgctgagactatagtcttgaccaaaaatgacaaagttgctcacaagcagaatgctgttgaagtaagattggactgattttcttttgagacagaatctcactctgttgcccaggctggagcacaatggcatgatcttggctcactgcaacctccacctctcgggttcaagccagtcttgtgcctcagcctcccaagtagctgggattacagctgtgcaccatcgcgcctggctaatttttgtatttttaaagacgaggttttgccatgttggccagtctggtctcaaactcctgacctcaggtgatccgcttgcctcggcctcccaaagtgctggaattacaagcgtgagacaccacgcccagcctggactaactgatttttataaaaggtccttccaacaaagatattttttgacacaaaccatacctattgtggtgactgttccatgctttgtgatgaactactgtactctcaattccactgtaaaaggtaaccaaccagacagtgccatgggtatagggcttatagggggcagtgcttctcaatggtactttaaagactagagcttatatatccataattttctgattttcttatctcaactggttaaatggaccaccatccaataatagtatactaaagaaataatttgggagcgctgtagaaccatacagtctcacggtgtttaattaatctttctcctgacaagaggtaacaggtttttccttataaaataaaatgatgcacctgaaacagtaaattatgagttatgaacattttactcatgttctggttatctctgggccaacggttctcaaactgggaccctacattctaaggggggtttcacaagctaataatgggaatctttaagtaatttttaacgtatttt

SEQ ID NO: 700458 - DNA, 734 bp, Homo sapiens
tgggaagatggggacttatgtccagacgagtacccaaactatcaggtcttctggcccaaaggctatttttacttacctctagccaagtgcctgggatggatcctttctgcgtctcaccaaggctcaccacttagccatagcctcaaacccgtggggaaggaaggtctccccgccctgcaagaggacaaataactgatttttgttcatttgactctgttttaaaattctctttaaaaaaaaaaaaaacaaaaaaaagaaaaagaaagcatatctgaaacttaaaaaaaaaaacaaggaaaaaagatgaaaaaaatgacatacttacataggtgaaaaacacatagatatatctataagcaacaaacacagstaattcaaatataaattaaatatcacattgtcataatgtgtaccgagttaaaaaattatcattcaactcatgatatcaagctttaaaagcaaaaatacaattaactgctctgagaaaacatacccccccagaaaagaaacacaacaacacagaactgaaaataagaagagagattttaatgcataaaatcctgaatacaacataaatatacaatgaaaaataagccctttttgtttttttttgagacagtctcaccctgtcgcccaggctggagtgcagtggtgccatctcggctcactgcaagctccgcctactgggttcacgccattctcctgcctcatcctctctagtagctgggaataca

SEQ ID NO: 700459 - DNA, 652 bp, Homo sapiens
tattaagcaggttagctcttcccagctcagctcagctcttgaaatttcatggaagaaattctgtttttattggtctaaattttgtgtcttttatatagaaaaacggtaataaaattgcatcttatatttaaaaattgaattccttctgttttgccattttactgaagagaaaatctgtgtagcctattggcattattaacastgaagctccaagtactaatattcagaaaaaataatgaatcaaaatccaactatttctcagtaccattttctttttttataaactttctattttattgtctgtaatttaaaaacttctgtggaaaagagtttaaaattttcaaagttaatacaaaattatttttagaatttctttttgcataatgtttgtcgtaagtagctaatattaataaattgtaatcatcaattcttatctaagctgcacgttaaaaaatatgttaatatttgctgctgcctaaaatataatacatatttacataatctaatttactaaaaatagtaataaacacatataaataatcaacatacacaggtcattttttctatttcttacttatattttatgttttcatatttgtatcagcacactttatgtcctactatcatacatggaaacgtgcctattttgcat

SEQ ID NO: 700460 - DNA, 652 bp, Homo sapiens
tattaagcaggttagctcttcccagctcagctcagctcttgaaatttcatggaagaaattctgtttttattggtctaaattttgtgtcttttatatagaaaaacggtaataaaattgcatcttatatttaaaaattgaattccttctgttttgccattttactgaagagaaaatctgtgtagcctattggcattattaacagtgaagctccaagtactaatattcagaaaaaataatgaatcaaaatccaactatttctcagtaccattttctttttttataaactttctattttattgtctgtaatttaaaaacttctgtggaaaagagtttaaaattttcaaagttaatacaaaattatttttagaatttctttttgcataatgtttgtcgtaagtagctaatattaataaattgtaatcatcaattcttatctaagctgcacgttaaaaaatatgttaatatttgctgytgcctaaaatataatacatatttacataatctaatttactaaaaatagtaataaacacatataaataatcaacatacacaggtcattttttctatttcttacttatattttatgttttcatatttgtatcagcacactttatgtcctactatcatacatggaaacgtgcctattttgcat

SEQ ID NO: 700461 - DNA, 1207 bp, Homo sapiens
  misc_feature 1094: n = A,T,C or G
atgtataagtttatatattatatatagttatatataattgatatatatatagttatatataatatataaataaaattatttatatacattatatatatatatattttttgagacacagtctcgctctgtcacccaggctggagtgcagtggcaggatcatggctcaatgtaatctctgcttcctgggctcaagtgattcttacacctcagcctcctgagtggctgggattacaggcatgcatcaacacatctggctaatttttggatttttagtagagaagggtttttgccatgctggccatggctggtttcaaacccctggccttaagtgttccagctgccttggtctaccaatctgctaagattacagcaagagccactgcatccaaccgattttgattcattctatctcatatatcaccaaagactgtttttggaagttgatgttagcataatcccattatgcatacttcagggctggggagacctgaagcacacagtcattttcatatggtcacagaaatgaaaaggaaaagaagattttaacccaactctgttctctcaaacctggggccctggctgcatttagaactttttgggaagtaagggacataattgtgtttgcataactgtttacaggtaaagagttgacatgggagaggagggtgagcaatcagcagcccagcagggactttgcatagatttatggaggaaaagggctcaggggataaaaccttgaagaagttaacagacttcccttgtgasaaaacctaacagaatttagaactttgggaaccagacacccacattctagagacagccctgtatctagctaacttcttgggagatgcttgagagggcactgtgttctcattgtatgttatattcccaagctgttgcctgagaaaggctcaaagtgagagccttttctgacagtatacatactggctcagcctacatccttgataccactggccattcgacaagatgcacccacaggtaacacagtgtagcccagggcaggtccgtccatgccaggccacctgtgtcatctaatctgggcaacccgaccctgcctaccattaccctgtgtngcaaggggagcaggaaaggagggggcttttcctcacaggggcaggttttaagacacaggaaccctggtgggtctgtcatgttcatacccaggtcacggttggtggaataaaaa

SEQ ID NO: 700462 - DNA, 1207 bp, Homo sapiens
  misc_feature 1094: n = A,T,C or G
atgtataagtttatatattatatatagttatatataattgatatatatatagttatatataatatataaataaaattatttatatacattatatatatatatattttttgagacacagtctcgctctgtcacccaggctggagtgcagtggcaggatcatggctcaatgtaatctctgcttcctgggctcaagtgattcttacacctcagcctcctgagtggctgggattacaggcatgcatcaacacatctggctaatttttggatttttagtagagaagggtttttgccatgctggccatggctggtttcaaacccctggccttaagtgttccagctgccttggtctaccaatctgctaagattacagcaagagccactgcatccaaccgattttgattcattctatctcatatatcaccaaagactgtttttggaagttgatgttagcataatcccattatgcatacttcagggctggggagacctgaagcacacagtcattttcatatggtcacagaaatgaaaaggaaaagaagattttaacccaactctgttctctcaaacctggggccctggctgcatttagaactttttgggaagtaagggacataattgtgtttgcataactgtttacaggtaaagagttgacatgggagaggagggtgagcaatcagcagcccagcagggactttgcatagatttatggaggaaaagggctcaggggataaaaccttgaagaagttaacagacttcccttgtgagaaaacctaacagaatttagaactttgggaaccagacacccacattctagagacagccctgtatctagctaacttcwtgggagatgcttgagagggcactgtgttctcattgtatgttatattcccaagctgttgcctgagaaaggctcaaagtgagagccttttctgacagtatacatactggctcagcctacatccttgataccactggccattcgacaagatgcacccacaggtaacacagtgtagcccagggcaggtccgtccatgccaggccacctgtgtcatctaatctgggcaacccgaccctgcctaccattaccctgtgtngcaaggggagcaggaaaggagggggcttttcctcacaggggcaggttttaagacacaggaaccctggtgggtctgtcatgttcatacccaggtcacggttggtggaataaaaa

SEQ ID NO: 700463 - DNA, 1207 bp, Homo sapiens
  misc_feature 1094: n = A,T,C or G
atgtataagtttatatattatatatagttatatataattgatatatatatagttatatataatatataaataaaattatttatatacattatatatatatatattttttgagacacagtctcgctctgtcacccaggctggagtgcagtggcaggatcatggctcaatgtaatctctgcttcctgggctcaagtgattcttacacctcagcctcctgagtggctgggattacaggcatgcatcaacacatctggctaatttttggatttttagtagagaagggtttttgccatgctggccatggctggtttcaaacccctggccttaagtgttccagctgccttggtctaccaatctgctaagattacagcaagagccactgcatccaaccgattttgattcattctatctcatatatcaccaaagactgtttttggaagttgatgttagcataatcccattatgcatacttcagggctggggagacctgaagcacacagtcattttcatatggtcacagaaatgaaaaggaaaagaagattttaacccaactctgttctctcaaacctggggccctggctgcatttagaactttttgggaagtaagggacataattgtgtttgcataactgtttacaggtaaagagttgacatgggagaggagggtgagcaatcagcagcccagcagggactttgcatagatttatggaggaaaagggctcaggggataaaaccttgaagaagttaacagacttcccttgtgagaaaacctaacagaatttagaactttgggaaccagacacccacattctagagacagccctgtatctagctaacttcttgggagatgcttgagagggcactgtgttctcattgtatgttatattcccaagctgttgcctgagaaaggctcaaagtgagagccttttctgacagtatacatactggctcagcctacatccttgataccactggccattcgacaagakgcacccacaggtaacacagtgtagcccagggcaggtccgtccatgccaggccacctgtgtcatctaatctgggcaacccgaccctgcctaccattaccctgtgtngcaaggggagcaggaaaggagggggcttttcctcacaggggcaggttttaagacacaggaaccctggtgggtctgtcatgttcatacccaggtcacggttggtggaataaaaa

SEQ ID NO: 700464 - DNA, 1207 bp, Homo sapiens
  misc_feature 1094: n = A,T,C or G
atgtataagtttatatattatatatagttatatataattgatatatatatagttatatataatatataaataaaattatttatatacattatatatatatatattttttgagacacagtctcgctctgtcacccaggctggagtgcagtggcaggatcatggctcaatgtaatctctgcttcctgggctcaagtgattcttacacctcagcctcctgagtggctgggattacaggcatgcatcaacacatctggctaatttttggatttttagtagagaagggtttttgccatgctggccatggctggtttcaaacccctggccttaagtgttccagctgccttggtctaccaatctgctaagattacagcaagagccactgcatccaaccgattttgattcattctatctcatatatcaccaaagactgtttttggaagttgatgttagcataatcccattatgcatacttcagggctggggagacctgaagcacacagtcattttcatatggtcacagaaatgaaaaggaaaagaagattttaacccaactctgttctctcaaacctggggccctggctgcatttagaactttttgggaagtaagggacataattgtgtttgcataactgtttacaggtaaagagttgacatgggagaggagggtgagcaatcagcagcccagcagggactttgcatagatttatggaggaaaagggctcaggggataaaaccttgaagaagttaacagacttcccttgtgagaaaacctaacagaatttagaactttgggaaccagacacccacattctagagacagccctgtatctagctaacttcttgggagatgcttgagagggcactgtgttctcattgtatgttatattcccaagctgttgcctgagaaaggctcaaagtgagagccttttctgacagtatacatactggctcagcctacatccttgataccactggccattcgacaagatgsacccacaggtaacacagtgtagcccagggcaggtccgtccatgccaggccacctgtgtcatctaatctgggcaacccgaccctgcctaccattaccctgtgtngcaaggggagcaggaaaggagggggcttttcctcacaggggcaggttttaagacacaggaaccctggtgggtctgtcatgttcatacccaggtcacggttggtggaataaaaa

SEQ ID NO: 700465 - DNA, 1207 bp, Homo sapiens
  misc_feature 1094: n = A,T,C or G
atgtataagtttatatattatatatagttatatataattgatatatatatagttatatataatatataaataaaattatttatatacattatatatatatatattttttgagacacagtctcgctctgtcacccaggctggagtgcagtggcaggatcatggctcaatgtaatctctgcttcctgggctcaagtgattcttacacctcagcctcctgagtggctgggattacaggcatgcatcaacacatctggctaatttttggatttttagtagagaagggtttttgccatgctggccatggctggtttcaaacccctggccttaagtgttccagctgccttggtctaccaatctgctaagattacagcaagagccactgcatccaaccgattttgattcattctatctcatatatcaccaaagactgtttttggaagttgatgttagcataatcccattatgcatacttcagggctggggagacctgaagcacacagtcattttcatatggtcacagaaatgaaaaggaaaagaagattttaacccaactctgttctctcaaacctggggccctggctgcatttagaactttttgggaagtaagggacataattgtgtttgcataactgtttacaggtaaagagttgacatgggagaggagggtgagcaatcagcagcccagcagggactttgcatagatttatggaggaaaagggctcaggggataaaaccttgaagaagttaacagacttcccttgtgagaaaacctaacagaatttagaactttgggaaccagacacccacattctagagacagccctgtatctagctaacttcttgggagatgcttgagagggcactgtgttctcattgtatgttatattcccaagctgttgcctgagaaaggctcaaagtgagagccttttctgacagtatacatactggctcagcctacatccttgataccactggccattcgacaagatgcacccacaggtaacacagtgtagcscagggcaggtccgtccatgccaggccacctgtgtcatctaatctgggcaacccgaccctgcctaccattaccctgtgtngcaaggggagcaggaaaggagggggcttttcctcacaggggcaggttttaagacacaggaaccctggtgggtctgtcatgttcatacccaggtcacggttggtggaataaaaa

SEQ ID NO: 700466 - DNA, 2096 bp, Homo sapiens
ctaccatggtgggagattaatgagtcatgctcaaactgttcaaggcccttttccatgtagaagatgcagagctattcacaagttgccaaaatgtctcttagtacctagcaaaagtaaaatatattggcccaaggctgcttgttatttactatgtacttttttcaattatcctctaaaaaatcacaaaatacagtatgaattcacagttaagcttccatataaaggagctcaatcaatttccagtgtctcctgtgttttccactgaaggttgatgacttttttctcttgcaagttgaagtttaaaaaattctggagtgaggatagcttgtcttcttctctctagccttccattggctctaccttcatcttttgtatttttgttatttttaattaaaattattaatttcataattttaatttatgcatttactaaggaagcttattaaatataggcggaatttataatgattgtcttagagatttgtgtttctctgacagttttaccaatttttacctgtttaccttgaaggccaaaaacttgatgataagttgcaagattgcatattttacttctgaaagtaaacttgtatgctttttaaaagagactctaaaataaaatcaggttctgtttattatgtaggcaaaattttaatgcttcatttccaacagaaattgggtggtttggatttttttcatttagcatttatttgactaaatatgcatttatttgactaatttctctgactaattaaatacagagatataagattaaataatccaatcaagatggataagattaacatgaacacaatactactgtagagcttcaaatggtttcttgaaataaaatggtagcctgaagtgtgaaccataagtgtttaagcgaggaggtgccacatttaatacatgaatatgtacgtgaagaaataagaatacgtaactccaaagtacttatccactgctccatttctccaacatgttctattggaaactactgtgtaatcaatgctaatatttacagatacttgtttgtggtttatgaacctagatctctgtttggaacttcataaataactataaatatcaaaacctaccaagattgtattcattttacagatttaaaataacgcccaaataagttaaataatttaaaatcaaatgaaagggcaaatgtgtttgaacagaaatcgttgtttatttttatataacacttgatgtaacatgtatatttactcatgtataaaatgtgcataagtacctacctcataagtataagaggtaaattagtctataaatgtatttactttatagcatctaatgacttaatgttttccaaatattcgcagtgatctctgattattttcttagactatttctttcaaactttctacataaagctcagagattttattttaaagccaacgtgggtactgctgaagactgtatggaaaaatgagtggaaaagattctaagcatctttttactgattcaaagcagctccattttgatatgttttatatattttgctaaacatcttaaaaagtagggccagatgcagtggctcacacctgtaatcccagcactttgggaggccaaggcaggtggatcacctgtgtcaggagttcaagaccagcctggccaacatggtgaaaacccatctctactaagaatacaaaaattagctacgcatggtggtggtggtgcacacctgtaatcccagctacttgggaggctgaggcaggagaatcacttgatcgcgggaggcggaggttgcagcaagctgagatcgcaccattgcactccagcctgggcaacaagagcaaaactccctytaaaaaaaaaaaaaaaaaaaaaaatcctaaaaatcctaaaaagtcaccaacttaggacaagttgttagaagtgaatttaccatgctggagaatatgaacttgtttaaggacttctggtaaattttgaagagtgcagttgattagcagccaaatatgcctttgagtatagtatacgaatgaaccccttatcctcacaaaactgagttttaaccaaaagcatgactgcttttcatttatatggtttcagatccggctaacgagctc

SEQ ID NO: 700467 - DNA, 620 bp, Homo sapiens
gatatgattgtcattggtatgtcatacgtgatgattttgagagctgtgcttcagttgccctcaggtgaagcccgcctcaaagcttttagcacacgtkcctcccatatctgtgtcatcttggctctttatatcccagcccttttttctttcctcacctaccgctttggccatgatgtgccccgagttgtacacatcctgtttgctaatctctatctactgatacctcccatgctcaaccccatcatttatggagttagaaccaaacagatcggggacagggttatccaaggatgttgtggaaacatcccctgagcaaagggtcagtgtatccccatcatttacattgccccactaatgtggggacattaatgaacatttgacaggctattacttattatcactaagtcagctctgtaaataactggctcagaggtaagcaaccctctagaggcaagagaaacaattttcagggtacctagaaaagagatacctgagagatgtgatggataagaacaactttgttgactacatattcatcatcacatggaaacaataaaagtagttttacctattaaatcagtgaatattttaaaagaatgtcatctcccacagatgattaa

SEQ ID NO: 700468 - DNA, 620 bp, Homo sapiens
gatatgattgtcattggtatgtcatacgtgatgattttgagagctgtgcttcagttgccctcaggtgaagcccgcctcaaagcttttagcacacgtgcctcccatatctgtgtcatcttggctctttatatcccagcccttttttctttcctcacctaccgctttggccatgatgtgccccgagttgtacacatcctgtttgctaatctctatctactgatacctcccatgctcaaccccatcatttatggagttagaaccaaacagatcggggacagggttatccaaggatgttgtggaaacatcccctgagcaaagggtcagtgtatccccatcayttacattgccccactaatgtggggacattaatgaacatttgacaggctattacttattatcactaagtcagctctgtaaataactggctcagaggtaagcaaccctctagaggcaagagaaacaattttcagggtacctagaaaagagatacctgagagatgtgatggataagaacaactttgttgactacatattcatcatcacatggaaacaataaaagtagttttacctattaaatcagtgaatattttaaaagaatgtcatctcccacagatgattaa

SEQ ID NO: 700469 - DNA, 1443 bp, Homo sapiens
ttttgaagttaatataaagaatttacatcattttaatgtaattgaaatcwgtttaaaaatattgtcttagaataataaagttgagtcttgagttttaattatgtagttagtattctgtagcctaattttagattacgttacctctttcatgtcaaatttatgaactgaaacgtggctgtattgtaaaatactaattaacactctactaattagttggcttttactgatttttcacttttagatgtcttagaaagctagtatgtagaaggaaaatctctgtatgacaaccaaaaacttactttgaactgaaaacactaaaatcaagggaaaatgtactcttaacagcttgttttcttgctttgtgacttgttatattttgttataatctaatcttctaggcatatactcatgtcataagtgatagtatttttcattcctttccttattgctttcctccattgtattctattttgtttttgtttgttcccaaatgtatttgtaaaaacaagtacatcaacagatgcggaggtttttctacttgtaatttctgttttatattgagaatttttttttttttttttgagatggagtctcgctctgtcgcccaggctggagtgcagtggtgcgatctcggctcactgcaagctctgcctccagtgttcatgccattctcctgcctcagcctgccgagtaggtgggactacaggcgcccaccaccacgcccggctaattttttgtgtttttagtagagacggggtttcgtagtgttagccaagatggtctccatctcctgagctcgtgattcgcctgcctcagcctcccaaagtgctgggattacgggcgtgagccaccgtgccctgctgagaattttaaagtatcaaatatagaccagtattcaaagatgattcataaaaggtgatttgggtatatgacacaatttacatgtaaatatgtatcatgaacagactagatggtattggctagttaaattttcttgttaaatgaatatttaaagaaccttctcaactctattttcattcagtttactagctaacagaatatttgagcggtcatataatacgtggagtattgtgctttgtgcacttgacaaatacagagaaaacataaggttttgagactgttaaagagattagatctacataaaattaagagggattaaggtgattaaatgctaagatgagtagatgttaaatgcatttggtgttactatagggagaaaacagatactctgcttaaatttagtgaaaaccattgaactactataccactgtttaattttatcatgctacataggaaatagactgaaaaaatacagaaacatcattgaattgtacatgtgaaatgaattttgttgttgttttgcttttacatgtacgtattgtatctgtaatgaaagaggatattaaagtcatgcccgtgaaa

SEQ ID NO: 700470 - DNA, 599 bp, Homo sapiens
tttctgcacattgtcatttatggtacaaaacgcaggatttaagtaataaacttagctaatatttacctttcaacgctagttatgtaaggatactgaaatatttttaaatgaaacccaaaaaactaaatatctcttaaaactctgtattgtttagagcacatgccaagttatctgattctagggggtttgtaccttggtttctgagctattttccaactctgtaaacagaagataatgtgtagaaaagtgagagtaatgcaaataatttgtgtttgtagatgtgcaaacaaatcccgcctggtggaagttcaactgacttcctctctcaactgtggaagagccagtttttgtatttatgaagcaaattcatttggccttcttggtgggcttatayatttgtctgatctttgaatttacaaaggcaacatttttttcaggctccctcactaattaattacttaaaatttttgactcatgttcacttgatataatcacctttataaaaaactatgttacggccgggcgcggtggctgacgcctgtaatcccagcactttgggaggccgaggcgggcggatcacgaggtcaggagattgagac

SEQ ID NO: 700471 - DNA, 1507 bp, Homo sapiens
gggtgttatataaataatccagtgaattaaagctgaaatgcagtatctagaatgaaaaattacttgttgggccgaatatcagagtagactttgcgggagttgagtgagtttgagattataacagtggaaactagctgaactgaagcaccaaaagaaaaaaatgatgaaaaaaacgagaagggcctcagcaaactgagacaaacatcagcgattctaatatgcctgtgattggaatcctagtaagaggttgtcggggggcagaaaagatttcaaaattaatgcccttgaatttcccagatttgatgaaaacgataaacccacagatacaagaagctcaataaacctcaagcaggatcgacacaaaggaaaagagccactgttgggcctagcactgaccaggtcaaaataaggctggagctgaacctcagtgtacccgaggcaacgtgcagtgggggcttaggatattggtgctgaaacttagttttcctcttaggggattgcagtgacattgtcaaactgcagagtctgagggcacagtcctccacaagactgcctttgctgcagacaccagccacacatttggggtccctggggccaccctcacttctaaccagcaggttacagttcaggatccaccctccccagctcttcaggtgacacattcgcagtactcactgggcgtgccctaatacgattatagtcaattggaggaaaggatgcttgttggaaggatgtgcagggcaaagtctgggaggtttccatgtgcaaagctttccctgtcctcagggacgcatcaccctccgagctctgaggtgggacgctcctcagggtactgccagccaggggcgctcacttgggctgtggtgttcagtttttattggggcttcgttgcatgggcacagttgactgaatcactggccacgtagctgagctcagcctccagcccttcacctcccaggaagtcagctgagttcaccaggcacacagccccaggcctctaaccccatgctgtctttctggtgtggccagccccatgttgagtcatcttgctagcataaagtcaggtgtggccccgtgataccagtcattcctgtcactcagaaatgagggtgtagagactgcctcctagaactgggccagaggccaccaaatcctacccaggagtcaatcagtatctaaacttgataaatcaagaagaagttgtagaaatgtattatttagaaatatagaggccgagcgtagtggctcacacctgtaataccggcactttgggaggccaaggcaggcagattgtttgagcccaggagttcgagaccagcctggccaacgtggcaagaccctgtctctacaaaaaatacaaaaattaaggccaagcacaatggcttacgcctgtaatcccarcactttgggaggccgaggcagacagatcacgaggtcaggagatcgagaccatcctggctaacacagtgaaaccccatctctactaaaaatacaaaaagttagctgg

SEQ ID NO: 700472 - DNA, 972 bp, Homo sapiens
cccccctccccttggtcaataattattttttaacgtcctggtgactattactggcaaatactttatttaggacttttgcatccatattcataactgaaactggtctgtagactgttttgtattaatctttgttaggttttttttatctttaagamtaatatggagaatactcatctttttttaggctgggggggtggctcacacctgtaattccaatcacctgaggtcaggagttcgagaccagcctggccaacatggcaaaaccctgtctttactaaaaatacaaaaattagccaggcgtggtggcgcacacctgtaatgccagctacttgggaagctgaggcagaagaattgcttgaacccgggaggcggaggttgcagtgagccaagattgcaccattgcactccagcctgggcgacagagcaaaactctatctaaaaaaaatcaccttttttaaaacatttagaaccatttttaaaacattctaattatttgctttttataggtttagtagaaatattctaaaaacaactaacctgctctttcttagaggtagaagaaaataacttctctcatgaacatgagcagagaggtgaatgaacatgaacatgaacagagagatgaataaagatctagttggctgaaagggtcatcggtataagactctttcagctctttatatttattactaatgaatatatggctttttatgtacccgaaggacagtttggatataaaatctttagcatgtatttactatatgatataaaatctttagctcatatttactatccttgagattacagcaatcactccactctcttctggcatacagagctgccagcctaatttttttcacctttttatatactggtttgattgttttgcctgagtgcctaaaggattctgccattaccttttaaggccaataatttatatgccttgatgctgacagttcttgatcaatttcc

SEQ ID NO: 700473 - DNA, 972 bp, Homo sapiens
cccccctccccttggtcaataattattttttaacgtcctggtgactattactggcaaatactttatttaggacttttgcatccatattcataactgaaactggtctgtagactgttttgtattaatctttgttaggttttttttatctttaagaataatatggagaatactcatctttttttaggctgggggggtggctcacacctgtaattccaatcacctgaggtcaggagttcgagaccagcctggccaacatggcaaaaccctgtctytactaaaaatacaaaaattagccaggcgtggtggcgcacacctgtaatgccagctacttgggaagctgaggcagaagaattgcttgaacccgggaggcggaggttgcagtgagccaagattgcaccattgcactccagcctgggcgacagagcaaaactctatctaaaaaaaatcaccttttttaaaacatttagaaccatttttaaaacattctaattatttgctttttataggtttagtagaaatattctaaaaacaactaacctgctctttcttagaggtagaagaaaataacttctctcatgaacatgagcagagaggtgaatgaacatgaacatgaacagagagatgaataaagatctagttggctgaaagggtcatcggtataagactctttcagctctttatatttattactaatgaatatatggctttttatgtacccgaaggacagtttggatataaaatctttagcatgtatttactatatgatataaaatctttagctcatatttactatccttgagattacagcaatcactccactctcttctggcatacagagctgccagcctaatttttttcacctttttatatactggtttgattgttttgcctgagtgcctaaaggattctgccattaccttttaaggccaataatttatatgccttgatgctgacagttcttgatcaatttcc

SEQ ID NO: 700474 - DNA, 391 bp, Homo sapiens
tttacattggtgatgtcttcctgcttctatcataagaaaatgaaaatgaatttctgtttgcccagcatcagagtacagcctttttctaaataaagagttaagtccctcctagaaaagccttatctggggccatgcatggtggctcacacatgtaatcccagcactttgggaggctgaggtggaggaccacttgagcccyaggagttcaagaccagcctggacaacatagcaagatcttgtctctaaaaaaaaaatatataaaaattagctagatgcagaggtggtgctactcgggaggctggggtaggaggatcacttgagcccaggaggtcgaagctgcagtgagccaagatcacgccaatgtactccagcctgggcgacggaaaaagac

SEQ ID NO: 700475 - DNA, 999 bp, Homo sapiens
tggcatttctcccatgcctgagaatgaaatccaaactgtttcccaacacatgtgaggctcagctccgacaggttcttccctcatgcccagacactccttgaggtgtgtgctgcactccagtcacgctgggcagaattccctggaactgtcaagtgctctctcatgcgcactcttttctccagctggtctctcacctgagaagcccctcttcctctcttgtgtgcttccagtacctgcatacaccaatgtgtgcacatggcttgtacttacgtgtatttacctggatattcatattttcacttatgggaacaaacagaaacatgagataagtacactcacattgtattctagctatgtttgtcatcattacctcccttgctttattttgagctccagaagggcaagaactgggcttcagatagacccctgaatgtagacagctgcaaaggacagaaatgcagctcaaacttgtttaaggacctactaggcaatggttttgcttaagggctgagtaccatggttggcccgggctgggtccagtgacacccctggattgagccactagtataggatgtcagagtagcttccaggtgacccaagagacacaggtgggggtggagaaagagggagggtaatttcccagaaggaggggaggggtgggaggtgtggcttccaggcagatgaaacaatgcaatctgtgtccatgtctgacacccaccctgggctcgggccaggcccatctcttccctgccccatctcatccatgaatcatcccaactgtttccttagtcagacagttcccctgatttccagycctctccctcctctcttacctgcagaggatgtctgtcttgcctcccaccatccctcactgctccaccccgtaggagtgagtgataggctcttcttttcctctggggaactagtctttgtccaccggagctgccaatcgcaggatccctggcctcaggggttggcccatagcccaagattagccag

SEQ ID NO: 700476 - DNA, 1086 bp, Homo sapiens
cagttaatgcttttctaaaacagtctcttttttttccaaatatggtgggaaccctttggcaaatttgcccacttctagccagatactgagaacacgcggggttttcctttacacggtaaactccttgaaggtagggattgtatctttgtcttattcccctactgcattcccagagcctaacatagtacctggcatgcygaagaggctcaataaatatttgatgaactcatggatgggagagagaaggaaaacaatgattactcccctctgagacaggagaggaggctacgggtcatgcatgtgcttgtgagacttctattcctgctaagagaaaatgcaaccccttagtaagcatgaggaagaatatcccactttgtggaaatgaagaaacccataagtaataacagtgaagtcattttcacttattacactagccaaaatattttatttcagtgttaaaatgcagtgctggtaaaaccgacactctcagccaggctggtaaaggtgaacagtggtgtgaccttttaagaaagcagtttggcaatatgtaacaagaacatttaaaatatttataccttttgctataataatctcactttagcgggcttaaccaagaaaataaccgaaatggagagtcaagatattcactgcagttccctttatattaactaaaaaggaaaagcaaccttagtatagcaacaattgagcaaatcgtgacatacacacatgatgaagatgctaaaaaagatcattatgaaccgtgcagccacctaggaaataattctgttaagcaataaaagtaaaattgaaatgattttttgtcatatcacgtaaaaagataatgtggataaaacatagaagggcatgtactaaaagaaaaaaaaactggttcgtgggagaagtaagacttcagcatgtttgtttctttttctgaattttcttttatgttataattttcataaacataaaaattctcaaaattaatccaaatgtataggttagtagaaaatgtctgctttttactgatctctcgtcagctctgcatgtgtagaaataaaggccaatacctaatgtaggcaagttcaa

SEQ ID NO: 700477 - DNA, 1184 bp, Homo sapiens
ctctctctctctctgtctctctctctctctcacatggtaagctcatggcttcttcagaaggcactcactcctggactcctgttacctgctgtgctgaatgtgggtgccatagtctaccccacgcatcactcactccttctacaacccctaggaattcaaggtaacttctactgcggtttgtttctttctcttagcagctccttggataaggcccaagagggcatccactcttgtctgcaagaaacatttagaaatccccctttcccctaagagtggaggccaatcccaatgcagtcacctcttctttcctccactttgtgagaaacaactaactggcctggctcttgactgttttagactttctaagtagaaataacaacatccatccaataagttccttcaacttcaggaaacagagtctcgctctgttgcccaggctggattgcagtggcacaatctcggctcacggcaacctccgcctcccaggttcaagcaattctctgcctcagcctcccgagtagctgggattacaggcaactgccaccatgccccactaatttttgtatttttagtagagacggggtttcaccatcttggccaggctggtatcgaactcctgacctcgtgatccacccacctcggtctctcaaagcactgggattacaggcgtgagccacccatctggcctgaaaactaactctttaacaaggcaaaagtctttaaatwttctgtgatcatagacagttacaggatttgttgccaccactttggcaaacatgaaagtcactgtgaaagcagaaaacacatttttagtggttttggttttggttttgttttgcttagtaagcatttttcagtctccattatttcataaatgcacaaggggctacacccttcttatgtttcttactctgtaccaagttgagtcactgaaagtttcccccagtgatttagtatatctggtctctttgatttttgcccctggaacattcatccatgcccaggtaatgtctgccttagaaagggctctagtaccctaactgctatcaaagcaaactcagatagagaaataaaaggctataagaactggaaataaaatgttaaagtacaaaccaatataatcatgtgttctgacagagaaagtatactttaaattgtgcacagccaggcgctcactacaattt

SEQ ID NO: 700478 - DNA, 1856 bp, Homo sapiens
  misc_feature 1379, 1380, 1381, 1382, 1383, 1384, 1385, 1386, 1387, 1388,1389, 1390, 1391, 1392, 1393, 1394, 1395, 1396, 1397, 1398,1399, 1400, 1401, 1402, 1403, 1404, 1405, 1406, 1407, 1408,1409, 1410, 1411, 1412, 1413, 1414, 1415, 1416, 1417: n = A,T,C or G
  misc_feature 1418, 1419, 1420, 1421, 1422, 1423, 1424, 1425, 1426, 1427,1428, 1429, 1430, 1431, 1432, 1433, 1434, 1435, 1436, 1437,1438, 1439, 1440, 1441, 1442, 1443, 1444, 1445, 1446, 1447,1448, 1449, 1450, 1451, 1452, 1453, 1454, 1455, 1456: n = A,T,C or G
  misc_feature 1457, 1458, 1459, 1460, 1461, 1462, 1463, 1464, 1465, 1466,1467, 1468, 1469, 1470, 1471, 1472, 1473, 1474, 1475, 1476,1477, 1478: n = A,T,C or G
tgcagcgacacagtgtccaccctatcatgagggggcatgttcctcccagtcaatacccagcaaaggggaagcagacactacttcgctgaaaggaagactttttaaaaagagaaaacaagtgcaaatggtcattcgcacgcaaggatattcacaatcaaatccgtaatttggggaaagggcataygtgatggtgaaatcattgcttaaagaaatcccaaaaccctactagagtgtaaactgttgcctcatttttctaacaattctcttcaattgattaattattagtgaaaccattataaggcttaatcagcaagtgatatatcagcatttagtatgaagtttatatttttaataacaaatatgctttagaatactcaaggactagtttttctgaggaattttgatgatccagcttcacctaagataggcacttagaaaatctgtggacttagaagggacatttggcatcactgaatccagctcctacacttcgcagacaagatgactgagactcaggaaaagggttttgtttttctgatacttgacagtaagagggagggttgcggaatggtttttattaaagactcccctccaaaactgtcatgaattcattcctgcacttgtttcagacattctcttttctgatgattatctttgttaggtctacctcttgaatcctaggagaatgtcaagaaatgtttaaaggtgagttggttaaaaatttaaaacaatctcgcttactctgtatcaaaatacacttggcttgcttccattacaccattatgaaactgcattaggagaccggactacacattatacagtctacatacaattaaatacattatataacatgctcagagaccagactacacattatacagtctacatacaattaaaaagcaaatcccaatccaattcaataaaaccagtcatttcaaatagaaagagaaacaactgggtgagcaatattaaagcttgttaaactttcctacaaatgtataataaaccctttaaaatgtaatgtcctgaatgaaacatatcatcttcaaatattaaaaaagaactcacatacaatctgtctctttcagccacagttagaatgaattttatcattctgaaaattctctgctattggtttcaacactgtatcacttttgtgagtcaactacattgtaaacactgcaaaacctcagagaaagtttcacaaaacaaagacgatttacatatactaatttgacaaaaactgcttccaaatcacaacgttttatgaagtccatattctatttctcctttagtgctttttttgacagttggaaatgggtacaagttgtaatttacttgtatccatttcctactttagtagtgtccaggaaaattannnnnnnnnnnnnnnnnnnnnnnnnnnnnnnnnnnnnnnnnnnnnnnnnnnnnnnnnnnnnnnnnnnnnnnnnnnnnnnnnnnnnnnnnnnnnnnnnnnngtagctgggattacaggcacctgctaccacgcccagataatttctgtacctaaatttgttttgaaacaaaagtattctataattttaacaaatgcagaggagcacatacaagaaacaaattcccagaagttaaggtatcaagtaatactagttttggattttgaattatttcctgattacttgggaacatcattttccatttctaaaccaacatttccttgtctcttaaaattcataagaagcaacagcaaagaagacataaaagatatatctgcttcttaagttagacagcagttaaacacataacaaattgagaataaaaaataatttatcatattcacataaaatagttttaaaggaagcacatacatgtcttgg

SEQ ID NO: 700479 - DNA, 1856 bp, Homo sapiens
  misc_feature 1379, 1380, 1381, 1382, 1383, 1384, 1385, 1386, 1387, 1388,1389, 1390, 1391, 1392, 1393, 1394, 1395, 1396, 1397, 1398,1399, 1400, 1401, 1402, 1403, 1404, 1405, 1406, 1407, 1408,1409, 1410, 1411, 1412, 1413, 1414, 1415, 1416, 1417: n = A,T,C or G
  misc_feature 1418, 1419, 1420, 1421, 1422, 1423, 1424, 1425, 1426, 1427,1428, 1429, 1430, 1431, 1432, 1433, 1434, 1435, 1436, 1437,1438, 1439, 1440, 1441, 1442, 1443, 1444, 1445, 1446, 1447,1448, 1449, 1450, 1451, 1452, 1453, 1454, 1455, 1456: n = A,T,C or G
  misc_feature 1457, 1458, 1459, 1460, 1461, 1462, 1463, 1464, 1465, 1466,1467, 1468, 1469, 1470, 1471, 1472, 1473, 1474, 1475, 1476,1477, 1478: n = A,T,C or G
tgcagcgacacagtgtccaccctatcatgagggggcatgttcctcccagtcaatacccagcaaaggggaagcagacactacttcgctgaaaggaagactttttaaaaagagaaaacaagtgcaaatggtcattcgcacgcaaggatattcacaatcaaatccgtaatttggggaaagggcatacgtgatggtgaaatcattgcttaaagaaatcccaaaaccctactagrgtgtaaactgttgcctcatttttctaacaattctcttcaattgattaattattagtgaaaccattataaggcttaatcagcaagtgatatatcagcatttagtatgaagtttatatttttaataacaaatatgctttagaatactcaaggactagtttttctgaggaattttgatgatccagcttcacctaagataggcacttagaaaatctgtggacttagaagggacatttggcatcactgaatccagctcctacacttcgcagacaagatgactgagactcaggaaaagggttttgtttttctgatacttgacagtaagagggagggttgcggaatggtttttattaaagactcccctccaaaactgtcatgaattcattcctgcacttgtttcagacattctcttttctgatgattatctttgttaggtctacctcttgaatcctaggagaatgtcaagaaatgtttaaaggtgagttggttaaaaatttaaaacaatctcgcttactctgtatcaaaatacacttggcttgcttccattacaccattatgaaactgcattaggagaccggactacacattatacagtctacatacaattaaatacattatataacatgctcagagaccagactacacattatacagtctacatacaattaaaaagcaaatcccaatccaattcaataaaaccagtcatttcaaatagaaagagaaacaactgggtgagcaatattaaagcttgttaaactttcctacaaatgtataataaaccctttaaaatgtaatgtcctgaatgaaacatatcatcttcaaatattaaaaaagaactcacatacaatctgtctctttcagccacagttagaatgaattttatcattctgaaaattctctgctattggtttcaacactgtatcacttttgtgagtcaactacattgtaaacactgcaaaacctcagagaaagtttcacaaaacaaagacgatttacatatactaatttgacaaaaactgcttccaaatcacaacgttttatgaagtccatattctatttctcctttagtgctttttttgacagttggaaatgggtacaagttgtaatttacttgtatccatttcctactttagtagtgtccaggaaaattannnnnnnnnnnnnnnnnnnnnnnnnnnnnnnnnnnnnnnnnnnnnnnnnnnnnnnnnnnnnnnnnnnnnnnnnnnnnnnnnnnnnnnnnnnnnnnnnnnngtagctgggattacaggcacctgctaccacgcccagataatttctgtacctaaatttgttttgaaacaaaagtattctataattttaacaaatgcagaggagcacatacaagaaacaaattcccagaagttaaggtatcaagtaatactagttttggattttgaattatttcctgattacttgggaacatcattttccatttctaaaccaacatttccttgtctcttaaaattcataagaagcaacagcaaagaagacataaaagatatatctgcttcttaagttagacagcagttaaacacataacaaattgagaataaaaaataatttatcatattcacataaaatagttttaaaggaagcacatacatgtcttgg

SEQ ID NO: 700480 - DNA, 1856 bp, Homo sapiens
  misc_feature 1379, 1380, 1381, 1382, 1383, 1384, 1385, 1386, 1387, 1388,1389, 1390, 1391, 1392, 1393, 1394, 1395, 1396, 1397, 1398,1399, 1400, 1401, 1402, 1403, 1404, 1405, 1406, 1407, 1408,1409, 1410, 1411, 1412, 1413, 1414, 1415, 1416, 1417: n = A,T,C or G
  misc_feature 1418, 1419, 1420, 1421, 1422, 1423, 1424, 1425, 1426, 1427,1428, 1429, 1430, 1431, 1432, 1433, 1434, 1435, 1436, 1437,1438, 1439, 1440, 1441, 1442, 1443, 1444, 1445, 1446, 1447,1448, 1449, 1450, 1451, 1452, 1453, 1454, 1455, 1456: n = A,T,C or G
  misc_feature 1457, 1458, 1459, 1460, 1461, 1462, 1463, 1464, 1465, 1466,1467, 1468, 1469, 1470, 1471, 1472, 1473, 1474, 1475, 1476,1477, 1478: n = A,T,C or G
tgcagcgacacagtgtccaccctatcatgagggggcatgttcctcccagtcaatacccagcaaaggggaagcagacactacttcgctgaaaggaagactttttaaaaagagaaaacaagtgcaaatggtcattcgcacgcaaggatattcacaatcaaatccgtaatttggggaaagggcatacgtgatggtgaaatcattgcttaaagaaatcccaaaaccctactagagtgtaaactgttgcytcatttttctaacaattctcttcaattgattaattattagtgaaaccattataaggcttaatcagcaagtgatatatcagcatttagtatgaagtttatatttttaataacaaatatgctttagaatactcaaggactagtttttctgaggaattttgatgatccagcttcacctaagataggcacttagaaaatctgtggacttagaagggacatttggcatcactgaatccagctcctacacttcgcagacaagatgactgagactcaggaaaagggttttgtttttctgatacttgacagtaagagggagggttgcggaatggtttttattaaagactcccctccaaaactgtcatgaattcattcctgcacttgtttcagacattctcttttctgatgattatctttgttaggtctacctcttgaatcctaggagaatgtcaagaaatgtttaaaggtgagttggttaaaaatttaaaacaatctcgcttactctgtatcaaaatacacttggcttgcttccattacaccattatgaaactgcattaggagaccggactacacattatacagtctacatacaattaaatacattatataacatgctcagagaccagactacacattatacagtctacatacaattaaaaagcaaatcccaatccaattcaataaaaccagtcatttcaaatagaaagagaaacaactgggtgagcaatattaaagcttgttaaactttcctacaaatgtataataaaccctttaaaatgtaatgtcctgaatgaaacatatcatcttcaaatattaaaaaagaactcacatacaatctgtctctttcagccacagttagaatgaattttatcattctgaaaattctctgctattggtttcaacactgtatcacttttgtgagtcaactacattgtaaacactgcaaaacctcagagaaagtttcacaaaacaaagacgatttacatatactaatttgacaaaaactgcttccaaatcacaacgttttatgaagtccatattctatttctcctttagtgctttttttgacagttggaaatgggtacaagttgtaatttacttgtatccatttcctactttagtagtgtccaggaaaattannnnnnnnnnnnnnnnnnnnnnnnnnnnnnnnnnnnnnnnnnnnnnnnnnnnnnnnnnnnnnnnnnnnnnnnnnnnnnnnnnnnnnnnnnnnnnnnnnnngtagctgggattacaggcacctgctaccacgcccagataatttctgtacctaaatttgttttgaaacaaaagtattctataattttaacaaatgcagaggagcacatacaagaaacaaattcccagaagttaaggtatcaagtaatactagttttggattttgaattatttcctgattacttgggaacatcattttccatttctaaaccaacatttccttgtctcttaaaattcataagaagcaacagcaaagaagacataaaagatatatctgcttcttaagttagacagcagttaaacacataacaaattgagaataaaaaataatttatcatattcacataaaatagttttaaaggaagcacatacatgtcttgg

SEQ ID NO: 700481 - DNA, 1856 bp, Homo sapiens
  misc_feature 1379, 1380, 1381, 1382, 1383, 1384, 1385, 1386, 1387, 1388,1389, 1390, 1391, 1392, 1393, 1394, 1395, 1396, 1397, 1398,1399, 1400, 1401, 1402, 1403, 1404, 1405, 1406, 1407, 1408,1409, 1410, 1411, 1412, 1413, 1414, 1415, 1416, 1417: n = A,T,C or G
  misc_feature 1418, 1419, 1420, 1421, 1422, 1423, 1424, 1425, 1426, 1427,1428, 1429, 1430, 1431, 1432, 1433, 1434, 1435, 1436, 1437,1438, 1439, 1440, 1441, 1442, 1443, 1444, 1445, 1446, 1447,1448, 1449, 1450, 1451, 1452, 1453, 1454, 1455, 1456: n = A,T,C or G
  misc_feature 1457, 1458, 1459, 1460, 1461, 1462, 1463, 1464, 1465, 1466,1467, 1468, 1469, 1470, 1471, 1472, 1473, 1474, 1475, 1476,1477, 1478: n = A,T,C or G
tgcagcgacacagtgtccaccctatcatgagggggcatgttcctcccagtcaatacccagcaaaggggaagcagacactacttcgctgaaaggaagactttttaaaaagagaaaacaagtgcaaatggtcattcgcacgcaaggatattcacaatcaaatccgtaatttggggaaagggcatacgtgatggtgaaatcattgcttaaagaaatcccaaaaccctactagagtgtaaactgttgcctcatttttctaacaattctcttcaattgattaattattagtgaaaccattataaggcttaatcagcaagtgatatatcagcatttagtatgaagtttatatttttaataacaaatatgctttagaatactcaaggactagtttttctgaggaattttgatgatccagcttcacctaagataggcacttagaaaatctgtggacttagaagggacatttggcatcactgaatccagctcctacacttcgcagacaagatgactgagactcaggaaaagggttttgtttttctgatacttgacagtragagggagggttgcggaatggtttttattaaagactcccctccaaaactgtcatgaattcattcctgcacttgtttcagacattctcttttctgatgattatctttgttaggtctacctcttgaatcctaggagaatgtcaagaaatgtttaaaggtgagttggttaaaaatttaaaacaatctcgcttactctgtatcaaaatacacttggcttgcttccattacaccattatgaaactgcattaggagaccggactacacattatacagtctacatacaattaaatacattatataacatgctcagagaccagactacacattatacagtctacatacaattaaaaagcaaatcccaatccaattcaataaaaccagtcatttcaaatagaaagagaaacaactgggtgagcaatattaaagcttgttaaactttcctacaaatgtataataaaccctttaaaatgtaatgtcctgaatgaaacatatcatcttcaaatattaaaaaagaactcacatacaatctgtctctttcagccacagttagaatgaattttatcattctgaaaattctctgctattggtttcaacactgtatcacttttgtgagtcaactacattgtaaacactgcaaaacctcagagaaagtttcacaaaacaaagacgatttacatatactaatttgacaaaaactgcttccaaatcacaacgttttatgaagtccatattctatttctcctttagtgctttttttgacagttggaaatgggtacaagttgtaatttacttgtatccatttcctactttagtagtgtccaggaaaattannnnnnnnnnnnnnnnnnnnnnnnnnnnnnnnnnnnnnnnnnnnnnnnnnnnnnnnnnnnnnnnnnnnnnnnnnnnnnnnnnnnnnnnnnnnnnnnnnnngtagctgggattacaggcacctgctaccacgcccagataatttctgtacctaaatttgttttgaaacaaaagtattctataattttaacaaatgcagaggagcacatacaagaaacaaattcccagaagttaaggtatcaagtaatactagttttggattttgaattatttcctgattacttgggaacatcattttccatttctaaaccaacatttccttgtctcttaaaattcataagaagcaacagcaaagaagacataaaagatatatctgcttcttaagttagacagcagttaaacacataacaaattgagaataaaaaataatttatcatattcacataaaatagttttaaaggaagcacatacatgtcttgg

SEQ ID NO: 700482 - DNA, 627 bp, Homo sapiens
aatatgtatatttatatacatttatgatttcaagggacattgactgattggctcattcatgtctttcacagtcccattaataaatgtttattggacacatttcccgtgccaagcattgagttaactactgaggataaaatgtggattaaaagcaatatgatccctgcccctaaaaagcttaaactctagtggcatagccaaatatttaacattaatttttaaaatttacattttctracagtaacaagcattaaagggaagaaaataagcagccaagtggctcatctgttctgaaaagtaatccacagctttcctgagggagtgatttattttttctattttgaaataattttacacttaaaagacattacaacaatcatacaggaattttccatgtagctttcattcagttttcctaatattaatatattacataatgacagtacattatcaaaaccaggaagttaacatttgcacagtactgttaactaaactacatgtgttatttagattttaccagtttttacatgcacttatttttagctattattattatttattttggacacagggtctcactctgttatccaggctggagtgcagtgacgcgatctcggctcactgcac

SEQ ID NO: 700483 - DNA, 725 bp, Homo sapiens
cgagcactgcactctgagcactgtactccgagcactgtacaacacagcaacaccctgtctcaaaaataaatcaataaacagaaataaaaaacaaaatataggtgtcatcagagtctaggtggcaattgaagccaagggagtagataaaatcccgcaggaaaagaaaataacgagaaaaaagaagagaactgagggtgggcctctgaggaagaagcaggctgaagggggcaggcccgtggtgaaatgctggcagagggtgtggcaaggacttctttcctgtgtgcgtgctcaggatgtcctggcctcatggggtgcagagtggggatgagaggcgaactggggctgatttagaaagtgmaagtgccagatagagtagaaaaaaaaatctcctctggtgaatatcattagttattttcattacactaattactatggttttaaagctcgttaaaaacatttttttaatcttacactctatttatggggtaaattgtttctaaagatgcccaccacaacccttcctgtcccatgtaaccttttctgctgtgactttgccatttctgtgtcaagaggtaaagtcttttttcctaccccttgattctgggccggccctgccctgtgacttgctttgaccgggagaatgtggggcagtgctgtgggacttccatgcctagatcttaagaagactttgaagtgtctgtgtttatcctcttggaaactagcca

SEQ ID NO: 700484 - DNA, 1154 bp, Homo sapiens
ttttccctttccctagttccttcaggttctccttgacctgaggtctccttgatatcccatctgggccagctcttctctcaatcactcartaaagaattaattgatcagcaccagttaggtgccaagtgctgttgtaacaaatatcagtttttaaatccagaggaataagaaatgtacggccgggcgcggtggctcacccctgtaatcctaacactttgggaggttgagatgggcggatcacttgaggtcaggagttcaaaaccagcctggccaacatggtgaaaccccgtctctactaaaaattcaaaaaaaaaattagctgggcatggtggcgtgcacctgtaatcccagctacttgggaggctgaggcaggagaattgcttgaacctgggaggtgaaggttggcgtgagccgagatcatgccactgcactccagcgtggcaacagagcaagactccatctcaaaggaaaaaaaaagaaagaaatgtaattttatttttctaaaacttaaaactattaaattaactgaaattctattttagtcctcacttaggttggtgagtttgtaacgactcatgagaaagaagctcctttctcaggcttatgtggaagaagagtggctgcaaagctgaagaataggcctccagtcttcaagtttccaggctcccaagatctgcaaatgtagaggcagttctagaggagacttggattttcagtcaatgggccctgatgagacaccaggctcctggttgcaggagagtacaggccagcaacagagtactgtattctattcaaattctgtccctgaatttgccttctcttctcccttccagagctcctggttcagacactcctcacatcatgtctgtactataacaataggttacaatcgcaaacaactatttttgtgatcccagaaaagagctctttttcttctgggaaattctccttccccatctctgattatgtgttttgaaaggaaaccgccattgcctcgagatcttgttatcttggccctgttgatgggaccagagatggacacctgacccaaacctggccaatgacagccattccttgggataattgatcttgggacaaagggagtgactgtcatttcctggcactagtgacagtgtaagagctgaggcccagga

SEQ ID NO: 700485 - DNA, 1938 bp, Homo sapiens
cagggtctcactctatcacttaggctggagtgcagtggtacaatcatagctcactgcagccttgatctctcaggctcaagtgatcctcctgacagcctcccaagtagctgggactatgggcatgcactaccatgcacagctaattaaaaaaaaaacttttgtagagctggggtctcactatgttacccaggctggtctcaaactcctgccctcaagcggtccttctaccttggcctcccaaagcactgggattacaggtattggccaccatgcccagcctcgtgtttcatgttaatactcacagagcaactcaacaagattgatatgttgtagtgatagaatagtgtttccccaaaatatatgtccaaattgtgactctagatacctgtgaatgtgaccttatttgaaaatagggtctttgcagatagaacagagttattgatttggggatgaaattatcgtggatttacagtaaatctaatgactggtgtccttacaagacagaggaaaaaaagatttgaaacaggagagacacaggaaagaaggccatgtgaggatagaagcagaaggtgaaatctttgttgccacaagtcagagaaggccagagctggaaggatcctccccttccaggattctctttggagggagaatcaaaggccaagatgtcagcttggccttgctgacatctcaattctgtgcttctggcctctaaaactataaaagaatacatttctattgttttaagccacccagtttgaggtcatttgttacagcatcccaggaaacaaatacatacacatatatatatatttttttagatggagtctcactctatcgcccagactcgagtgcactggtgcaatctcagcttacctcctgggttcaagygattctcctgctgcagcctgggactacaggcgtgcgctaccatacctggctaatttttgtatttttagtagagatagggtttcgccatgtcggtcaggttggtctcgaactcctgaactcaagtgatcggccccccccccttggcctccccaggtgttgggattacagatgtgagccactgcatctggcctgaatacacatgtttttgtccccactttacagatgaggaaatgaaggctcagaaagacaaacaaatttgctgagtctgtttttatgcaaagagtcaatttatgctagatacacataaagctacagagtgctcataagataaatgatcaggaacccaaaacaggaaaattaggacaaatgtgtagctctaggtccctactgaaaaaaggaaaataggttcacatcatttcaatgggcaaattcacacaaataccagaactcatttaattaggtcaggagaaaccctcttggaaggagaaaactagcaaagtagaaggttgggtaacatgtaaaacaactcagcaaaactgtctatggagaagaccagtccataccagacagagccagccccaaaggcggatgacctagactcttgggagactttgagcagattaaattaatagagcaattaggggcaggaagcagactaagcgtcttaaaatctgggaatccaagaggaaattttcagaacaatttagcttgtaggaaggaatcgagtcatgcacttttaatttctctctgtttggtttcttttcaatatgctgaaatggcaagtctgaagagcaataaataaacacaggtttcttctgagacacaaacagcagggaatcattaatttttaaggtccacccatttcccaaggagccttgcctggtgtttgagctttaatcaactcacgggaacaagtttctcctaacctacaccattatcatcccaggagccttctcttgtcttttggggggaaagaaaattggcattttccatagttgcaaaaataacaaatgctcaatatacaaactttggaaaatttgaaagggcaca

SEQ ID NO: 700486 - DNA, 1938 bp, Homo sapiens
cagggtctcactctatcacttaggctggagtgcagtggtacaatcatagctcactgcagccttgatctctcaggctcaagtgatcctcctgacagcctcccaagtagctgggactatgggcatgcactaccatgcacagctaattaaaaaaaaaacttttgtagagctggggtctcactatgttacccaggctggtctcaaactcctgccctcaagcggtccttctaccttggcctcccaaagcactgggattacaggtattggccaccatgcccagcctcgtgtttcatgttaatactcacagagcaactcaacaagattgatatgttgtagtgatagaatagtgtttccccaaaatatatgtccaaattgtgactctagatacctgtgaatgtgaccttatttgaaaatagggtctttgcagatagaacagagttattgatttggggatgaaattatcgtggatttacagtaaatctaatgactggtgtccttacaagacagaggaaaaaaagatttgaaacaggagagacacaggaaagaaggccatgtgaggatagaagcagaaggtgaaatctttgttgccacaagtcagagaaggccagagctggaaggatcctccccttccaggattctctttggagggagaatcaaaggccaagatgtcagcttggccttgctgacatctcaattctgtgcttctggcctctaaaactataaaagaatacatttctattgttttaagccacccagtttgaggtcatttgttacagcatcccaggaaacaaatacatacacatatatatatatttttttagatggagtctcactctatcgcccagactcgagtgcactggtgcaatctcagcttacctcctgggttcaagtgattctcctgctgcagcctgggactacaggcgtgcgctaccatacctggctaatttttgtatttttagtagagatagggtttcgccatgtcggtcaggttggtctcgaactcctgaactcaagtgatcggccccccccccttggcctccccaggtgttgggattacagrtgtgagccactgcatctggcctgaatacacatgtttttgtccccactttacagatgaggaaatgaaggctcagaaagacaaacaaatttgctgagtctgtttttatgcaaagagtcaatttatgctagatacacataaagctacagagtgctcataagataaatgatcaggaacccaaaacaggaaaattaggacaaatgtgtagctctaggtccctactgaaaaaaggaaaataggttcacatcatttcaatgggcaaattcacacaaataccagaactcatttaattaggtcaggagaaaccctcttggaaggagaaaactagcaaagtagaaggttgggtaacatgtaaaacaactcagcaaaactgtctatggagaagaccagtccataccagacagagccagccccaaaggcggatgacctagactcttgggagactttgagcagattaaattaatagagcaattaggggcaggaagcagactaagcgtcttaaaatctgggaatccaagaggaaattttcagaacaatttagcttgtaggaaggaatcgagtcatgcacttttaatttctctctgtttggtttcttttcaatatgctgaaatggcaagtctgaagagcaataaataaacacaggtttcttctgagacacaaacagcagggaatcattaatttttaaggtccacccatttcccaaggagccttgcctggtgtttgagctttaatcaactcacgggaacaagtttctcctaacctacaccattatcatcccaggagccttctcttgtcttttggggggaaagaaaattggcattttccatagttgcaaaaataacaaatgctcaatatacaaactttggaaaatttgaaagggcaca

SEQ ID NO: 700487 - DNA, 614 bp, Homo sapiens
ctttttttaatttcaataggtttttggggaacaggtggtgtgtggttaaatggataagttatttagtggtgatttctragactttggtatacccgtcacccaagcagggtacactctacccaatgtgtagtctttttttgtttgtttgtttgtcttttgagatggagtcttgctctgtcgcccaggctagagtgcagtggtgtgatcttggctcactgcaacctccgcctcccggcttcaagcgattctcctgcctcagcctcccgagtagagtagctgggattacaggtgtccgccaccgcacccggctaatttttgtattttttagtagagacagggtttcaccattttggccaggctggtctcgaactcctgacctcatgatccacctgcctcagcctcccaaagtactaggattacaggcgtgagccactgcacccagcctccaatgtgtagtcttttatccctcaaccccctcccaccctttcccccaagtccccaaagtccatttcttggcccagagttcctatcatttgctcttccctctttgacctaacttatttcctatttttttcatacacaaaatgctaaaggcccaggaaaacttctccaat

SEQ ID NO: 700488 - DNA, 1151 bp, Homo sapiens
tcacttctattgatgatgatgatcgtgagaattaccattttagctacttttttcagaggtttttcagacagctgttttattatttttcatattaatatactattttcaaagatcttcaaagaattttaatatccttttgtggtgaaaggaattaaatgttagtcctttttttttactcatcactgtactaatgaagatacttagttttgtaarttattgaattatctgctctctgtatttctgtttcttgatagtttcctttagcaggttctgagaaaacataaaaaaaaactttgttctttgggatttgctggtggtagtatggcaaaaagccagttgcatgcagagaactggaatcatctaatttacttaaactctatattatacagttaattatatttaaattgctgcatattattggctgaatatgcttattattgagaataagactgccctttggtaaacatgccattacattatatcctcctatgggattataccctttattatgtttgccatttgcttgggataaggttcatggccagttacatttcatgtgaggatgcatctgtgtttcggggaaaaaaagctttgtgttttataagcatgtatcattctttgtgtcttttatttaaatgcattagtcacttttttaacatttcaataggtttttggggaacaggttatgtttggttacgtgaataagtttagtggcaatttctgagattttggtgcacccatcacctgagcagtctacactgtacccaatgtatagtcctttatccctcaccaccttcccaccctttcccccgagtccccaaagtccgttgtatcattcttaggcctttgcatcctcatagcttagcatccacttacaagtgagaacgtacgatgtttggttttccattcctgagttacttcacttagagtaatcgtctccagttccatccaggttgctgcagatgccattatttcattcctttttatggctgagtagtgttccatgggtgtagaggggtgtgtgtgtgtgtgtgtgtatatcacattttctttatccactcgttgattgatgggcatttgggctggttccatatttttgccattgtgaattgtgctgctataaacatgcgtatgcaagtatcttttttgta

SEQ ID NO: 700489 - DNA, 520 bp, Homo sapiens
atagtcttttaacttttaaytcaatacaaataaataaatgggcttcagggccatatcagagactgtggattctccctgctgtggaaggcttttactaatatagctaattcatttgacccgtaaattgattttaggattgaaagggcaggtgttcttttgagagaagtctctcctcagtcaaatttaatgtcagttgagtcaacctagttttaatttcatgctacattatacatccctcaggattcattgttcctttttaaaataaggttgtatatgattgattatttaaattatcagtaaagggagtacttccatttctgtgctgatatacaaattatttaaaactgtttcataaaccttttttgtgaatcttaattctttttgtctttccaaacactcacaaaggatagtcaaaatgtgttctcagttgcaggaaaactggtgccaagttattcaactataaaaatatttttctacttctgttgtttttcctggctatactattaagaattatcctagt

SEQ ID NO: 700490 - DNA, 571 bp, Homo sapiens
tcaattcattctcttgcattgcacattttacattgggatgtctgcaatctgcmtccgaatatggtgattgactcaggaacacaataaacaattaacaatttttttttttttggttaggtagaactgaaggaacatggaatattccctcaaaaataatggttgtgaagaatatttgaatatatggaaaaatcctttagaatgtaatttgaggaaactaaaggaatatgcaaaagttttattaattcaacaaagtttgctgagaatatatcatgtatctgattcctgccctcaggatcccaccttattttttaaagaatatattcatattagaaaaggaagaagttcaagcgattattaccggtagttatttataaagagtgagctcacggctgattttttcttctttatatttttattaaaaatactttttcacaatatattaatcttatttatctttaaaaatattgctttgaaaattgtaaacaattgcagaagcactaagattttggaaagtcataccgttagctttaagttcagtctctataaatctaggaggcatttaatgccatac

SEQ ID NO: 700491 - DNA, 571 bp, Homo sapiens
tcaattcattctcttgcattgcacattttacattgggatgtctgcaatctgcctccgaatatggtgatygactcaggaacacaataaacaattaacaatttttttttttttggttaggtagaactgaaggaacatggaatattccctcaaaaataatggttgtgaagaatatttgaatatatggaaaaatcctttagaatgtaatttgaggaaactaaaggaatatgcaaaagttttattaattcaacaaagtttgctgagaatatatcatgtatctgattcctgccctcaggatcccaccttattttttaaagaatatattcatattagaaaaggaagaagttcaagcgattattaccggtagttatttataaagagtgagctcacggctgattttttcttctttatatttttattaaaaatactttttcacaatatattaatcttatttatctttaaaaatattgctttgaaaattgtaaacaattgcagaagcactaagattttggaaagtcataccgttagctttaagttcagtctctataaatctaggaggcatttaatgccatac

SEQ ID NO: 700492 - DNA, 571 bp, Homo sapiens
tcaattcattctcttgcattgcacattttacattgggatgtctgcaatctgcctccgaatatggtgattgactcaggaacacaataaacaattaacaatttttttttttttggttaggtagaactgaaggaacatggaatattccctcaaaaataatggttgtgaagaatatttgaatatatggaaaaatcctttagaatgtaatttgaggaaactaaaggaatatgcaaaagttttattaattcaacaaagtttgctgagaatatatcatgtatctgattcctgccctcaggatcccaccttattttttaaagaatatattcatattagaaaaggaagaagttcaagcgattattaccggtagttatttataaagagtgagctcacggctgattttttcttctttatatttttattaaaaatactttttcacaatatattaatcttatttatctttaaaaatattgctttgaaaattgtaaacaattgcasaagcactaagattttggaaagtcataccgttagctttaagttcagtctctataaatctaggaggcatttaatgccatac

SEQ ID NO: 700493 - DNA, 656 bp, Homo sapiens
ggccttgcaattgcaatgatctcctggggttgaagcttaagttcattcacattgtgactgtcaccaaggctttaggtcattcatttagttttagtacctcatttacataccacctgtgtgtcaggcacagtggctgtgttggcctaggccaggggtcagtgaaccttttttgtatagctccagagagtaaatattttaagtttcatgggccatatggttcctatcacaactacctaacttygctgttgtagtgcagacacaaccacagacaatgaataaacaagaatttgcttattggatgtgttccaataaaatttttcttatagaaacaggtggtgggccacatttggcccatgagtctgctgaggctcagaaaatgatccccagtgtgaaggcctcagaaacagcctcagaagtaaagtctcttttggaccttctcctgccctcctgtctctcgcctctcattctccctgaggctagccatagaaataagaattcctcttccccaaggcaggtcacagaaaccagaaccccttctccaaagccagccgcaaaacctaacaatattactctaactttctccctccctttttgtgtgggagttggccatgaagaaactctctgacctgggccggtgcggtggctcactcctgtaa

SEQ ID NO: 700494 - DNA, 640 bp, Homo sapiens
gcagcgaagccttccagattaagctctcttagtctcctgcttgggtttagatattttaaaatgcaatgtaaagggcttagttctacagtcttctgaaaactcagagtcagatatccaagaggcatccttccacagtgggcatatatcaatacagataagatgccaccctcatcatgtcacctgctgttattgtctataaagaacttgtcactacctgaaattatcttatttgtttattcatttcttgtgtcactcccaaatgtcatctgtcactctctacctagtacctagcatagtgccaggcacattatccttctatggatattgattgatattgaaccctgggccaagtagaagacatggtgtgtccatgctagagaaggcacaatctgacacagaacaatctgctacatttgggccaggaactctagctttttccttgtctcctgggaatgtcattgtcattcaaagtgatcaaacctgtatcagtttggaaagaatcgtagcatcttttctctccttggccatttttattgccaaggcagattacagaaagcagagcccagmaagtccctcccatcctatcttccactctgcgtcttcggttccttagccatgcctaataagtgaaagaagtcat

SEQ ID NO: 700495 - DNA, 1542 bp, Homo sapiens
cctaaacatctactacttgccactacgtttatcagttttctttcatgtcatgtttacttgtgatacgttagtctgtctttccctcttctctattttccctcttttttttttttttttgagataagagtctcactctgtcacccaggttggagtacagtggcatgatctcagcttactgcaacttccgcctcctgggttcaagcagttctcctgtttcagcctcccaagtagctgggattacaggcatacaccaccatgcccagctaatttttgtatttttagtagagacagggttttgccatgttggccaggagggtcttgaacccgtgacctcaggtgatctgcccactttggcctcccagagtgctaggatttcaggcgtgagccaccacacctggccttttcctctattctttttttttttttttttttttgagacaagtctcattcttgtcccctaggctagaatgcaatggtgcgatgttggctcactgtaacctctgcctcccaggttcaagcaattctcctgcctcagccccctgactagctgggattacaggcacctgccaccaagcctggctaatttttgtatttttagtagagacggggtttcaccatgttggccaggctggtctagaactcctgacctcacgtgatctgcccacctcagcctcccaaagtactgggattacaggcgtgagccaccatgcccagccctttccctctattcttgatttgttttttgacttaagttacctttttccttctctacttttacaagtgactgttcccacccaaagttgttttcttttttctttctttttttttttttttttttttttttgagacaagagtctcactctgttgcacaggctggagtgcagtagtgcgatctcagctcattgcaacctccgcctcctaggttcaagtgattctcctgcttaagtctcgagtcgctggtattacaggtgcccatcaccatgcccagctaatttttgtgtttttaacagagatggggttttgccatgttggccaagctggtctcgaactcctgacgtcaggcaatcctcttgctttggcctcccaaagtgctgggattacaggtgtgagccaccacacctggccatctacccaaagatttctaatggcagtaattgggtaaagctttaagacttttaagcctatgagcttctttttcttttttgagatggagtctcgctctgtcacccaggctggagtgcagtggtacgatctcggcccactgcaacctctgcctcctgagttcaagggattcttatgcctcagcctcccgagtagctgggattatgggcatccactaccacacttggctaatttttgtaattttttttttttttttttttttttgagacggagttttgcttttgttgcccaggctagagtgcaatggcatgatcttggctcactgcaacttctgcctcccaggttcaagygattctcctgtctcagcctcctgagtagctgggattacaggtgcatgccaccatgcccagctaatttttg

SEQ ID NO: 700496 - DNA, 614 bp, Homo sapiens
tgaggcttatgcaatgtttagccttaagcaacagccaagcccatacttgggacaaactcaggaaaataaagtcacacatttataccacatagcatattccagaggcaagtgaaatggctccccctcaattcaaatattttgattccctgctaggttctccttgtcagggaaaagttgaataatttccctgtgtgcatgctagggtaaacatcaaacaaaagaaatgatggcccaggctgggtgtggtggctcacgcctgtaatcctagtaccctgggaggctgaggtgggtggatcacttgagactaggagttcaagaccagcctaggaaacatggaaaaaccttatctttacaaaaaatacaaaaattagccaagcatggtggtacgtgctsgtggtcccagctactactccagaagctgaggagaaaggatggcttgagtctggaggcagaagctgcagtgagctgagattgtgccactgcactccagcctgggcaacagaggtggaccctgtctcaagaaaagaaaagaaaagaaaagaaggcacagagggcacattctcattaccccttcacccagtcagtgactatttactgagcatctactaagtgcc

SEQ ID NO: 700497 - DNA, 1230 bp, Homo sapiens
aaaaaatggatggcatgtatttatttcataatgacattgactttattttttctaaccatttattctgtgtgtactgtgtactactagtttgtgttctttgtcaatttttctattagattgatattctttttctcattgattgtatgagtttttcatctattaaagaaagtagcttttttgtttatttgtttttgtttttgctattgtcagcaaggatttttacttcaattggttattagtctttcaaatttctttatcttattttcctattgccaaaatcttatagataagtatatcaatatttatttttttcatcttttgaggtttatttcttgctgagaaaaattctccaaattccagaagtataaaataatttgtcctctttctagaaaatcatccatttcatgcaggttttcaattaatttggattgagcaaaattacattttgcaatctgtacttaaattctccttcctatttcttattttgtgcctctgtactttctccactccctccaatattttatcttgattaaataattcatcatgtattaattatatttttcaaaagaactagttccgagatttatctattaatctattgtattgtcttttctctcttttactagtttcaggttttatctccacttgcttctgtttcccttctactttttctgaatattgtctgttttataactatcagtttttatctttatcttttcctttccttayaattattttgttgtatttgtcctcctaggttcctaagaataaatgcttcattaattttagtcttttgcttttcaaatgatacagacttttttgtatttttaagtaatgatttattttccctttagttaagacaacagaaattaatttctaaatatatttaatataggttttcatttgaaaaatatatggaaataagttggccaagcaaagtagacatatccatgtaaaaacaaagaaagctcataattttaaaaaaggagatttagggaactattctgttccactgatcctatgacaacataccatattctgcaacagaataattagtgggaaaattaaagctgaaatattctctggcctttagttataggcattttaaaaatgaccttataagaatgtttagacaatttcaactgtaacatagcaaaataacgtttataattcaaactgatcatagctactaattttcaaaagtagaactgaaaaccagaatttaaaaaa

SEQ ID NO: 700498 - DNA, 650 bp, Homo sapiens
ttgataagttttaacctaaaaaatagcaatttcatatggttcaacgtaatgcatatttttgtggttagccttaaaaagcaaatcacaaacagcatgttcgttccagagaggaatcctggaaggtgaggtggtaccgcgaagaggccgtgtgcaggagagagggtctttcagcagcaggacaggcctgaggaagggatgagggcttggtactgsgcagtcagaagttttaccagccaggccttcagaaagaaatggtcaatgtgctggaactcaaggatgagctcaaatacaatcacatttttaaaaatgttgacatagacaaaccaggttgaaatagataaacctggtctcaatctcagaagtgagactatggtgaaaaatgatatgcaaaagtatgttaaacatatacagaaattaaaatgtgcagaaaaaggaattggtcaaggaaatgttcattccatgttacaatggacccgctcctctcagtctgcaaagcaggttgatttctgttactccacagcttccaggcggctctgagatgtcaaaagacttttcctctagaagacctgccccctcactgttgatttcactgatgttacaagataacaacctggacagagagcaaaccaaactcatgccagacagagagg

SEQ ID NO: 700499 - DNA, 650 bp, Homo sapiens
ttgataagttttaacctaaaaaatagcaatttcatatggttcaacgtaatgcatatttttgtggttagccttaaaaagcaaatcacaaacagcatgttcgttccagagaggaatcctggaaggtgaggtggtaccgcgaagaggccgtgtgcaggagagagggtctttcagcagcaggacaggcctgaggaagggatgagggcttggtactgcgcagtcagaagttttaccagccaggccttcagaaagaaatggtcaatgtgctggaactcaaggatgagctcaaatacaatcacatttttaaaaatgttgacatagacaaaccaggttgaaatagataaacctggtctcaatctcagaagtgagactatggtgaaaaatgatatgcaaaagtatgttaaacatatacagaaattaaaatgtgcagaaraaggaattggtcaaggaaatgttcattccatgttacaatggacccgctcctctcagtctgcaaagcaggttgatttctgttactccacagcttccaggcggctctgagatgtcaaaagacttttcctctagaagacctgccccctcactgttgatttcactgatgttacaagataacaacctggacagagagcaaaccaaactcatgccagacagagagg

SEQ ID NO: 700500 - DNA, 2799 bp, Homo sapiens
attacatcttgtattattcaactggggctttccccctctttactttttcttgaatgtatataagcagcatgtagcaggaatttggctgtacctggtcactacaaggtcacttaaagaattttcagcctgcaactggataccataccctagtttcctgcaagtacaatttagttttctcatggctatatccactaggttcctggggaattgaataatagaaattttgaagawggataggatcttggtgatcaattaatgtaccccaatagcatttcagatgatcgaaatgaggccaggtttaagaactaacttgtccatgtttaccaagctgaccaggacagagctggagctagagttaagtttgctgggcttccatgtacatgttttgtgacatagagaaggaccaagtggagagcagtgaaggaacaaggcatcagcgtatggaggttgggtttggttgcacccagaaatgatctgggtgctgcatgaactttcttcctttgttgtttccttggtcatttccagcacagcatcttcatttctttttgatgagctcaggttttaagtctgctatattttttactttacacatgaagctctgatgcagatggatctcagcagagctgattaatgtccctatgccaagtactccccatacttggccctggataagttaaatgagggataaacagatactatcaggctcatctgtcattgccaaaagaaaaaacaagcacctataccatatttagttataaataataaaatggatgaatttatatatatatatatatatatatatatatatatatatacacatacatatatatatatgtatttttttaagcatgcttagaactttttcctttttttaaattgagatggggtggtggtgaggagtctcattatcttgcctaggctggacttgaacccatgattctctcaactcagcctcagtaggtgggactacaggcatgcaacactgggcctggcacttagaacttgtgatggaaaatggaatggaaaagtttttcttccatttgaattatgcaaatcctgagtatttttctatactctatgtatgataaaatagttttctaaggaagaagctctatcagatgactaatttcattgatatagctcaaaacttgcagaaaaaataattgcacttgggatgagacaaaagttttcagccaacatgtaaacatcttaaatcttttgataaataatattattgtaattttattcataatacttaatgacttggtttatatcatagttatatcttagtatagaaagaaatttaaatgatggtatgatgtgcaaaagtgcaaaaatttgtatatatatttatttaagtctgtccatgttattaattaattcctatattcaaggcagatgttgacctttgcatttgtggccaaatttccattcaaccattcttcagatttcaactctcagtgaatctaagttattctttgaagattctttctgggtctactagtttgatcatgatgctataaagaaaattcagcttaaaggcaatagttggaaagctattgaacttcctagaattaattttcatggtaatttttatagtgcatgactggaaagccattcggaaagtagtatcagatcattagtattctctcttatgcactagtttatttctatggtaggacagagggcaagaatgttgacctttagaaaatgtggtctgtagttcagtgttgggcataccatagatttcaatatattcgtcaaattcgaactggataagatgaaaatttttatttcttaaggtgttctttaaaagtaagtcaattaaaaaaatttagctctccctttatatataaatatttgaaactattctaatatgttgaatacattttttttataaaattaaattgtgcttattaaagaaactttggacattgcagaaaaatagaaaggcaaaaaacagtagataataatgtcatacaaaggcaaacacataagactatataaaaactatttcctgcaattttccttttaatgcatagatttaaaaatgcttgaaaatgtgaactttataattttgtatcctttttcacttaaatcaagtacctgtattatctcaatgatcgtcatctttatcttcatgccttatcaccaaaaatagcatttattgttgcataccagtcgactgactagataaaccagttactttcacaactgtagtattgttgcataagctggattgagtatgttcttaattaaaacgtaacaatggcttaacaatgttgaaaagaatataagaatgtaatagtttttttttctaatacattttcaatgtttttaatttaagggagtatatttgggagttcagaaaggtcaagggatgaactactttttagatttttaaaaggaaaagtcaattagaatctttttttttttttttttttgccaaaaataatatcatatgctatttgggatgctggaaatttttcttctattatttgataaaaatcaaagatttattcaaaaaatttttctcaatgttaaatatttatgaagaaattataagttttaaagtttcccttagaaatttatgcatccacagtgttgatctccaggacaaggattgaatacattatttagacatcagtttcttgatgttttcagtaatatagtctggcaatttcttctgtttcttagcctgtttataatacttggatattttccatcttattgaaatgcaaatttattgaaagaatactggcacatccactgagatttacagtgtatcagttttggaaa

SEQ ID NO: 700501 - DNA, 2799 bp, Homo sapiens
attacatcttgtattattcaactggggctttccccctctttactttttcttgaatgtatataagcagcatgtagcaggaatttggctgtacctggtcactacaaggtcacttaaagaattttcagcctgcaactggataccataccctagtttcctgcaagtacaatttagttttctcatggctatatccactaggttcctggggaattgaataatagaaattttgaagaaggataggatcttggtgatcaattaatgtaccccaatagcatttcagatgatcgaaatgaggccaggtttaagaactaacttgtccatgtttaccaagctgaccaggacagagctggagctagagttaagtttgctgggcttccatgtacatgttttgtgacatagagaaggaccaagtggagagcagtgaaggaacaaggcatcagcgtatggaggttgggtttggttgcacccagaaatgatctgggtgctgcatgaactttcttcctttgttgtttccttggtcatttccagcayagcatcttcatttctttttgatgagctcaggttttaagtctgctatattttttactttacacatgaagctctgatgcagatggatctcagcagagctgattaatgtccctatgccaagtactccccatacttggccctggataagttaaatgagggataaacagatactatcaggctcatctgtcattgccaaaagaaaaaacaagcacctataccatatttagttataaataataaaatggatgaatttatatatatatatatatatatatatatatatatatatacacatacatatatatatatgtatttttttaagcatgcttagaactttttcctttttttaaattgagatggggtggtggtgaggagtctcattatcttgcctaggctggacttgaacccatgattctctcaactcagcctcagtaggtgggactacaggcatgcaacactgggcctggcacttagaacttgtgatggaaaatggaatggaaaagtttttcttccatttgaattatgcaaatcctgagtatttttctatactctatgtatgataaaatagttttctaaggaagaagctctatcagatgactaatttcattgatatagctcaaaacttgcagaaaaaataattgcacttgggatgagacaaaagttttcagccaacatgtaaacatcttaaatcttttgataaataatattattgtaattttattcataatacttaatgacttggtttatatcatagttatatcttagtatagaaagaaatttaaatgatggtatgatgtgcaaaagtgcaaaaatttgtatatatatttatttaagtctgtccatgttattaattaattcctatattcaaggcagatgttgacctttgcatttgtggccaaatttccattcaaccattcttcagatttcaactctcagtgaatctaagttattctttgaagattctttctgggtctactagtttgatcatgatgctataaagaaaattcagcttaaaggcaatagttggaaagctattgaacttcctagaattaattttcatggtaatttttatagtgcatgactggaaagccattcggaaagtagtatcagatcattagtattctctcttatgcactagtttatttctatggtaggacagagggcaagaatgttgacctttagaaaatgtggtctgtagttcagtgttgggcataccatagatttcaatatattcgtcaaattcgaactggataagatgaaaatttttatttcttaaggtgttctttaaaagtaagtcaattaaaaaaatttagctctccctttatatataaatatttgaaactattctaatatgttgaatacattttttttataaaattaaattgtgcttattaaagaaactttggacattgcagaaaaatagaaaggcaaaaaacagtagataataatgtcatacaaaggcaaacacataagactatataaaaactatttcctgcaattttccttttaatgcatagatttaaaaatgcttgaaaatgtgaactttataattttgtatcctttttcacttaaatcaagtacctgtattatctcaatgatcgtcatctttatcttcatgccttatcaccaaaaatagcatttattgttgcataccagtcgactgactagataaaccagttactttcacaactgtagtattgttgcataagctggattgagtatgttcttaattaaaacgtaacaatggcttaacaatgttgaaaagaatataagaatgtaatagtttttttttctaatacattttcaatgtttttaatttaagggagtatatttgggagttcagaaaggtcaagggatgaactactttttagatttttaaaaggaaaagtcaattagaatctttttttttttttttttttgccaaaaataatatcatatgctatttgggatgctggaaatttttcttctattatttgataaaaatcaaagatttattcaaaaaatttttctcaatgttaaatatttatgaagaaattataagttttaaagtttcccttagaaatttatgcatccacagtgttgatctccaggacaaggattgaatacattatttagacatcagtttcttgatgttttcagtaatatagtctggcaatttcttctgtttcttagcctgtttataatacttggatattttccatcttattgaaatgcaaatttattgaaagaatactggcacatccactgagatttacagtgtatcagttttggaaa

SEQ ID NO: 700502 - DNA, 1623 bp, Homo sapiens
  misc_feature 1073, 1074, 1075, 1076, 1077, 1078, 1079, 1080, 1081, 1082,1083, 1084, 1085, 1086, 1087, 1088, 1089, 1090, 1091, 1092,1093, 1094, 1095, 1096, 1097, 1098, 1099, 1100, 1101, 1102,1103, 1104, 1105, 1106, 1107, 1108, 1109, 1110, 1111: n = A,T,C or G
  misc_feature 1112, 1113, 1114, 1115, 1116, 1117, 1118, 1119, 1120, 1121,1122, 1123, 1124, 1125, 1126, 1127, 1128, 1129, 1130, 1131,1132, 1133, 1134, 1135, 1136, 1137, 1138, 1139, 1140, 1141,1142, 1143, 1144, 1145, 1146, 1147, 1148, 1149, 1150: n = A,T,C or G
  misc_feature 1151, 1152, 1153, 1154, 1155, 1156, 1157, 1158, 1159, 1160,1161, 1162, 1163, 1164, 1165, 1166, 1167, 1168, 1169, 1170,1171, 1172: n = A,T,C or G
gcataggaaacccagaacatgttaggctatgttttttacaccattatgttcaataatattagtctggccagtgtttcatttgaataatcaatcaaataaagcaatcaaatgtcagtgattattaaacaagcttttcttgtaagcttaatgttcaagcaagtgctttgatgatagaatacacaaacaaagcaggaagcaatcatgatttctgccttgaagtgatgttggtcaattgggctaattttcatgtaccctctaaagctctgctgcagcgtcatcwcccccaggaagcctcgccagatcctctagcctaggctcagggtcaccttctgtggtcccagatccccaggtatatctgcctcattgggaatatggattaaattggttattggtaaagtacttaccttttaatgaccaaatcctaccctagatttgcattacctcagagcagggaattattttgtgcttgagtggtttaatatattttttctatcacttggcacaatatgtagaaaaaataagtatcttttgaatgaatgcataaaaattacaaaacagctcgatttttgaagagggccagatgcagagtctgaagttacagattatgtgtttagtagttcttaggaggattaatgagggttggatttgtcacagcatgaggtaggacccttattttgctcctttatagacaggtagaatgtgagtgagtggagggtaaagagaagggcattgcagctatgaacaattacatgagtgaaagcaggagaagaacgagcacagacttcaggcaacagcagggaggccaagttgcctacagcaagaggtatggtattgagctttggagagtgaagctggagagatagcataaaaccaagatatggaaagtttcaaaagcccaacagagaattttgatacattatgattctaaaagaacagtctgtttagttttggaaccgagtttctgtgtaagaaagtttaattctggccaggcacagtggttcacgcctgatatcccatcactttgggaggtgaggcgagtggatcacctgaggtaggaatttgagacagcctgnnnnnnnnnnnnnnnnnnnnnnnnnnnnnnnnnnnnnnnnnnnnnnnnnnnnnnnnnnnnnnnnnnnnnnnnnnnnnnnnnnnnnnnnnnnnnnnnnnnnatggaagaaataaaggaagcgcctaagcaacagtggagagatggtcccattatgggtaatcaggtccaataaagaacagagtagaagtttttagtgttcttcttttactatctgacttcctcccaactcaggttcaaagttgggcatttgggtagtctcttgaacatgcaggttacagaggcaagacagctcttagcatgttagataacatttctaaatgtcactatatagtcttcttagaaagcacagaataaattactgctaccttgtaaaaaataatgtgtacatcctgctatggaaagatagccgactaggtcccacatgttagcacgggagtatctgcaactgcattacagtctgtagcatagaaagggatttgaaatgagatatctacctctgccaactgtctggcaactccacaccaccccacagttagccactgaggaacctc

SEQ ID NO: 700503 - DNA, 1623 bp, Homo sapiens
  misc_feature 1073, 1074, 1075, 1076, 1077, 1078, 1079, 1080, 1081, 1082,1083, 1084, 1085, 1086, 1087, 1088, 1089, 1090, 1091, 1092,1093, 1094, 1095, 1096, 1097, 1098, 1099, 1100, 1101, 1102,1103, 1104, 1105, 1106, 1107, 1108, 1109, 1110, 1111: n = A,T,C or G
  misc_feature 1112, 1113, 1114, 1115, 1116, 1117, 1118, 1119, 1120, 1121,1122, 1123, 1124, 1125, 1126, 1127, 1128, 1129, 1130, 1131,1132, 1133, 1134, 1135, 1136, 1137, 1138, 1139, 1140, 1141,1142, 1143, 1144, 1145, 1146, 1147, 1148, 1149, 1150: n = A,T,C or G
  misc_feature 1151, 1152, 1153, 1154, 1155, 1156, 1157, 1158, 1159, 1160,1161, 1162, 1163, 1164, 1165, 1166, 1167, 1168, 1169, 1170,1171, 1172: n = A,T,C or G
gcataggaaacccagaacatgttaggctatgttttttacaccattatgttcaataatattagtctggccagtgtttcatttgaataatcaatcaaataaagcaatcaaatgtcagtgattattaaacaagcttttcttgtaagcttaatgttcaagcaagtgctttgatgatagaatacacaaacaaagcaggaagcaatcatgatttctgccttgaagtgatgttggtcaattgggctaattttcatgtaccctctaaagctctgctgcagcgtcatcacccccargaagcctcgccagatcctctagcctaggctcagggtcaccttctgtggtcccagatccccaggtatatctgcctcattgggaatatggattaaattggttattggtaaagtacttaccttttaatgaccaaatcctaccctagatttgcattacctcagagcagggaattattttgtgcttgagtggtttaatatattttttctatcacttggcacaatatgtagaaaaaataagtatcttttgaatgaatgcataaaaattacaaaacagctcgatttttgaagagggccagatgcagagtctgaagttacagattatgtgtttagtagttcttaggaggattaatgagggttggatttgtcacagcatgaggtaggacccttattttgctcctttatagacaggtagaatgtgagtgagtggagggtaaagagaagggcattgcagctatgaacaattacatgagtgaaagcaggagaagaacgagcacagacttcaggcaacagcagggaggccaagttgcctacagcaagaggtatggtattgagctttggagagtgaagctggagagatagcataaaaccaagatatggaaagtttcaaaagcccaacagagaattttgatacattatgattctaaaagaacagtctgtttagttttggaaccgagtttctgtgtaagaaagtttaattctggccaggcacagtggttcacgcctgatatcccatcactttgggaggtgaggcgagtggatcacctgaggtaggaatttgagacagcctgnnnnnnnnnnnnnnnnnnnnnnnnnnnnnnnnnnnnnnnnnnnnnnnnnnnnnnnnnnnnnnnnnnnnnnnnnnnnnnnnnnnnnnnnnnnnnnnnnnnnatggaagaaataaaggaagcgcctaagcaacagtggagagatggtcccattatgggtaatcaggtccaataaagaacagagtagaagtttttagtgttcttcttttactatctgacttcctcccaactcaggttcaaagttgggcatttgggtagtctcttgaacatgcaggttacagaggcaagacagctcttagcatgttagataacatttctaaatgtcactatatagtcttcttagaaagcacagaataaattactgctaccttgtaaaaaataatgtgtacatcctgctatggaaagatagccgactaggtcccacatgttagcacgggagtatctgcaactgcattacagtctgtagcatagaaagggatttgaaatgagatatctacctctgccaactgtctggcaactccacaccaccccacagttagccactgaggaacctc

SEQ ID NO: 700504 - DNA, 1623 bp, Homo sapiens
  misc_feature 1073, 1074, 1075, 1076, 1077, 1078, 1079, 1080, 1081, 1082,1083, 1084, 1085, 1086, 1087, 1088, 1089, 1090, 1091, 1092,1093, 1094, 1095, 1096, 1097, 1098, 1099, 1100, 1101, 1102,1103, 1104, 1105, 1106, 1107, 1108, 1109, 1110, 1111: n = A,T,C or G
  misc_feature 1112, 1113, 1114, 1115, 1116, 1117, 1118, 1119, 1120, 1121,1122, 1123, 1124, 1125, 1126, 1127, 1128, 1129, 1130, 1131,1132, 1133, 1134, 1135, 1136, 1137, 1138, 1139, 1140, 1141,1142, 1143, 1144, 1145, 1146, 1147, 1148, 1149, 1150: n = A,T,C or G
  misc_feature 1151, 1152, 1153, 1154, 1155, 1156, 1157, 1158, 1159, 1160,1161, 1162, 1163, 1164, 1165, 1166, 1167, 1168, 1169, 1170,1171, 1172: n = A,T,C or G
gcataggaaacccagaacatgttaggctatgttttttacaccattatgttcaataatattagtctggccagtgtttcatttgaataatcaatcaaataaagcaatcaaatgtcagtgattattaaacaagcttttcttgtaagcttaatgttcaagcaagtgctttgatgatagaatacacaaacaaagcaggaagcaatcatgatttctgccttgaagtgatgttggtcaattgggctaattttcatgtaccctctaaagctctgctgcagcgtcatcacccccaggaagcctcgccagatcctctagcctaggctcagggtcaccttctgtggtcccagatccccaggtatatctgcctcattgggaatatggattaaattggttattrgtaaagtacttaccttttaatgaccaaatcctaccctagatttgcattacctcagagcagggaattattttgtgcttgagtggtttaatatattttttctatcacttggcacaatatgtagaaaaaataagtatcttttgaatgaatgcataaaaattacaaaacagctcgatttttgaagagggccagatgcagagtctgaagttacagattatgtgtttagtagttcttaggaggattaatgagggttggatttgtcacagcatgaggtaggacccttattttgctcctttatagacaggtagaatgtgagtgagtggagggtaaagagaagggcattgcagctatgaacaattacatgagtgaaagcaggagaagaacgagcacagacttcaggcaacagcagggaggccaagttgcctacagcaagaggtatggtattgagctttggagagtgaagctggagagatagcataaaaccaagatatggaaagtttcaaaagcccaacagagaattttgatacattatgattctaaaagaacagtctgtttagttttggaaccgagtttctgtgtaagaaagtttaattctggccaggcacagtggttcacgcctgatatcccatcactttgggaggtgaggcgagtggatcacctgaggtaggaatttgagacagcctgnnnnnnnnnnnnnnnnnnnnnnnnnnnnnnnnnnnnnnnnnnnnnnnnnnnnnnnnnnnnnnnnnnnnnnnnnnnnnnnnnnnnnnnnnnnnnnnnnnnnatggaagaaataaaggaagcgcctaagcaacagtggagagatggtcccattatgggtaatcaggtccaataaagaacagagtagaagtttttagtgttcttcttttactatctgacttcctcccaactcaggttcaaagttgggcatttgggtagtctcttgaacatgcaggttacagaggcaagacagctcttagcatgttagataacatttctaaatgtcactatatagtcttcttagaaagcacagaataaattactgctaccttgtaaaaaataatgtgtacatcctgctatggaaagatagccgactaggtcccacatgttagcacgggagtatctgcaactgcattacagtctgtagcatagaaagggatttgaaatgagatatctacctctgccaactgtctggcaactccacaccaccccacagttagccactgaggaacctc

SEQ ID NO: 700505 - DNA, 1623 bp, Homo sapiens
  misc_feature 1073, 1074, 1075, 1076, 1077, 1078, 1079, 1080, 1081, 1082,1083, 1084, 1085, 1086, 1087, 1088, 1089, 1090, 1091, 1092,1093, 1094, 1095, 1096, 1097, 1098, 1099, 1100, 1101, 1102,1103, 1104, 1105, 1106, 1107, 1108, 1109, 1110, 1111: n = A,T,C or G
  misc_feature 1112, 1113, 1114, 1115, 1116, 1117, 1118, 1119, 1120, 1121,1122, 1123, 1124, 1125, 1126, 1127, 1128, 1129, 1130, 1131,1132, 1133, 1134, 1135, 1136, 1137, 1138, 1139, 1140, 1141,1142, 1143, 1144, 1145, 1146, 1147, 1148, 1149, 1150: n = A,T,C or G
  misc_feature 1151, 1152, 1153, 1154, 1155, 1156, 1157, 1158, 1159, 1160,1161, 1162, 1163, 1164, 1165, 1166, 1167, 1168, 1169, 1170,1171, 1172: n = A,T,C or G
gcataggaaacccagaacatgttaggctatgttttttacaccattatgttcaataatattagtctggccagtgtttcatttgaataatcaatcaaataaagcaatcaaatgtcagtgattattaaacaagcttttcttgtaagcttaatgttcaagcaagtgctttgatgatagaatacacaaacaaagcaggaagcaatcatgatttctgccttgaagtgatgttggtcaattgggctaattttcatgtaccctctaaagctctgctgcagcgtcatcacccccaggaagcctcgccagatcctctagcctaggctcagggtcaccttctgtggtcccagatccccaggtatatctgcctcattgggaatatggattaaattggttattggtaaagtacttaccttttaatgaccaaatcctaccctagatttgcattacctcagagcagggaattattttgtgcttgagtggtttaatatattttttctatcacttggcacaatatgtagaaaaaataagtatcttttgaatgaatgcataaaaattacaaaacagctcgatttttgaagagggccagatgcagagtctgaagttacagattatgtgtttagtagttcttaggaggattaatgagggttggatttgtcacagcatgaggtaggacccttattttgctcctttatagacaggtagaatgtgagtgagtggagggtaaagagaagggcattgcagctatgaacaattacatgagtgaaagcaggagaagaacgagcacagacttcaggcaacagcagggaggccaagttgcctacagcaagaggtatggtattgagctttggagagtgaagctggagagatagcataaaaccaagatatggaaagtttyaaaagcccaacagagaattttgatacattatgattctaaaagaacagtctgtttagttttggaaccgagtttctgtgtaagaaagtttaattctggccaggcacagtggttcacgcctgatatcccatcactttgggaggtgaggcgagtggatcacctgaggtaggaatttgagacagcctgnnnnnnnnnnnnnnnnnnnnnnnnnnnnnnnnnnnnnnnnnnnnnnnnnnnnnnnnnnnnnnnnnnnnnnnnnnnnnnnnnnnnnnnnnnnnnnnnnnnnatggaagaaataaaggaagcgcctaagcaacagtggagagatggtcccattatgggtaatcaggtccaataaagaacagagtagaagtttttagtgttcttcttttactatctgacttcctcccaactcaggttcaaagttgggcatttgggtagtctcttgaacatgcaggttacagaggcaagacagctcttagcatgttagataacatttctaaatgtcactatatagtcttcttagaaagcacagaataaattactgctaccttgtaaaaaataatgtgtacatcctgctatggaaagatagccgactaggtcccacatgttagcacgggagtatctgcaactgcattacagtctgtagcatagaaagggatttgaaatgagatatctacctctgccaactgtctggcaactccacaccaccccacagttagccactgaggaacctc

SEQ ID NO: 700506 - DNA, 1784 bp, Homo sapiens
ttttttttttttttttttgcagaggcagggcctcactatgatatccaggctggtctcaaactcctaacctcaaataatcctccatcctcagcctcccaaagtgctgggattataaacatggaccagggcacactgccttcatttcctattttttatgaataagaaagaactacagcaaaaatcacatctgctttcagctactagcaaaagaagaaaaacagagawtttgagggtttttttttttttgcttactattgttgtagagtaagatttttattatttatttttatcatagagtaatatttttcttatagtgagagtacactcaaaagaaatggtttttgtacctatcaaaggcttcggtttcatttcagtatttaagcacctatttaaactcatcttctaacacatgttttaaattacactatttaatcttggctgtttagaagtttaagatctgtaattagctagctggtctaaaaagaatgagatggtttctagacacacaaaagcaatctcagaaattattctagcacagagattgcagggaaaataaagcaaaataaacaacaaaaaaggagattagaaaaagagaaaggtagaaataaaaggaggttaagaatatttaaaagacacagtctacccttttcaaataaacataatttcgcagccaaaaatataaagtattttggctcctgttttggtgtcatcctatatagaagaggggagagagggtgagcaaataaagcaggaaaataaagaatcataagaggaatagaaaaataaaattgaaatcaaaataaaaatctaccagagcatccatttgagcattaatgaataaaacgaagcatcccagaatcacctccggaattggcaaacctaagtttgaatttcaaaactgccacctactatttattcatttattcaataaggcatcaatatgcctaaccttctagatgctccaacgtcagtgttgactgtatactatgtgctggttattattaatctgccagaatgtcaatttcttcacctttaaaactgtggaaacaataatattctcacatagtgggttgtggggatccagtgaaatccaagaaaatgaggtccatgaattgtgttattagtaaagctcagaaactctcagatatttttgtcattattattactcagtcaaaaagcaaggcaaaaccttttttcattagggcaaaaaaccaatggacaaataaaaaagccttgttggttaactcggtccattcataatttaaaatttccaagtgtggtactttggaaaagtggtcacaaattctttccctgcctgtatccacactcttgtaatgtaattttgagaccctttccttcaaaagtagaatctatgtctctaccccttaagtctggccttgccagttacatgctggggccagtagaaggtggcaagctcttcgacattcccactgtcttcctggaaccctgcaaatccaccatgtgaacaagaacaggctagcctcatagatgatgagagacaggcagtccaggcagccctgttacctcagctaacagccagccaaatgttacatatgtgagcaaggccaccctagatcacctgtgcctagccaacccaccacctgactgcagacacatgtgcaaacccagccaagatcaataaaacctggcacagaccaccagaaatggccagatgacactagacaggtaagcaataagaaatggtcattgttttatgccagaaagtttggggaatttttttaaacacaacaaaagctaactgc

SEQ ID NO: 700507 - DNA, 586 bp, Homo sapiens
cagagaattcttccttgtaaggaactgtctcatacattctagaatgttcagcagcatccctggcctctatctagaggtcagtagcacacccacaattgtgacaaccaatacctccagatgttgccaaccactgttctaatcactgggaagaaaatttctgagttatatatttttacaactaggtgaattctcattttatcttttccaccataatcatttttgaaactctcagaattttcacttaatcacactgattctaaacaacatgcaatctatctcaatgaagtcgtctcaaagtcatatatctccaatttacaggttttaccaattatagaatgtcatgtaaataatgttatggtagttaatagcaatcaacttagacaaacacttctgatataaaaacttaaaaatyaatgatgcaacctatgtgattattttgattctcatacagcttcacaactgattttttttttgtggataaacttttgcttcatgcctttttgtaaatccttcagaatttgtttatgatattgtctccttttatagagtcttaaattctcttcacgttctatttgtcttcataact

SEQ ID NO: 700508 - DNA, 654 bp, Homo sapiens
aaaggcctggagggttcatattcaggtccacctaacttgaaaacttatattgaccttacttaagtactgattccccctttataatccatgccgcaaacttcattgtcttattttaagaagttgccataagagcctttagcaaccaccctcctgatcagccagcagtcatcaacattgaggcaagaccstgccccagcaaaaagattaagattagctgaagcctcagatgatccttagcatttttgagcaatagagtaattttaaattaaggtatatacatagttcttttatacataatgctatcatacacttaataggctacagtagagtgtgaatataacttttctatgcactggaaaaacaaaaatttgtgtgacttgtttgttgccatggtctgaaaccaaatctgcagtgtctctgaggtacgtctgtagtttccctttctctcttcctgctggcccggaatgaccttgtttcttgcccctgtctagccctgcatgctgcaggggtttgccttctctggtaggtctgggaactttgcatccttgtaaccttggctcctggcatacgacactggtaccaagctctgttggactagtgagcctcctccccacacacctcctgaactagaaccaaagctctgtgcatgcaccg

SEQ ID NO: 700509 - DNA, 654 bp, Homo sapiens
aaaggcctggagggttcatattcaggtccacctaacttgaaaacttatattgaccttacttaagtactgattccccctttataatccatgccgcaaacttcattgtcttattttaagaagttgccataagagcctttagcaaccaccctcctgatcagccagcagtcatcaacattgaggcaagaccgtgccccagcaaaaagattaagattagctgaagcctcagatgatccttagcatttttgagcaatagagtaattttaaattaaggtatatacatagttcttttatacataatgctatcatacacttaataggctacagtagagtgtgaatataacttttctatgcactggaaaaacaaaaatttgtgtgacttgtttgttgccatggtctgaaaccaaatctgcagtgtctctgaggtacgtctgtagtttccctttcyctcttcctgctggcccggaatgaccttgtttcttgcccctgtctagccctgcatgctgcaggggtttgccttctctggtaggtctgggaactttgcatccttgtaaccttggctcctggcatacgacactggtaccaagctctgttggactagtgagcctcctccccacacacctcctgaactagaaccaaagctctgtgcatgcaccg

SEQ ID NO: 700510 - DNA, 1689 bp, Homo sapiens
ttcagggtaaaaggagatctgagtgagccctttagcactgtgataataaactttctttcaacacaagtaggggatgtagcattgacttagaggtgttctgggagataaaacacccattctttgtttaagaaggaagtgtgaatgaagggagtcagggagtctgactattcaaaagccaaactaacactcacaattttattatttatctatttatttatttagagacagagttgtgctctgtcacctaggctggagtgcagtggcacggtttcactcactgcaacctctgcctcccaagttcaagctattctcctgcctcagtctcccaagtagctaagattacaggcatgtgccaccatgcccagctaattttgtgtgtttttagtagagatggggtttcaccatgttggtcaggctgaactcaaactcctgacctcaaatgatctgcccaccttggcctcccacagtgctgggattacaagcatgagccactgtgcccggccacatatttattttttgagtcaaaaggtgagtcattcaaaataaacatacacatacatgcacccacaagcacatattccttgaacatttacttcataacaaaacactggggacttggccttctcaaaacttacattctaactggtgcaaatagactctatttttttttttttaaattgagtaaggtaattttaaaacctagaacagatgttacyaaaaatggaaacgtggggcagtggcatagagagagactaaaaaaggtttgacggctattttagaacaaatgctctgaatgtcttctcttaagatgacatattttaagctgtgatgtgaataatgaacaatcaggcatgaacatatgcgagcattgtgcactttgagaaaacatttgtacaaatttccaaagagggccgtggtttgaaattttcaaacaaccgggggaaaagagatggaaaaaaaaacattgttaggactgaagaaaacaacaaagggttttatacggagctagggaaaaataatatcggctcaatgagccatgaaacgtggtatggatctctttctactgtagtcaatagattgttttaatcaagacattgatagtatgtggtaaatgaaaacaatttctgcacacacacaaacacccaaacatttgtattgtgtaggtatagttttcacagaaaaaacatctctcctatgtcttttctctgttggcattgtgttagcagaggcacacactactccaatatcctacatcttgtggaaaaggttaatatagtgttcagggacatatataggtcaccaggtcttcgatgaggtcagaaaacatgtccaaaggaatcaatgtgagcactgaattttgaaagctttagtgagattaaaaaaaggaggtagttgttgtccaaacaagcaagaggaaaaaagtcattgaagtatgggattcttgtcacagagataccaattttaatgatatataattgttaaatgatttttagatttataattattaaaattcaataatgattcttgcactacagcaggtacttcctgaagtcagtgattaatccttttatctctttagcatgatacttggcctatcttaaccactgtctcagtaattgagagagtatacaattatatttatttactttctctaagtatttaacatgtttggcaaaacagaaaagctga

SEQ ID NO: 700511 - DNA, 642 bp, Homo sapiens
acatgtgatttgtctacagcttcccataatcaccttcaagagattcttgacctggaattattcatttggatcaatagagaattaagaaataatagactgaaaaatatttacatatttaggtttaaaaagtgtagaaagaataaaaaattagcttttacttgagctctgaaaggaaatggagagaagcttggactgaagggcccagaacgctgttccagctggtggaagtctgtttagcagactgtggtgatggtggtgggacttttaaaacaaatattgcctaagacaattccagaagacatgcaaatcatgatcttgataacggaggaatgatattgttcaagttacgagtatgagcaagtgccaaacagtgaagctctttgcacatatttttcatcaagaagatatctactgacaaggtatacacactgattcacaggtgtgcaagggcaatgttgctaaagtggccttctctttttctctgacttaaggccactctctcactatgaatctcattgctgcctcataatatactatacatacctaagggtgggaaagtctatttcatgcaaaaataataaatatagatgcatataggcctacacacacacattgtatggcctgacacacagtaattayaaa

SEQ ID NO: 700512 - DNA, 383 bp, Homo sapiens
ctttcttagagaacttgtaaggaaataagagaaatakgagcttttatttccttatattgcgatggtaactttttgtatatactatttctctatccttggttattcaaggcttctgctgactctgctttatttactgtgattttttttttctttatactttaagttctagggtacatgtgcacaatgtgcaggtttgttacagaggtatacatgtgccatgttggtttgctgcacacattaactcgtcatttacattacttatttctcctaatgctatccctcccccggccctctaccccacaacaagccccagtgtgtaatgttcccctccctgtgttcaagtgttctgattgttcaattcccaccaatgagtgagaacatgc

SEQ ID NO: 700513 - DNA, 1912 bp, Homo sapiens
tggccacccagcacagaagaactttttcattttatttgacttgcaacttttgttcgtaaacctggtcttgtacatatttactctcttactctctagcacctcatacccacagatactggcaataatcaggctatcacatttcctcaatattcatccagctatgattagctttcttatttgtaagatatggcattcgtgtgaacaattcaaattcactactggcaaataatgataatgcaaaaaaattaatttcaaaattacttcctgtgtttacacaatggcttccaagactaagtttaatttgatgaataatactgatcagacaactcacacacactctctcacacacacacactaaatatttgcaggtacttttcttattatgttgaccagtaaaacaataaaattggtaaaaattgcatctattcataaatgacagcggcaatagtctttttgaacaagttatttgattccgtttcaaatcattaatatatatgaatactctatttgcaatttaaatttagagaaattgtatgtcagaatgaatatctacccagtaagagatttaattgtattttctccaataaaatttcaggacacaattttccgaggattaaaggctattaaatgtcaggctattactatgcctgacaccaggcacaatttataaacacatggagagccagggcttgtgtcatgggatgccacaaagtagagtggcagtgaaatggtgaggtttctatcatcctctgatatatcactaggggaaaactacgagacactgactccaagcaaaagctgattacagaacattgctttgcccaacataaggatgaagagatgatcctaagagaccttgaaggtagaaagctkcacgtagtatcccagagtctccagcacctcatttgtaactgaataaatggtacctactccactactatgaagatcaatgagaatgcatggagtgtttagtcccatgcctggtgtatagcaggaatttaacaaacattactttccttttctaattaaagttaaattagccttaatgctcttctcaaccttgaagtagacaaaagatcccttttcacaaataaacttagtgcaaagaccactgggctaggagtctgagaatctgggctctagttcaagaaactaacctctgtgagaatttggttacctcattttctctctttgagtttgtgtcaccatctgtaaaatgtggctttgacaatttcacctgttcatctagtttggtcattctgagcccttctggattcctgagagccttccctaataaaggatgttattgaagtggagagtctggtattgtcctggttctagcagggtccctcaaagggatcatttactgcaaagaaagattaatattaaaacatctttatcccctcagaatatttttcaggagacctactatggaaatccataaggcctgggagtaagacaggagaaccaacagaccccaagtctattatctattatctattatctacttagatcttttggccatcattcatctctgctcttcttcctggcacactccttccacaccttgtccctgtgataaactcctttgtgattaaacttcaaatggtatcataaggaaaggaggtattccttattcatcacagactgtgtttgatattccttcctcactcccaccaccaatgcctcacccttcataagttttcagtacatagtttttgaataaataaatgatatattaggtacttaaaaaaagaactaaaatgacagtgattttttgtattgctcgtgtcagagcccagtagggtttttggtagatagcattccacatagtgatacagggatcaagtttccttctatttgtggctctgtcatttcttagggctttagagtcttccactggattttttaa

SEQ ID NO: 700514 - DNA, 1735 bp, Homo sapiens
ttttttttgagacggagtcccgctgtttagcccaggccggattgcagtggcgcaatctcggctcactgcaagctccgcctcccaggtccacaccattctcctgcctcagccttggagactgagtcttgctctgtctcccaggctggagtgcaatggtgcgatctcggctcactgcaacctctgcctcctgggttcaagagattctcctgcctcagcctcccgagtagctgggatcacaggcacgcgccaccacgcccagctaaattttgtatttttagtagagatggggtttcaccgtgttggccaggctggtctcaaactctgacctcaagtgatccacccgcctcgccctcccaaagtgctgggattacaggcatgagccactgcacctggcctgaggcatgatttaaatatgcagtttattgtaattctttttggaaaagcacattttcctcatagagtagatagaagtaacatgcctccttggtcaagtctgccaaaatgaaatgtccctttttctgaaattcttcagttatgctacacccattatcttgccttattaaaatggaaacaactttcccctatgcgtgtcccattctgccatttatctgaattgggatagattgtgcctttccactcaatttggacaatgaaatgagtttcatttttatttatgggcttcataaatccgtttcacttgctgcttttcatgccccagttccacgctgttgtgttgggatttcccaccatgccaggcaattaaaccaaaaagtcgtggaaaaaaaatttctttacaaaactcttttaaatccaaaatatacataaatcatctccattccaggtccaatatatttaagggatgggatctttaagtcttttttttttttttttttttttttgagcatccaactccccagattaattcttttgctgtcatcatccagccctcatttgagctctaaaggttagttcaaaattccaggacggaaagaactctttaattttagatactatgtttccagacctgatgccaggcaygtgagaagataatacagtggccctgtggttgtggctgggggcgcctgaggaacagcagggggctcacagaccagcatcgccgaagttcagagcaggatgcgcttcggaaacctgaagcagcagcactaagagttccatgttctgtgtcagatttaaaaaacagacaaacaaacaaacaacaagccaatcccaatcacacagacctacagcattaaaggaagggtggagagatgatgtcctctctctcggtactttgccattcgcacaggaagtttctgttgtttctctaaatacagaactgaacagcaggcttctacctgataaggctacatccagcaggatccaatagatccaatccaatctgataaaatgtagggattgagttcaggtatagttcagtcctgttatacaaccacccaaggaaagaaactcactgaaactttacttacacagaaatgcaataatatgaattttgtgatagtccagacacaagccaaatcgaagtttactttatggctttctctgattcaatcacaccatatatctataggtatcaactagtggaagcaagcaaggaatgtttaaatctggccctactaggttataagttaaaagcaggaaactaataaaaatgggaaaggaatgtttgaatctgtcccttctagactgtaagctacttaagatcagaaaccattgt

SEQ ID NO: 700515 - DNA, 1163 bp, Homo sapiens
gacccaccgaggaaacagacttgtgtccctgggtagacgaggccaagaaatgaattgttagtcctagagcaggatgctgctgatagatgtggcccaacactctgatgaccagatgatgctatggagccatatattagccaggatttcccagagaaacagaaccaacaggataaagagaaagagagagagattataaggagttgatcacacagttatgcaggctgacatgtccaaaatttgcagggtgggccaacaggctgaagaactaggaagagcccatgttgcagttcaagtccaaaggcagtctgttgcagaactccctcttgcttggggaggtcagtattttttcttctattaagggcttcaactgattagacaaggcccacccactccatggaggacaatctgctttactcaaaatccctccattttaatctcacccaacaacaccctcacagaaacatccagaataatgtttgaccacatatctggacactgtggctcagccaagttgacacataaaattaaccatcatgagccagttgtgcccccaggacttaacgatatatatgtaatcttcttacttgtctcctgaccacgtgtttgcccatggcatggcagttgaggaaagagtgctgacttgagccaaaattcctgggacctatcatatctggctgtgtggcctggggtaacttaacttctctgtgcctcagtttcttcatctgtaaaagggagcaattctatctcatagaattaatgagatataagagtaaatcgggtaaagcacttagaatgttgcctagcatatggtagagtgcctgggcccattttacagctggagatgtgaaggtattaggcagctctagagttacatagccgagaaaaartgtacaaaatttcttttaactctccatgatgttcttccaagcatagcataaatccctcaccactgtagtccactgtatttccagttggaaactttcagcaaacatctggatgcccaactccatcctcctctctgctgtgcccctctccctcggtacaaatagctccccttgaacaggttccagttctcaaacctgacatccctgatccaggcctggtaccctggcaatacagcaagccgcaggtgaaggatatatgcaaaaagagaaaaaagggtt

SEQ ID NO: 700516 - DNA, 1163 bp, Homo sapiens
gacccaccgaggaaacagacttgtgtccctgggtagacgaggccaagaaatgaattgttagtcctagagcaggatgctgctgatagatgtggcccaacactctgatgaccagatgatgctatggagccatatattagccaggatttcccagagaaacagaaccaacaggataaagagaaagagagagagattataaggagttgatcacacagttatgcaggctgacatgtccaaaatttgcagggtgggccaacaggctgaagaactaggaagagcccatgttgcagttcaagtccaaaggcagtctgttgcagaactccctcttgcttggggaggtcagtattttttcttctattaagggcttcaactgattagacaaggcccacccactccatggaggacaatctgctttactcaaaatccctccattttaatctcacccaacaacaccctcacagaaacatccagaataatgtttgaccacatatctggacactgtggctcagccaagttgacacataaaattaaccatcatgagccagttgtgcccccaggacttaacgatatatatgtaatcttcttacttgtctcctgaccacgtgtttgcccatggcatggcagttgaggaaagagtgctgacttgagccaaaattcctgggacctatcatatctggctgtgtggcctggggtaacttaacttctctgtgcctcagtttcttcatctgtaaaagggagcaattctatctcatagaattaatgagatataagagtaaatcgggtaaagcacttagaatgttgcctagcatatggtagagtgcctgggcccattttacagctggagatgtgaaggtattaggcagctctagagttacatagccgagaaaaaatgtrcaaaatttcttttaactctccatgatgttcttccaagcatagcataaatccctcaccactgtagtccactgtatttccagttggaaactttcagcaaacatctggatgcccaactccatcctcctctctgctgtgcccctctccctcggtacaaatagctccccttgaacaggttccagttctcaaacctgacatccctgatccaggcctggtaccctggcaatacagcaagccgcaggtgaaggatatatgcaaaaagagaaaaaagggtt

SEQ ID NO: 700517 - DNA, 628 bp, Homo sapiens
ttcaataacaggaatttgttgtctcacagttctggaggctagaagcttgaactcaaggtgctggcagggtcgtgttccctatgaagacaccagggaaggatctgttccaggtctctatccgaggtcctggtggttccttggcttgtggcagcatcactccaatcttcgcgtgatgttttccctgtgtatgtgtctctctctgtgtccataattccccctttttgtaaggacagcagttctactgggccagggcccacttaataatatcattttaacttgcttacctctgtaaaatcctgyctaaataaggtcacattctgaggtactggtggttaagcctcaaacatatctttttagggaggatgcaattcaacccataacacatggccactgggaacatggagacctggtattgagatggtggagctgggatggctgagttgatgcagagagggaagctgccctggaaagttatccagattgcttgaatacttcaaagtgggataaataaacttttcttaagccactggcatttggggagctgttggttttcacggcatagcctagcctagccacataatgatacaagaatattttatgtaaaaatctatactgcttccttggatga

SEQ ID NO: 700518 - DNA, 628 bp, Homo sapiens
ttcaataacaggaatttgttgtctcacagttctggaggctagaagcttgaactcaaggtgctggcagggtcgtgttccctatgaagacaccagggaaggatctgttccaggtctctatccgaggtcctggtggttccttggcttgtggcagcatcactccaatcttcgcgtgatgttttccctgtgtatgtgtctctctctgtgtccataattccccctttttgtaaggacagcagttctactgggccagggcccacttaataatatcattttaacttgcttacctctgtaaaatcctgcctaaataaggtcacattctgaggtactggtggttaagcctcaaacatatctttttagggaggatgcaattcaacccataacacatggccactgggaacatggagacctggtattgagatggtggagctgggatggctgagttgatgcagagagggaagctgccctggaragttatccagattgcttgaatacttcaaagtgggataaataaacttttcttaagccactggcatttggggagctgttggttttcacggcatagcctagcctagccacataatgatacaagaatattttatgtaaaaatctatactgcttccttggatga

SEQ ID NO: 700519 - DNA, 592 bp, Homo sapiens
cccgagtagctgggactacaggtggccaccaccacgcccggctaattttttttgtatttttaacagagacggggtttcactgtgttagccaggatggtctcgatctcctgacctcgtgattctcctgcctcagcctcccaaagkgctgggattacaggcgtgagccaccgtgccaggctgtttttaattttttgcagagacagaagtctcactttgttgcccaggctggtctcgaactcctgacctcaaggaatcttcctgcctgggcttctcaaagtgttgggattacaggtgtgagccacagtgcctagcctgatctttttttggatgctcgtcttttcttcatttaaaccactgattttgtaaaaatgtacacttccaatcatatgactcctcttgccctttatttcctagttcctggccagagggagtcttgtgtccatattttctcttaacttgctcctctcgttcatgtcaggttagcaggtgcagaattgccttctttggctattacaaattcaaagctgccctggtcacttattttaagttgtttgtcacttctactttgccaacatatttttcttagctggtt

SEQ ID NO: 700520 - DNA, 1525 bp, Homo sapiens
catcatccaggctaagggaatagctagagcaaaggccctggggaatgtttgaggagcataaaggaagccattgaggctggagtggagtggagtgagtgaggggaaggggaaggagatggagccaaagacagcagggctcctgcgtgccctgccttgtgaaggcattggagaaggtttggcctctattttcaaccaccactgttgactttgcccctacctcttgattgtcacattgcagtgttttaaaaagaattccacaaaatcctgtggaatctaggggataactggcaaatagaattgggtggaattctcaggctgaatatggactttgttcattttcccagctgaaactacctagtagctgcagagtagagtagagatgcctctgtgctagtaggtctgggtttgcaatcccagtgctgccattttcaagctgtgtgacctgaggcagtctgatgctcctctctgaacctgcatttcctaagctctaatgtggatgttgtaatcagtacttcttatgggctgaattgtatctcctcaaaattcatgtgttgaagtcctaacccccagtatcacagaatatggtagggtctttaaagaggtaatccaagtaaaatgaggtccttagagcaggccctgatccaataggactgtccttattagaagaggaaacttggacacagatacacacagagggagcaccgtgtgaagacacagagaggagatggccagctaccagccaagcagagagcccttactgtaaaccaaccctgccgcatcctgatctcagaattttggcttccagaactgtaaggaaacacatttctactgtttaagccacttggctgggagtacttggttatggcagcctgagcagactaaaccagcacctcaaagagttgttatagggtatgcttagtggtaactggttcctaaaggccttgctttctaaggctgactcctcaccctgcaaggatgcattctccccactggcagatatgcaaccaggaacaggcattaacacgctttattcccagagttttaatattttccattgcataaaatatttgttcatgaaaatgacaaaattgctattagattctatcaccacatctctgttgattttactttctgcaaacacatacaagtaatgtaggcatacagttaaaaatgaaaccttatcctgtagttccagctactagggaggctgaagcaagagaatggcatgaacctgggaggcggagcttgtcgtgagcccagatcaggccactrcactccagccggggcaacagagcgcaactccgtctcaaaacaaacaaacaaaacaaaacaaaaaaaacttatagacaagtacaaaatgagaagaaaaagtccctttcccttcatgcctctacttcctgctgtattctcaaaggtaagcactgattacagtttacttatggatctttccaggaaaatattttatgcatttatcagaaaatgtaagtatatgcatcctttaaaattctgcataaatcaaactctg

SEQ ID NO: 700521 - DNA, 1525 bp, Homo sapiens
catcatccaggctaagggaatagctagagcaaaggccctggggaatgtttgaggagcataaaggaagccattgaggctggagtggagtggagtgagtgaggggaaggggaaggagatggagccaaagacagcagggctcctgcgtgccctgccttgtgaaggcattggagaaggtttggcctctattttcaaccaccactgttgactttgcccctacctcttgattgtcacattgcagtgttttaaaaagaattccacaaaatcctgtggaatctaggggataactggcaaatagaattgggtggaattctcaggctgaatatggactttgttcattttcccagctgaaactacctagtagctgcagagtagagtagagatgcctctgtgctagtaggtctgggtttgcaatcccagtgctgccattttcaagctgtgtgacctgaggcagtctgatgctcctctctgaacctgcatttcctaagctctaatgtggatgttgtaatcagtacttcttatgggctgaattgtatctcctcaaaattcatgtgttgaagtcctaacccccagtatcacagaatatggtagggtctttaaagaggtaatccaagtaaaatgaggtccttagagcaggccctgatccaataggactgtccttattagaagaggaaacttggacacagatacacacagagggagcaccgtgtgaagacacagagaggagatggccagctaccagccaagcagagagcccttactgtaaaccaaccctgccgcatcctgatctcagaattttggcttccagaactgtaaggaaacacatttctactgtttaagccacttggctgggagtacttggttatggcagcctgagcagactaaaccagcacctcaaagagttgttatagggtatgcttagtggtaactggttcctaaaggccttgctttctaaggctgactcctcaccctgcaaggatgcattctccccactggcagatatgcaaccaggaacaggcattaacacgctttattcccagagttttaatattttccattgcataaaatatttgttcatgaaaatgacaaaattgctattagattctatcaccacatctctgttgattttactttctgcaaacacatacaagtaatgtaggcatacagttaaaaatgaaaccttatcctgtagttccagctactagggaggctgaagcaagagaatggcatgaacctgggaggcggagcttgtcgtgagcccagatcaggccactacactccagccggggcaacagagcgcaactccgtctcaaaacaaacaaacaaaacaaaacaaaaaaaacttatagacaagtacaaaatgagaagaaaaagtccctttcccttcatgcctctacttcctgctgtattctcaaaggtaagcactgattacagtttacttatggatctttccaggaaaatattttatrcatttatcagaaaatgtaagtatatgcatcctttaaaattctgcataaatcaaactctg

SEQ ID NO: 700522 - DNA, 632 bp, Homo sapiens
ttatggagacttctaggcaagcagcatgttcctaaaagctaagactaatttaaatctctaaactaaaaaagtagaatggtttgaccccaccattttgactagagatatttcaattctcatagtgaagattaataatacaaataatccacgcaaaatggataacggttaaaactatatgtgatacaacttacgatgaccaaaaattgttggaagaaaaatattttggaaaatattttgttgtgtttaatttgatcctgaaaagttgacttaaagaaatactgatccctaaagaaaacttacgatagcagaatctgtagtcagttaattttgatgtggcccaaaacagagtcatttaaataaaaaaaaatcctgataaaatagttttggtgaattaaaaataagagtygatgagctagaggctgggcatggtggctcacatctgtaattccagcactttggcaggccgaggcaggtggatcacttgaggccaggagttcaagacccacctggccaacatacaaaaagtagccaggcatgggtgaggcatgtctgtaataccagctactcaggaggctgaggcaggagaatggcttgaacccaggaggtggaggttgcagagagccgagatgatg

SEQ ID NO: 700523 - DNA, 632 bp, Homo sapiens
ttatggagacttctaggcaagcagcatgttcctaaaagctaagactaatttaaatctctaaactaaaaaagtagaatggtttgaccccaccattttgactagagatatttcaattctcatagtgaagattaataatacaaataatccacgcaaaatggataacggttaaaactatatgtgatacaacttacgatgaccaaaaattgttggaagaaaaatattttggaaaatattttgttgtgtttaatttgatcctgaaaagttgacttaaagaaatactgatccctaaagaaaacttacgatagcagaatctgtagtcagttaattttgatgtggcccaaaacagagtcatttaaataaaaaaaaatcctgataaaatagttttggtgaattaaaaataagagttgatgagctagaggctgggcatggtggctcacatctgtaattccagcactttggcaggccgaggcaggtggatcacttgaggccaggagttcaagacccacctggccaacatacaaaaagtagccaggcatgggtgaggcatgyctgtaataccagctactcaggaggctgaggcaggagaatggcttgaacccaggaggtggaggttgcagagagccgagatgatg

SEQ ID NO: 700524 - DNA, 991 bp, Homo sapiens
ttcctttaaaagctacagggaataatcacagtgctgagggtagactcagtaatactacctgctatggtgtgactgtgtccccaaagttcatgatccccaatgcagaggtgttgagaggtaggacctctaaggggtgattacatcatgaaggctctgccctcacagatggattaacgctgttactgagggggtgggttccttataaaaggatgagttcagcctccttccttctcttccttcccccctcctcttcccccaccatgtgatgccctctgctatgtaatgatgcagaagaaggtcctcaccagatgccagccccttgatcttggacttcccagcctccagaaccatgagccaaataaacttctgttggttacaaattacccagtttgtggtattctgttacaggcgcataaaatagactaacacacgacctttccaagcaaactgagaagttgggagactagttccatttactaacaattatttaaattgtcacaagctgttgaaaagagttataggttaataggtttattttcataaacaacaaaatgcccagaattttccttctccaaatactcaaattaaatattattttcagtctcctgcatcaataaacatttggtcagagatggtcccaattagtcaaatggacttgtttgaatttcatcccttttatgtaattctctaggagagatgctaatgaaaagtggacagaggtgaatccccaagaggaaggacaggcaagaaaacgagataaggcacaaactgataattcaatcacaaaagatgagatggctgaacttatacaaccaaactgttttctttctttctttyttttttttttttttttgagacgagtcttgctttgctgcccaggctggagtgcagtggcgcgatccacactcactgcaagctccacctcccaggttcacgccattctcctgcctcagcctcccgagtagctgggactacaggcacccaccaccac

SEQ ID NO: 700525 - DNA, 605 bp, Homo sapiens
tatttttaaaactaagaaaacwcactaaaatgttaacagtggttatctccagggtaagtcatatattcatgtgattttttaaagtattttttatattttccacatgtatttttataatctggaaaagtcataaacttttaaatatacacagagaaaaagactaggaggaaatctatcataatggttagtggctataggattcagagtaactactttattcctccacttttatagtactttcagtaatggtcatcttgtacttttatcatcacaaaagcatttttccccttgagacaaagaggctggcagtggataagacccaccagctaaaagcccagccctggaattgaaagttaaagccatactgtgtacagacataattgtgcatgcattcccagttgaagtaaaatctgtcaaacagggtctacttgttttgctgcaggaatgacatgaaagacattttctgtaaaatttctgaggcatgtccatctttgggaatgacttaccactatttctaaggctatgaggtcatcatttttgcctgtgacatattgctgtcaccaacgtgagaggccagggaccctcctgtcttgctcaaacacctc

SEQ ID NO: 700526 - DNA, 1225 bp, Homo sapiens
agaacactttggacaataactgataaactatgtaactgaatgatcttttgatgaggtctaatttatactataattcattttttagatgtttaaagtaatgtattatggtaatgtataatgcacttagtttctatgaccaaaacataggaataatttctctgtttaaatggataatttattttttgtataaattataatgattttaaagccctataagactcacagttttgttattattatttaaattttcatagaatattctttttccaaacaataaagtacaaagggaggaggctttaaactaatagaaatttatgttcaaatcccaactctgcagctggcagtgtgagtctgaatgataattcctacatcaaaggactgtggtaaggatataataacacgtgaatgttgccgtctagttwtttgtttgttatctgctccttccattagaaaccaatcccaatgacagaagagcctgatatatagtaggtgctcagaaatcatttgttgaatgaatatgatcagcttatttttctgataagaaaagatttaagctaatttttctatattttaatgtaactcaccttaaatacttgaggaaaatatttcccgggaaggaaaatgtcaagaggaagcagaaagcattcttgtctttcttctttcagatgcaggaaagtaagactgcacttggtgatgagatatgcatattatcaacaaattaattgtattgacaggtttatcaaagagtagtctggcaatgtcaaaaacaactgggcatataactctgaagacttacgacaattagatcagttaattttgtgtttttttaaatggcccatgatgtggctggtggaaagtctgtatttgttgggttgtacattcttaggccccctcatggtttttagtcactaatacaaatatgaaaagtaacaaggattacatcatgcatttattaaatacataattattgagcaccaactaattgccaggaaatgttccactcattggggatactgtggtgaacaaaacaatcaaggctgctaccctctgtatttaatgtaccatgatgaacaataacacataataaatctaaaaacaaacacttcagaaaggaaatagtgaggcatgttattctgaaaaataaaataagagatatgctagtaggtgactgaaggctgctttagattgggtgccagagaagacctccctgacaagtgttcttcaa

SEQ ID NO: 700527 - DNA, 1056 bp, Homo sapiens
tgtggcatcatgagggcccaacagtttagaaaacagtgggacagcctgttgccctgcagccaggtgataatccacagtaaccaaaataataacaaatattcatgaaaccactgtctttctttttcagctcattattgaatatttgcactgtatttattmtttctgctgcaaagaaagtaagaaattaccaaccaatagatcatgttcttatcaagtgccaggcaaaaataattcttataactacacactaggaagagagtaggaaactggtaggaagggaccaaaatgttatacaacaaaatactatgcacgacaaagatatggtatactatagaaagcagattatttttaaagaagcgatatagacttttctgcaaatgttaaaaattgattcttattacttgagaggaagacaacttgctccaattctaaaatggctttaaatcattttctctttttaccagtcaactgctttcctacaggccaataatagcattaccaaccgggacaaccatgagagtctccttactcacagttgtccaaagcctttaggcttcatactgtggaatgtatcatctactttttaccagcattatcttccagaacctagagcaaataacttctcattactactaaaaacaaaacaaaagcacaaccaaaaacaaaaacacactcttccagagcttcccattacctagagaattagtctaacctcttttatagagtttttaatattctctaaacatctgctcaaaattattcacttccctgcattctaattaccttctgcaccaaattctacagttctcaaacacactgtgcatcttcacaatctttgctcatgctgaagcctctgcctcagacgcatttctgctaattctccatctgacgataacttactgcccttttaatgttagcatttttgccacagttagatctattaattttattggaatcaactttgccctatagagaggtttctgaaagtataacttgccaccggtgtccgtgctattaaaaacactcatgcagagaatgcatgttgacacaccttgg

SEQ ID NO: 700528 - DNA, 2504 bp, Homo sapiens
ctgctttttctgattacaaaactaatagcttgtagtaaaaaaaaaaaaaaactattatagaaatgcaccatatagaaagttaaagttctccataatccctacatccagagaaaaccaactgttacccaacatcacactcttcttttttctttatattgcagtatatgtgagtaaggatgtttcattaagttacaatacttgtttctcaaaagctctcagcagagcctcctggcttaaagctaaacatttgcagcataaactaaacaaagactggtttgtctgtcttcccatcttgttccaagcatgagttaagatggatggtcttcctctagaaaatattcatttagctcaaagacaaattaaattatgaatacatgccatatttctctatcataatcacttattaatttaacctgacaaagctataaaaaaaggaaattaaccacttaaaaaatagcacaaaataaaatgtgcggcggaaaaactgtgtcaagcatcttacatgctgagggaaggatgtttaatcatctcagaaatctggttaacatagtcctataaaacactgtcaaactttgaaataatgttctattgttaaaggagactagagaatgaagcaaacattagctgtgctattattatgtattctggttagggattatgggccattctcacttaaggtcatcttaagtaggtaaccatttgttcagccattcagacaataggacaatacatatatcaaaacctcccttgagattacgaactaaattattaacagaaacaagtgaaatatacagcaatagggaaataattaagtcaattacagaacattaacttgatatgttatacaaccactgaaaataattagtaaaactaatatggaaaatggtaacattttaaattcactacaattacaggattataaaaatgtatacataatgacaatgcttaagagagatctgaaatagtaaaaatactggaatagagggacttattgactttcctatctattaatgtaagctaaagtaatttaaatgttacagtgaagtggaaatactgctaataaaataatctattctttttccccagcattccttttcaaactccttttcatagttatgtatgaaaataaagatacggctgggtacagtggctcatcccagcactttgagaggctgaggcgggcagatcatgaggtcaggagttcgagaccagcctggccaacatagtgaaaccctcgtctctactaaaaataaaaaaaaaattagccaggcatggtggcgggcacctgtaatcccagctactcaggaggctgaggcaggagaattgcttgaacccgggaggcagaggttgcaatgagctgagatcacgccactgcactccagcctgggtgatggtgcaagactccgtctcaaaaaaaaaaaaaagaaaaaaaaaaagaaaataaagatatatgaaataatgacatgaaatgatcaacacttcccaaaaacacatacccctttcttgttctcagtgaatcctacagtttcagggtccaaaatacattttttctcactttataactaaactaaaagctcttgcatttttcaaaagaaaaatgttaccaagggcttttgccattttgttaaacctagattttaaaagtcctgggttcctgtaatcccagcactttgggaggctgaggcgggtggatcacagggtcaagagatcgagatcaccctggccaacatggtgaaacctcgtctctactaaaaatataaaaataagctgggcgtggaggcacgtgcctgtagtcccagctatttggaaggctgaggcagaaaaatcacttgaactcgggaggcagaggttgtggtgagccgagatcgcgccactgtactccagcctgatgacagagcaagactccgtctccaaaaaaaaaaagtcctgggtaatgtatcgagaccttgtctcaaaaaaaaaggaataaaaagtccactattaaactaaagaataaattagttgaaaataaaagccactgttaaaacgaagaaaaaaactttcactatkttactgctaataattaatacaggttgtatatcccttaactgaataagcgaccagaggcatttcaaggtttctggattttggaatatttgcatttatataggttcagcatccctaaatctcaaaatccaaaatgctccaacaggcacttcctttgagtgccatgctggcgctcaaaaaagtttcagatttcagatctttggattagggatactcaatatgtagttcttttgataaaaatgttaggacagaaagtaaaagaactactgctagaaaccagaccaaggtgggctaaactttctagtaaagaaggaaatactaagcattatctatggcatcctaagatttttatttatttatttatttattttagacggagtcttgtgctgttgcccaggctagagtgcggtggcactatctgggatcactgcaagctcagccttccgggttcacgccat

SEQ ID NO: 700529 - DNA, 2504 bp, Homo sapiens
ctgctttttctgattacaaaactaatagcttgtagtaaaaaaaaaaaaaaactattatagaaatgcaccatatagaaagttaaagttctccataatccctacatccagagaaaaccaactgttacccaacatcacactcttcttttttctttatattgcagtatatgtgagtaaggatgtttcattaagttacaatacttgtttctcaaaagctctcagcagagcctcctggcttaaagctaaacatttgcagcataaactaaacaaagactggtttgtctgtcttcccatcttgttccaagcatgagttaagatggatggtcttcctctagaaaatattcatttagctcaaagacaaattaaattatgaatacatgccatatttctctatcataatcacttattaatttaacctgacaaagctataaaaaaaggaaattaaccacttaaaaaatagcacaaaataaaatgtgcggcggaaaaactgtgtcaagcatcttacatgctgagggaaggatgtttaatcatctcagaaatctggttaacatagtcctataaaacactgtcaaactttgaaataatgttctattgttaaaggagactagagaatgaagcaaacattagctgtgctattattatgtattctggttagggattatgggccattctcacttaaggtcatcttaagtaggtaaccatttgttcagccattcagacaataggacaatacatatatcaaaacctcccttgagattacgaactaaattattaacagaaacaagtgaaatatacagcaatagggaaataattaagtcaattacagaacattaacttgatatgttatacaaccactgaaaataattagtaaaactaatatggaaaatggtaacattttaaattcactacaattacaggattataaaaatgtatacataatgacaatgcttaagagagatctgaaatagtaaaaatactggaatagagggacttattgactttcctatctattaatgtaagctaaagtaatttaaatgttacagtgaagtggaaatactgctaataaaataatctattctttttccccagcattccttttcaaactccttttcatagttatgtatgaaaataaagatacggctgggtacagtggctcatcccagcactttgagaggctgaggcgggcagatcatgaggtcaggagttcgagaccagcctggccaacatagtgaaaccctcgtctctactaaaaataaaaaaaaaattagccaggcatggtggcgggcacctgtaatcccagctactcaggaggctgaggcaggagaattgcttgaacccgggaggcagaggttgcaatgagctgagatcacgccactgcactccagcctgggtgatggtgcaagactccgtctcaaaaaaaaaaaaaagaaaaaaaaaaagaaaataaagatatatgaaataatgacatgaaatgatcaacacttcccaaaaacacatacccctttcttgttctcagtgaatcctacagtttcagggtccaaaatacattttttctcactttataactaaactaaaagctcttgcatttttcaaaagaaaaatgttaccaagggcttttgccattttgttaaacctagattttaaaagtcctgggttcctgtaatcccagcactttgggaggctgaggcgggtggatcacagggtcaagagatcgagatcaccctggccaacatggtgaaacctcgtctctactaaaaatataaaaataagctgggcgtggaggcacgtgcctgtagtcccagctatttggaaggctgaggcagaaaaatcacttgaactcgggaggcagaggttgtggtgagccgagatcgcgccactgtactccagcctgatgacagagcaagactccgtctccaaaaaaaaaaagtcctgggtaatgtatcgagaccttgtctcaaaaaaaaaggaataaaaagtccactattaaactaaagaataaattagttgaaaataaaagccactgttaaaacgaagaaaaaaactttcactatgttactgctaataattaatacaggttgtatatcccttaactgaataagcgaccagaggcatttcaaggtttctggattttggaatatttgcatttatataggttcagcatccctaaatctcaaaatccaaaatgctccaacaggcacttcctttgwgtgccatgctggcgctcaaaaaagtttcagatttcagatctttggattagggatactcaatatgtagttcttttgataaaaatgttaggacagaaagtaaaagaactactgctagaaaccagaccaaggtgggctaaactttctagtaaagaaggaaatactaagcattatctatggcatcctaagatttttatttatttatttatttattttagacggagtcttgtgctgttgcccaggctagagtgcggtggcactatctgggatcactgcaagctcagccttccgggttcacgccat

SEQ ID NO: 700530 - DNA, 843 bp, Homo sapiens
ttgaaaaacagaaatcagatagaaatgaaaagccctgtcactttcaaggtgctatgtagtacgaccagccataagcttctgtgtcattcaggatttaagacagctgcaatgttactactcaacagcagtacaaaaaccaagacagttctcaatacctgctttcctgctgctactcagctcatctgctgaaagcttaaaaagaataaccttcttgaaagtcgtgttttgagtaactattgctttgtgagatgcagagtttgacagaaaattaaatccctacttccatggctgtgctgagtaaaaaaacagaaaactcaaagaggaaagcttattaggttatccacccaaaagagcatattcgctaaaggaattccaaagggtgtgtttcagtaaagacaaaaaaaaatctaacacatacacaacactaattactaaaaggaagaaatctgaaagcagacacaatgtataatgattttaacagagtagatgttgctgttcacttcccaagaaaatggggtatagtgtactwaacactgaagcctaatgagagtaacctcgaaactgttaccagcccatcccaagcagtgaattttaagaaaggtaagtacagctttaatcattcatttcaaacaatgtctactgtatccaaaaaaactactatcctaaaggtatttgcaagattttttttctttcttccatttaactctcttcttcccaaaattcacagaaaataaaatacatgacaacagtccagtatagcttagtgttgaatcttcatggtctctagaggcaggcccctcacacttacagctacagttgtgggcaaagttgtgaaacaagctc

SEQ ID NO: 700531 - DNA, 768 bp, Homo sapiens
tttttcatgatttggcacacagcatagcaggcagcattgccaagatgtttttcatgttgcagaaaaactgtaacagatggaggtggtgattgtgaagcacttatttaaagtgttagtaatgaatcactatagcttgaaactgagtcagttatccatactaagggaagttgaagaacattctaatagcttctaataaaatacgtaatcaggcacctgaagagaactgactttgagtggctctcccattactgttaccctagccagggcccttagaatttattcttaggggctaaagtcttttaaaagcatgcatgcatgtgtgttttctcttttctaggaacttgaaattatgtagtagatgtcactagaattcttgaaatttgtcttcaagtcatggcagtatttcagtatcgctcctttgggattgcctgagtgatactcaagagttagactagttttatctgggttctttgaagaacyggggacacctcactggcttatgttgaatttctgcactgcagggaccaactataaatggtgtttttggttttttacgtgttaagagctttaaaatgtaattcttcctatcattcatgcacaaatgttctcacacaaattgcttcacagattgataaaactttgaataatttttccctgaagaaatgttgaacttttctgcaagctgttggaattggagcgcgtgttgaaaggcttgatgggaccataactgtacagcctatttcttttaaaaaaaattatgatttctat

SEQ ID NO: 700532 - DNA, 768 bp, Homo sapiens
tttttcatgatttggcacacagcatagcaggcagcattgccaagatgtttttcatgttgcagaaaaactgtaacagatggaggtggtgattgtgaagcacttatttaaagtgttagtaatgaatcactatagcttgaaactgagtcagttatccatactaagggaagttgaagaacattctaatagcttctaataaaatacgtaatcaggcacctgaagagaactgactttgagtggctctcccattactgttaccctagccagggcccttagaatttattcttaggggctaaagtcttttaaaagcatgcatgcatgtgtgttttctcttttctaggaacttgaaattatgtagtagatgtcactagaattcttgaaatttgtcttcaagtcatggcagtatttcagtatcgctcctttgggattgcctgagtgatactcaagagttagactagttttatctgggttctttgaagaactggggacacctcactggcttatgttgaatttctgcactgcagggaccaactataaatggtgtttttggttttttacgtgttaagagctttaaaatgtaattcttcctatcattcatgcacaaatgttctcacacaaattgcttcacagattgataaaactttgaataatttttccctgaagaaatgttgaacttttctgcaagctgttggaattggagcgcgtgttgaaaggcttgatgggaccrtaactgtacagcctatttcttttaaaaaaaattatgatttctat

SEQ ID NO: 700533 - DNA, 624 bp, Homo sapiens
tgaggagttgatactgatagcttgcaagtcaaatgggaatcactaaaagtttttgaaatgaagactaamctgattaaatctttagacagaaaggattctcccagcagcatgaacagaatgaattagaatagaacaggagagactgatggccagaaatcatctaggacatcatggccccttgtaaagaaatgaaacggcaagggactaacgtcagtttgagaaagaagaatcaataaagtttggtgcccatgttagtcaaaagaggttagattatactgaggtaataaataagctcaacatttctgtggctttatgcaacagcaatggcaacgagaagtttgctttggtttacgtgacatgattcatgtggtttgtcagatagttctactccacacagtcactcaggaactcaggctgatgaaggctccaccatcttgtgactataccatctggaacacatgacttccttcgttactctggcagagaaagaaagactggcaattgtaggtggcttttcactccctcactacaaaaaaatatattatttctataaaatgttgccaaccaaaactagtcacatggctctacctaactgcaagggttcaggaaatgaagaagagtaaa

SEQ ID NO: 700534 - DNA, 1807 bp, Homo sapiens
ttttccttttcttccactgtctatagttttctgttaaggaggtcttwaaaagtgcacactcagcattttctaatttataagaattgtaaatttacaggaatttcaggaattgtactagaattgacataactctaaattatattaaaggaagctaaagaacatataaatcatgccaaaaatacttaggattgggagtactggatgcctcagggaattggtaatttgatacaaagcctgtcacctgttaaaatttatcctgggtcagtagtgactgaaaatcattatgacctgacaggtgttcaggatcgtgtgtaaactgaagtggtgaactcagtatagttcctatttgacacatgtatgcattactgaaaccactgcaacattaattgataactatgctggcaatcttgattgaggtgccaaggactaactggcctgaactcttttcacccctactaatgtgccttttaaaataggttcaagtgtgcttgtgtagcagaaaagtgtgttcggtcctgttcctctcactagattactttactcctaaaattgaccatctatatttcccacagtggctccccttattataacatcttagagttttgtttttttttttaccccctggcaaaatgttttgtctgtcttttgaataatcaaattagataaaacattaagttgcaggtacccacaggtataagcagttccatttccctacattctttccttggaatttaatttagaagcatgaatatgctcttaaatatacaagaattcacatcaatcttaattaaatattactgatttttttcaatgcagttaatatttgttattcaaaaaattgttgccttatgtacaagcgagtcagaaataaaataaatccactcaacctttcctagcggtagcaagtggaggaaaagagaaagaaaaggattgattctcactggtatcatacagtgaggagaacaacttctttttccttgctaacagatcatgatagtatgcaagtctacatacttacatttatccccagccatgccagcagcaagactttagccaggtgggaccataaaagaaacagacctttaataagaatctaataattttttaaattatatatactctagtgtctctccagcaagaacataattgtgctgcttacagatgacaggaatgctttttgtttagtcttctttaactagcaaactattctccctttttacaaatccttccagaatgctaaggaaagtctgaaaaaaacaaatcttaaacgtgtctgcgtataggcaaaaataatgatggtatgaaatttaaattggttttccaataggtgcaataaatgtaactatatgtcacaattttgcctcatggttagcaatatatctttgcaaaattgctaaccagggttatgggcataacttgtgaggatgggacaaaaccaatttatttgtagaatgaattcatgaattcattagcaatatgcatttataaactgagcagttcctagactcgacagtaacaaattgggctgattataactgaattattcagttttgctttgctgcttttgtataattatactggacattccccaaacattactttgtactctaccttaatagctttggtagtgctgtcttgtctacctggaatctgctctatttttttcttctttgttccctatcctttcatccatacctctcgtctgatcaagtaaattcctaacacatctttcaaggtttagagtatctgccattcttttctagacctctcaccatctctccccgctcatatccagtttccattatag

SEQ ID NO: 700535 - DNA, 786 bp, Homo sapiens
ttgagatatttttagatacataaatacttaccattgtgttataactgcctacagtattaagtacagtaacacactgcacaggtttttagtctgggargaataggctctctcatataatgtaggcatgcagcttataccatctaggtttgcgtaagtatactctatgatgtttgcccaaagatgcaatcccctgatgatatatttctcaggatgtatccctgtcattaagtgacacatggctatatatgaatatgttactgttagaaacactaaaggctagaattaatgattatcttcattttcaatatcatgataaaggaagaaatgtaaaaaatattggaaaagaaaaaacaagaactattactaacagataacgtgagttctcctaaacaaaaaataatcaattgaaaaacttttagatctgaccaaatctaagataaatatataccttacactattaacagtggttacctctgggcagagaagagagatgttgggttgggggataaaggctgacaattactttttaatcactgtattttgatattgtttgaacttttaccatgaggatgtatttgtaatattaaaaactaaactaggttaactctttacataacatttatttttaaaattttagcaaagcactatgtaagatgcttcactttgtgtattggatattttttataactgggacccattataatacatatatattacatttatatgtatatataatacaatatagaagaaatcacattttacattattttggatgctgtttgatag

SEQ ID NO: 700536 - DNA, 786 bp, Homo sapiens
ttgagatatttttagatacataaatacttaccattgtgttataactgcctacagtattaagtacagtaacacactgcacaggtttttagtctgggaagaataggctctctcatataatgtaggcatgcagcttataccrtctaggtttgcgtaagtatactctatgatgtttgcccaaagatgcaatcccctgatgatatatttctcaggatgtatccctgtcattaagtgacacatggctatatatgaatatgttactgttagaaacactaaaggctagaattaatgattatcttcattttcaatatcatgataaaggaagaaatgtaaaaaatattggaaaagaaaaaacaagaactattactaacagataacgtgagttctcctaaacaaaaaataatcaattgaaaaacttttagatctgaccaaatctaagataaatatataccttacactattaacagtggttacctctgggcagagaagagagatgttgggttgggggataaaggctgacaattactttttaatcactgtattttgatattgtttgaacttttaccatgaggatgtatttgtaatattaaaaactaaactaggttaactctttacataacatttatttttaaaattttagcaaagcactatgtaagatgcttcactttgtgtattggatattttttataactgggacccattataatacatatatattacatttatatgtatatataatacaatatagaagaaatcacattttacattattttggatgctgtttgatag

SEQ ID NO: 700537 - DNA, 655 bp, Homo sapiens
ggtataccattatttggaatgtacatgtagatagtctgagaacctaggctttgagaataaacattcatttgtaagtgataatttttttcactgatacaaatgtatattatttcaagattataatgaaatctgtacatggagctatggctatttaagaaaaaaattgttaaagcattaaaatttaaaaatttatattcaatgtgtaatttacataaaacagaaagaggatacaaattatatatattgaatcatcatcctttttgttagaaaaaaattatctacatttagaaaataatgctaacagtaaatacaataaaatagataaaggtaaatacaataaaatgtatataaataaaaataaatacaataacatatatagacaaaataacyatggttctacaactattactcaaggtcatacatatgaccatataaatatatatgaaataatatgcatttgagctcactcaaggcagagtactcatctcttaagatgaaaatataaacaaaatatatatatcctgtttgtcacagtatggaggctgcatgacatgagtagaatgggaggcactggtagaggggaggcactgctatggttcaaggttatacatatgaccttgagtaatagttgtagaactgtagttattttgtccat

SEQ ID NO: 700538 - DNA, 642 bp, Homo sapiens
acaccttgtggcattaagtcttgctttggttaaagccttatttcacataattgctaaaaactcatttttgtttaatatactacctatagtttaattatcrgcacttgtattttgtaacttgatatcttacctaggattgggaatttgggacatgacatgtactataaaagtcagtctatgtacatactgcttattgatgtgctgtgatatgagggaatctgaaatgtttcataaaaataaagcttaaaaattgtcttacactggataaaagtgatattaagatattatatctattgctcttctttagttggtattcaatatttttatattcttgttactgaaatattctttgaagaccctagttttttgttttatttatgtggggaggatacttaggaagctgtttgctaaattaagtaagtgttctgcttaccgtcagaattgtgaataaatcagatctcaattttttaaaattccctcgaatggaaaatttcagaggtacaaaatgtgaatttattataaaaaagtagattttataccatctgcacatctctaaataaagaaaataaaatgtaggccacaagacctaggaactaaatgacaaggcttggcctttttttttttttttgagacagagtcttc

SEQ ID NO: 700539 - DNA, 625 bp, Homo sapiens
ggctggaatgcagtggcgtgatctcggctcactgcaagctccacttcctgggttcacaccattctcctgcctcagcctcccaagtagctgggactacaggctcccaccactgcgcctggctaattttttgtatttttagtagagatggggtttcaccgtggtcttgatctcctgacctcatgatccgcccgcctcggcctcccaaagcactgggattacaggcgattmactgtatattttctcctgggatttctgtgtccatatataaaacatataaatacatatacacacacacacacatatgtatgtatgtatatattccctacatgtccatgtaaagtcttctgtacaatcttgcttcatgaaagcagtgaaaagtcattcttacttctttgtacctccatagccctgctggacagcctgtactgttgttcatgaccttaatttattcagccttgcatcatttattaatttagcttgttacataaatatgataaacatgatgctactggaagaataatcagaagtcattgtacagaatgaatttgtgtgaaaagaatttggagactgggcatggtggctcacacaagtaatgccaacactttgggaggctgaagcagtagga

SEQ ID NO: 700540 - DNA, 581 bp, Homo sapiens
gtgaactactttgaagtttgaaagcaacctgtgtaggtaagtctgatttttatttaatcattaaaatctttaagatctttctgttttttctttttaaattccacacaatatatcatgtaaggggtttctaaactttctgagatatgcactgtgagccagcaagtcttttcagccaaaaataaatacagaaataaaataaaactccctaatgtttagagatgatgagcaaagaattagataaaaaaacattaattaggatggcctgaaatggttttatacttagtacagacaataaaaataaatcattttctgtgagacttattcctaggcaaaagtgtcaatggattgatataaatatactaaatatgttgttgatttgttgatattacccttggagaaaatatagatgattataaacagttcattagtttttacatwtctttactaaaactctgtgtgtaaattaaatatagaagagacaaataatggattcccatcttgttagagcaaaggcttactctctcagtcagaagatgaaaaattggactttgttatttaggcacaaaccaatagattttgta

SEQ ID NO: 700541 - DNA, 1419 bp, Homo sapiens
tccttttgtcgttatgaagcaacattttccataaggttgtttttaactggtgatgagcgacacttgatttcttttcttttcttttcctgctttgtaactcagaagcccaattttaaattatgcgattcttcactttaaaactttttcacgtttctctaatgatttaagtctaacaatatttcctgcttagtttctagcctaaggcagagctgtggaaaacattataatttcctgcaggagttctatttgatgatgtagttcatatcattggaaaaaatcatttgtaaccctatttccataaacccgtttttgacattggggaattatatccagacatctttcctagcgaggctacactaaaggcaatacgctgttttactggttctttctcctgagcctgttagagttcatggaccacctgaatkggaatcacccttagatctttgttaaaaatgaagatcctggcatctcatacacaagattctaatttagtagggctgagatggaacgcaggctttccattttttaacaagcatcttcaggagtttcttctggatacctgcagtaaatatgagacacattggaaataaagtttccccatacatataatgtgtactcatagacaaaatcaagtggaaaaatgaggtaataatttgactattttttgatgaaaatctttataaataggcatatcttcttagaggatcctgcaactcattttgttacaaaattgcaactctcacagcctcatttttttccccctatgtggccatagtaatgaattaggagctcaccaaatcagtcaaatagttgttcacatttggaggtttttaaaatataactcataaattctttgatatctctcccttcaaaagaggcagcctaatacctcccttctcatgaatgtgggctgctggagagagagagagaagagacagagggaggggggggagagagagagagagagagagagagaagatcttgtgatattaattactttttacctttgttcattcccacttatttatttattggtctttaacattgtttgttattatttctttgttattgctaaatatttactgttggttttttgtttatttattttgagacagatgttggccacaagtgatggacttagccgccagcttggcatgtctaaggttgaccagacagctctggccagtcagtgtactgttcaggtccagcagagaggtgggatcttttgctaacagctggcaccagctagtcaattaggcaaatgagccacctttaaactggatccctaagccttagaaaaatcttcagaagactccagccctggctgacaccttggctgcaaccttatgaaagacactgagctgaaactgcccagcaaaactgtgcctgactatctaacatgcagaaactctaaaagcg

SEQ ID NO: 700542 - DNA, 1812 bp, Homo sapiens
gggagtaggaggaaacattttaagcaagtcacaaggtgcgtctgtggccccaattaccagaagacacgggtttttattatgccctggaagtcagtctgacctagatacagcaagccttaaactagtttcagctcacatgtctctgcgctgttaggtctgggatgtgtggcgacggggacgcgacgcccaggcacacagctgtacttggctggtttgttttcttcttttctcccagttggctcattcaccaaggtttactttcatgaccgctgctctcaggaaaatcctgcttctggattctcactcccgggatcccactctccctaacgtttctctaaggcagacaatctggtttcagccaacttgacaaacttgtagctttctcatcacaacagacaagtgatgaggacatttcggttttgtaccctatattctgcagcacaaaatgtcacgccagcctaaacgtatgaatgggatgggatattcattcaacacctgctcgcggcttctgtcactaaagaaacgtaaaagcagaagtcaaagaaatgagaaacgccttcacaaaaggatcccacaaaaggataaacctgtctcctctaaaatccttccctggaatatagtttgtagtgaataggacatgtatctaaccataaattattttatttgttcttccttttaaaacagagacagggtctcaccatgttgcccaagctggtcacgaactcctgagctcaagcgatccatccgcctcagcctcccaaaccaataaaatattttctatctcatgctactaaaccggaccctaggagctcaaggtattcacatctgctcacactaaaaaaaaaaaaaaattagagacaaccaacaaagatgacccagtctttctccttttctgtggtgacaagttttttaatatactgatactcaaatgacttcaagggatataaaaagaacagctgcagtgccttagaaaagcatcatgttaaaatttactagttttgggccaggcgcagtggctcgcgcctgtaatcccagcactttgggaggccgaggggggcggatcacctaaggtcagaagttcaaaaccagcctggccaacatggtgaaaccacatctctactaaaaatacaaaaaattagccgggcgtggtggcgggcgcctgtagtcccagctactcaggatgctgagggagggagaatcacttgaacccaggaggcggaggttgcagtgagatgagatcgcaccactgcactctagcctgggcgatggagcaagactcgatctcaaaaaaaaataaaataaaatttactagttttggtggaaaagagaaaacactccaaaattaagcgactatctagcaaattcttcattaattgtaaagtcgtgtcacatttcatcagtgatactgaagaagacctttacagcacctctcctcattccattcacctaaaacacccatcattcttaacagtttgtttcctcttcgaaagggaaaacacatttgaaaataaaatgactatataatatttataacaggtcggccaggcgcggtggctcacacctgtaatcccagcactttgggaggccgagacgggtggatcacaaggtcaggagatcgagaccatcctggctaacacggtgaaaccatccctactaaaaaacaaaaaattagctgggcgtggtggcaggtgcctgtagtcccagctactcgggaggccgwggcaggagaatggcatgaacctgggaggcggagcttgcagtgagccgagatcgcgccactgcactccagcctgggcgacagagcgagactct

SEQ ID NO: 700543 - DNA, 680 bp, Homo sapiens
  misc_feature 580, 581, 582, 583, 584, 585, 586, 587, 588, 589, 590, 591,592, 593, 594, 595, 596, 597, 598, 599, 600, 601, 602, 603,604, 605, 606, 607, 608, 609, 610, 611, 612, 613, 614, 615,616, 617, 618, 619, 620, 621, 622, 623, 624, 625, 626: n = A,T,C or G
  misc_feature 627, 628, 629, 630, 631, 632, 633, 634, 635, 636, 637, 638,639, 640, 641, 642, 643, 644, 645, 646, 647, 648, 649, 650,651, 652, 653, 654, 655, 656, 657, 658, 659, 660, 661, 662,663, 664, 665, 666, 667, 668, 669, 670, 671, 672, 673: n = A,T,C or G
  misc_feature 674, 675, 676, 677, 678, 679: n = A,T,C or G
acatttgcaacagatcttgagtcttcacccttctagtcggggtgagagaagagcggatggagatactcttattttacactattattttacatataaaatacactattattttacatataaaagtgtatatttcacatataaaatacactattattytacatataaaactgtctgatcctgcaggtgatttttcctgtctccccacttagatttatttgttcctcttataaagcaaaactgtaacttaaaaaaaaacaaaaaactagcctcctttccctgaaaagtagagtgaccttgtgtccccatttgtccaggagggtactagtctaagcattttgttctagtgtaattagtagcatccttcttactttaaaaaacatcctagttggctctgggaggccaagtcaggtggatcccttgagcccaggaatttgagaccagctcgggcaacatggtgaaaccccacctctgctaaaaatacaaaaattagccaggcacgctggcgtgcacctgtattcccagctacttaggaggctgaggcacgaggatcacttgagcccagaggtcaatgctgcagtgnnnnnnnnnnnnnnnnnnnnnnnnnnnnnnnnnnnnnnnnnnnnnnnnnnnnnnnnnnnnnnnnnnnnnnnnnnnnnnnnnnnnnnnnnnnnnnnnnnnnt

SEQ ID NO: 700544 - DNA, 680 bp, Homo sapiens
  misc_feature 580, 581, 582, 583, 584, 585, 586, 587, 588, 589, 590, 591,592, 593, 594, 595, 596, 597, 598, 599, 600, 601, 602, 603,604, 605, 606, 607, 608, 609, 610, 611, 612, 613, 614, 615,616, 617, 618, 619, 620, 621, 622, 623, 624, 625, 626: n = A,T,C or G
  misc_feature 627, 628, 629, 630, 631, 632, 633, 634, 635, 636, 637, 638,639, 640, 641, 642, 643, 644, 645, 646, 647, 648, 649, 650,651, 652, 653, 654, 655, 656, 657, 658, 659, 660, 661, 662,663, 664, 665, 666, 667, 668, 669, 670, 671, 672, 673: n = A,T,C or G
  misc_feature 674, 675, 676, 677, 678, 679: n = A,T,C or G
acatttgcaacagatcttgagtcttcacccttctagtcggggtgagagaagagcggatggagatactcttattttacactattattttacatataaaatacactattattttacatataaaagtgtatatttcacatataaaatacactattattttacatataaaactgtctgatcctgcaggtgatttttcctgtctccccacttagatttatttgttcctcttataaagcaaaactgtaacttaaaaaaaamcaaaaaactagcctcctttccctgaaaagtagagtgaccttgtgtccccatttgtccaggagggtactagtctaagcattttgttctagtgtaattagtagcatccttcttactttaaaaaacatcctagttggctctgggaggccaagtcaggtggatcccttgagcccaggaatttgagaccagctcgggcaacatggtgaaaccccacctctgctaaaaatacaaaaattagccaggcacgctggcgtgcacctgtattcccagctacttaggaggctgaggcacgaggatcacttgagcccagaggtcaatgctgcagtgnnnnnnnnnnnnnnnnnnnnnnnnnnnnnnnnnnnnnnnnnnnnnnnnnnnnnnnnnnnnnnnnnnnnnnnnnnnnnnnnnnnnnnnnnnnnnnnnnnnnt

SEQ ID NO: 700545 - DNA, 680 bp, Homo sapiens
  misc_feature 580, 581, 582, 583, 584, 585, 586, 587, 588, 589, 590, 591,592, 593, 594, 595, 596, 597, 598, 599, 600, 601, 602, 603,604, 605, 606, 607, 608, 609, 610, 611, 612, 613, 614, 615,616, 617, 618, 619, 620, 621, 622, 623, 624, 625, 626: n = A,T,C or G
  misc_feature 627, 628, 629, 630, 631, 632, 633, 634, 635, 636, 637, 638,639, 640, 641, 642, 643, 644, 645, 646, 647, 648, 649, 650,651, 652, 653, 654, 655, 656, 657, 658, 659, 660, 661, 662,663, 664, 665, 666, 667, 668, 669, 670, 671, 672, 673: n = A,T,C or G
  misc_feature 674, 675, 676, 677, 678, 679: n = A,T,C or G
acatttgcaacagatcttgagtcttcacccttctagtcggggtgagagaagagcggatggagatactcttattttacactattattttacatataaaatacactattattttacatataaaagtgtatatttcacatataaaatacactattattttacatataaaactgtctgatcctgcaggtgatttttcctgtctccccacttagatttatttgttcctcttataaagcaaaactgtaacttaaaaaaaaacaaaaaactagcctcctttccctgaaaagtagagtgaccttgtgtccccatttgtccaggagggtactagtctaagcattttgttctagtgtaattagtagcatccttcttactttaaaaaacatcctagttggctctgggaggccaagtcaggtggatcccttgagcccaggaatttgagaccagctcgggcaacatggtgaaaccccacctctgctaaaaatacaaaaattagccaggcacgctggcgtgcacctgtattcycagctacttaggaggctgaggcacgaggatcacttgagcccagaggtcaatgctgcagtgnnnnnnnnnnnnnnnnnnnnnnnnnnnnnnnnnnnnnnnnnnnnnnnnnnnnnnnnnnnnnnnnnnnnnnnnnnnnnnnnnnnnnnnnnnnnnnnnnnnnt

SEQ ID NO: 700546 - DNA, 1686 bp, Homo sapiens
ttctatttacctgaagtttccaatttaaacttgcagcctgatcttattttagcttttaattacaatgcactcaaaatatactgctaatttccttaatccattctaacttaaattttaatattaaaattgattaattaaaatcatttatgtaattaaacataatcttgataatttgggaaaaactagacatctccttgcctgtggttttctaccaagagcaatatcaccatgccttatggggacaataaaaactatgtggtccattttgtttgccatgatgatgaggggacatgactgtcaatccatgggggagtgccagagatgctacatatcattaattgcaggacaacgaggaaaaatacaaaattgtcctgtccaaagtggcagcagatggtccacagagctaccttcacttgcaggatactgaggagattcccctgcagaaaccctaagagctggtcccagcctctgtaaatatgcctctggtgacactgagctcattactcaccattgctaggcagctataatggaacatgtattctaatgttaggccaacatctgtcatctttttatttctacctatttgccttctggaacaacacagaaataactacctctccttctcaaagaatccttagttaagtatatttaatgaactctgatgtaataaagaccactttggtgtatcgaattttgcttgttttttactaaacttactcatctcaatatggtgttattagcagctccactatcaccctcctctaggaatatctctacgatgaaggagtgaaaagctgtttatccctaaagagctgtctcctatcttctttgtgatttcacatatctcctttttcagaaactctacttctctctccttccaatccattctgatgaataaattctatgctgcttagctgtctgaatgtgatcaagattagaattacagttgcagggaaaaccagataagtatgtactatatatctaacttaaactcactttgtgccagagggaaatgtgtgtgggctttatgttttcgttgtacaggtgatctctcttgctcttagctcacactaaggaaagaaaaggcaacatgcttagtgtatggttaggaataggtttcatgagtctagcccactgagttggcacaattgcctctaatgctgcattgagaataaatctcaggccaagttggactttaccaaaaaataacatcttaactattgaaagttattgcatagtctggtacagggcagggtcaatgtagttggtacatgtgacatgcatttaccaagattcataaagcagaataagcactggtttggagtcctgcaactgaagttcaaacttctggtatcagaaattactagtttagtgactttaaactatcaacatctctgcctacaattttctcatcagtaaatttggaataaaaaataacaatagttcccaattggsctattgtgtgaatcaattgaaataactctttcaaattctataaacattgagtgtaccttaatataccagatactctggtatcatgccaagaataaaatgataaatgagtcaaggtatgtgcccttgagaagctgagtcaaatggcagaaacagagaaataaacataattttaatataatacagtaaaggcattgataactgaatcacaaactgttatgataacacaaacga

SEQ ID NO: 700547 - DNA, 2016 bp, Homo sapiens
ttcactgattggctgattattttttaatgtataagatcatattactcatgaatttataaatgggaattatctgaggtcttggctaatgacctaaagaagcattcatttagagctttgtagaacctcttccaaggtaactgcatcatagaactaatttaaagtaaattgttagcttgagtttttacttggttgtttgtagttttgtctgctttaaaatttttgtttttaatcattttattagtgattacacagtaagaaatatacaagctaaaaactctgtagccagagcrggctagtgattatgaattttcaccagtaactttcttctcagtttccttgcaattgagatttattttttgttcatactttacactcatgatgtagctctttggtgttgtcatgacatggggagagtcaagtggtttcctcatgtaggcctttggttttatctcttgaccccattcccagaaagccttcaaaacagaactcggtttcaccttattcagcaacatctacaagatgtaagcatgaaatagtgctccttttagtcctctggtttcctgcatttacttagtctgtgacctcagagtatttcttaactgtcttaccagctgttatttttcatattttcagtagggtgattttttttctgcaagattaatctctttgcaacaatttttttttcttaaaacttaaatataggtatttggacctagttgataagacaatgaaataattatttgagaatcccctatgaagatatcatagataaaatatctgaggtaacctgtagattatttagattttaaaaagatatattgattaaatatattcctattaaatattctgataaaatgttttttatattgtgttatttttaaatttaacttgtaatggaaaaatggaaacataatagtgaattaacagttacataaacaagcaggaaatgaaaggttaaattttcatgccatgcattagaagtgaaaacacaggaaattgctttatcaataaataattgatggttatattaatcagaaaatgtaaaaacactatcatttttatgatacttctcttttattttatacagatttaccacataatacatacttgttaatttttagaagattgatatattctattcaaaataaactttcttcaagaaacaggtcatttaaaaatttatgactgaggcatctgagtcataaataataattcataagatagtcatgaattaaaaatctatatcaaagtttatttaaatttacatcacctttgagttctgtagttaatactttgtaacaaccaatacttagaatacaatttaaaatttattttcttcttatgaaatgcacttacacaagcattacatggctttgctaagaaatattttatgtatgagtctgagtctattttataggtctgatgaaaaatgtaaaatagagggcttacatggattaaggagggagactcaaatgttcagaggcccaaagtcatcactttacttctcatgttaataagagtatattcttcggttgtattatatagtgctttacaattgcaaagtaatgaacggtgtactctgtcattttttaattcctcttttctcaagctaaaatactttaatacttttaatgtttaaaaaacagctatggcttgcataaaaagtaacagtttttttaagggagttgatgatctgatacactcaagaaatatgaagtactactgatatatctgcatcttagtgtaagaattaacatacagttgaactgaaaattgaggttgtctttttgctcactttatcttttgctcattcaaagaaatgaggtaaatttatcttttctcattaccccttactggactcttcctaatctagtccacctgctgtgtctttgctgccagttatctctccaaggacaaagctggtatgatcactttgcttttcaaacacctattaaatcctcattgctcatagaaaaaagaaagcaaatgctatagattacgaagtgacacagccca

SEQ ID NO: 700548 - DNA, 1511 bp, Homo sapiens
taaaaaaatgagtggtaatattccaggttaagaagactagaaaagtaaagagtgyctagaactaatagaatttttgaactgaacttctgaagtgatagagaataactacataatctataatatatcttttctcctgatgcagaaagagtaaattgatatggaggacagcttatgtctctcttgattactatgtatttcctttctctgatttggacagtagcttctttggcttcaccctcctccagtcctagactaattacctggtcttatttactgtttttattttccactaccactgcctctaaagatatttgcccttttggtcccaaagcaaaaaatataaacaactgatttttaaggtcaagaaaatggtatggatatttggaaatgacctataataaagacaaacatttccatttggagctcaaactttctagctaagcaaaatattgcataagattttaatgtccaaataattggtctttcagagaattactcatcataccagattctccacaaaggagctattcctcacagtcaaacatggaaattctttaagactcattttactcacctgttcttccaaagaaaatcagtaaattataaacttaataaatactaaagtatacttcttcctgtattattgttttatacacaaatcttaagtaaaattcttaaaatttttagacaactcttaaattagctttagaattaatttcatgaattctcacaggtaaaaaatgcatttgactcttcatattggaaaaaacatatataagtatacatatattaccctcgctacacatacgcatacatacacatatacatattagagatacatgaaccttgatatcacacagacacacaatcttagtttttagaaatgaattaaccagtccagacttctccatgaactcaaatatagactacccttgtgggggaacttaccttaaatgaataagccaaataagtaatcgctttcattctcagaggagaaagactactgactgagaataatttaatctaaactttatgaaattgaataattgtcaaactattattaatgtaatgaaaatattgcttaagacctaaaggaatctttcttgtctctgactttcagaaatactgtaagatgtatattatataggataaattcttaataatagaaaataaatacagaatcatcagtatcaattgtattttcaagtaaatattttacaagaaaaacagaaaatagtgtttgcctgtaggttaatgctggcagcaagtctatatgtgacttagaaaaacaagctttgtcaaaaatatatatgataaatattggctgtgtgtggcctgataacaggttcatgcctattatcccaacactgggaggccaaggaaggagaatcacttcagcccaggagtttgagacccgcctgggcaacatggaaaggccccatctcttatatatattatatgtgtcatatatatcatcattttatgtataaatatatatggatataatgtga

SEQ ID NO: 700549 - DNA, 1511 bp, Homo sapiens
taaaaaaatgagtggtaatattccaggttaagaagactagaaaagtaaagagtgtctagaactaatagaatttttgaactgaacttcygaagtgatagagaataactacataatctataatatatcttttctcctgatgcagaaagagtaaattgatatggaggacagcttatgtctctcttgattactatgtatttcctttctctgatttggacagtagcttctttggcttcaccctcctccagtcctagactaattacctggtcttatttactgtttttattttccactaccactgcctctaaagatatttgcccttttggtcccaaagcaaaaaatataaacaactgatttttaaggtcaagaaaatggtatggatatttggaaatgacctataataaagacaaacatttccatttggagctcaaactttctagctaagcaaaatattgcataagattttaatgtccaaataattggtctttcagagaattactcatcataccagattctccacaaaggagctattcctcacagtcaaacatggaaattctttaagactcattttactcacctgttcttccaaagaaaatcagtaaattataaacttaataaatactaaagtatacttcttcctgtattattgttttatacacaaatcttaagtaaaattcttaaaatttttagacaactcttaaattagctttagaattaatttcatgaattctcacaggtaaaaaatgcatttgactcttcatattggaaaaaacatatataagtatacatatattaccctcgctacacatacgcatacatacacatatacatattagagatacatgaaccttgatatcacacagacacacaatcttagtttttagaaatgaattaaccagtccagacttctccatgaactcaaatatagactacccttgtgggggaacttaccttaaatgaataagccaaataagtaatcgctttcattctcagaggagaaagactactgactgagaataatttaatctaaactttatgaaattgaataattgtcaaactattattaatgtaatgaaaatattgcttaagacctaaaggaatctttcttgtctctgactttcagaaatactgtaagatgtatattatataggataaattcttaataatagaaaataaatacagaatcatcagtatcaattgtattttcaagtaaatattttacaagaaaaacagaaaatagtgtttgcctgtaggttaatgctggcagcaagtctatatgtgacttagaaaaacaagctttgtcaaaaatatatatgataaatattggctgtgtgtggcctgataacaggttcatgcctattatcccaacactgggaggccaaggaaggagaatcacttcagcccaggagtttgagacccgcctgggcaacatggaaaggccccatctcttatatatattatatgtgtcatatatatcatcattttatgtataaatatatatggatataatgtga

SEQ ID NO: 700550 - DNA, 1511 bp, Homo sapiens
taaaaaaatgagtggtaatattccaggttaagaagactagaaaagtaaagagtgtctagaactaatagaatttttgaactgaacttctgaagtgatagagaataactacataatctataatatatcttttctcctratgcagaaagagtaaattgatatggaggacagcttatgtctctcttgattactatgtatttcctttctctgatttggacagtagcttctttggcttcaccctcctccagtcctagactaattacctggtcttatttactgtttttattttccactaccactgcctctaaagatatttgcccttttggtcccaaagcaaaaaatataaacaactgatttttaaggtcaagaaaatggtatggatatttggaaatgacctataataaagacaaacatttccatttggagctcaaactttctagctaagcaaaatattgcataagattttaatgtccaaataattggtctttcagagaattactcatcataccagattctccacaaaggagctattcctcacagtcaaacatggaaattctttaagactcattttactcacctgttcttccaaagaaaatcagtaaattataaacttaataaatactaaagtatacttcttcctgtattattgttttatacacaaatcttaagtaaaattcttaaaatttttagacaactcttaaattagctttagaattaatttcatgaattctcacaggtaaaaaatgcatttgactcttcatattggaaaaaacatatataagtatacatatattaccctcgctacacatacgcatacatacacatatacatattagagatacatgaaccttgatatcacacagacacacaatcttagtttttagaaatgaattaaccagtccagacttctccatgaactcaaatatagactacccttgtgggggaacttaccttaaatgaataagccaaataagtaatcgctttcattctcagaggagaaagactactgactgagaataatttaatctaaactttatgaaattgaataattgtcaaactattattaatgtaatgaaaatattgcttaagacctaaaggaatctttcttgtctctgactttcagaaatactgtaagatgtatattatataggataaattcttaataatagaaaataaatacagaatcatcagtatcaattgtattttcaagtaaatattttacaagaaaaacagaaaatagtgtttgcctgtaggttaatgctggcagcaagtctatatgtgacttagaaaaacaagctttgtcaaaaatatatatgataaatattggctgtgtgtggcctgataacaggttcatgcctattatcccaacactgggaggccaaggaaggagaatcacttcagcccaggagtttgagacccgcctgggcaacatggaaaggccccatctcttatatatattatatgtgtcatatatatcatcattttatgtataaatatatatggatataatgtga

SEQ ID NO: 700551 - DNA, 1511 bp, Homo sapiens
taaaaaaatgagtggtaatattccaggttaagaagactagaaaagtaaagagtgtctagaactaatagaatttttgaactgaacttctgaagtgatagagaataactacataatctataatatatcttttctcctgatgcagaaagagtaaattgatatggaggacagcttatgtctctcttgattactrtgtatttcctttctctgatttggacagtagcttctttggcttcaccctcctccagtcctagactaattacctggtcttatttactgtttttattttccactaccactgcctctaaagatatttgcccttttggtcccaaagcaaaaaatataaacaactgatttttaaggtcaagaaaatggtatggatatttggaaatgacctataataaagacaaacatttccatttggagctcaaactttctagctaagcaaaatattgcataagattttaatgtccaaataattggtctttcagagaattactcatcataccagattctccacaaaggagctattcctcacagtcaaacatggaaattctttaagactcattttactcacctgttcttccaaagaaaatcagtaaattataaacttaataaatactaaagtatacttcttcctgtattattgttttatacacaaatcttaagtaaaattcttaaaatttttagacaactcttaaattagctttagaattaatttcatgaattctcacaggtaaaaaatgcatttgactcttcatattggaaaaaacatatataagtatacatatattaccctcgctacacatacgcatacatacacatatacatattagagatacatgaaccttgatatcacacagacacacaatcttagtttttagaaatgaattaaccagtccagacttctccatgaactcaaatatagactacccttgtgggggaacttaccttaaatgaataagccaaataagtaatcgctttcattctcagaggagaaagactactgactgagaataatttaatctaaactttatgaaattgaataattgtcaaactattattaatgtaatgaaaatattgcttaagacctaaaggaatctttcttgtctctgactttcagaaatactgtaagatgtatattatataggataaattcttaataatagaaaataaatacagaatcatcagtatcaattgtattttcaagtaaatattttacaagaaaaacagaaaatagtgtttgcctgtaggttaatgctggcagcaagtctatatgtgacttagaaaaacaagctttgtcaaaaatatatatgataaatattggctgtgtgtggcctgataacaggttcatgcctattatcccaacactgggaggccaaggaaggagaatcacttcagcccaggagtttgagacccgcctgggcaacatggaaaggccccatctcttatatatattatatgtgtcatatatatcatcattttatgtataaatatatatggatataatgtga

SEQ ID NO: 700552 - DNA, 588 bp, Homo sapiens
gcaacctccgcctcctaggttcaagtgattctcctgcctcagcctctgagtagctgggatatcaggcacgcatcaccaggcctggctaatttttatatttttagtagagatgagattcaccatgttggccaggctggtctcgaactcctgacctcaagtgatccgcctgcctcggcctcccaaagtgctaggattacaggcttgagccaccacgcccggcctcttcttccatttctaatccacatttcaagaaggatgtcttcatgcattgtctctacttttttcacttcttaaccatgccatctgctcccatagtactattctgatataattaaccataatcttcatattgccaaatccaatagamatttcttagttattcctctggcattttctgctgtatttgactttacaaatttctctcctctaaactgcattagatatttcttctctgtgttcccataatgccctatatacattcttatttttgcagttatataatgtatcataatgaaatgctcagaagtattatggtctaaatgggccccttaaaattcttatgttgaaacttaatcggcaatgtgatac

SEQ ID NO: 700553 - DNA, 1335 bp, Homo sapiens
tcagagcacagggaaaaatgtgcaaaaaagtagacagcagttcaaaatgcagtgtggaggtgagaaaggcagagtctaaaggagcaagcttcttatgccctggaatagttggattgtttkattgtattcaaattcattttttaattttgacagtgtgatgttttgatacatgtcatgtatacaccgtgtaatgatcaagacaggataattagtatacttatccctcagatacttattgattctttgtggtgagaacattcaaaatcctctcttctagttattttgaaatatacaatccattatttgttaactgtagtcatcatactgtgcaataattagaacttctaactgtaactttgtacattaaccaacctctccccattttcccatcttccctactgtccctagcttctggtgacccactattctactctttttttttttcttttttgagatggagtctcacactgtctccgtcaggagtgcagtggcgcgatcctggctcactgcaacctctgcctccagggttcaagtgattctcctgcctcagcctctcgagtagctgggattacaggtgcccgccatcacgcccagctaattttgtatttttagcagagacggggtttcaccatgttagccaggctggtctcaaactcctgacctcaggtatctgcctgccttggcctctcaaagtgttgggattacaggggtgggcaccgtgccccacctactattctactctttatgagatcaacttttttagattccatatatgaatgagatcatgtagtatcaaattcatcattttaaatattcttctgtatcatcaatttttaaaatattttcccacaatacttttgctcaccatccactttttgtaccccagaccgtccatctgagatcttttttttttccttcctgaactatatttgttttttgttttcttgagagtcccagcctctggagtagctgggactacagggaagtgccaccatgcctggctaattttttaggcatttttgtagaggcaaggtctcactatgttgcccaagctggtttcgaactcctggactcaagcagtactcctacctcagcctcccatagtgctgggactacaggcgtgagccactgtgtctggcctgaactatattctttggaagttcattgagaaagggtatatacctaaaggattataaaacatgctgctataaagacatatgcacacgtatgtttatcgcggcactattcacaatagcaaagacttggaaccaacccaaatgtccaacaacgatagactggattaagaaaatgtggcacatatacagcatggaatac

SEQ ID NO: 700554 - DNA, 1335 bp, Homo sapiens
tcagagcacagggaaaaatgtgcaaaaaagtagacagcagttcaaaatgcagtgtggaggtgagaaaggcagagtctaaaggagcaagcttcttatgccctggaatagttggattgttttattgtattcaaattcattttttaattttgacagtgtgatgttttgatacatgtcatgtatacaccgtgtaatgatcaagacaggataattagtatacttatccctcagatacttattgattctttgtggtgagaacattmaaaatcctctcttctagttattttgaaatatacaatccattatttgttaactgtagtcatcatactgtgcaataattagaacttctaactgtaactttgtacattaaccaacctctccccattttcccatcttccctactgtccctagcttctggtgacccactattctactctttttttttttcttttttgagatggagtctcacactgtctccgtcaggagtgcagtggcgcgatcctggctcactgcaacctctgcctccagggttcaagtgattctcctgcctcagcctctcgagtagctgggattacaggtgcccgccatcacgcccagctaattttgtatttttagcagagacggggtttcaccatgttagccaggctggtctcaaactcctgacctcaggtatctgcctgccttggcctctcaaagtgttgggattacaggggtgggcaccgtgccccacctactattctactctttatgagatcaacttttttagattccatatatgaatgagatcatgtagtatcaaattcatcattttaaatattcttctgtatcatcaatttttaaaatattttcccacaatacttttgctcaccatccactttttgtaccccagaccgtccatctgagatcttttttttttccttcctgaactatatttgttttttgttttcttgagagtcccagcctctggagtagctgggactacagggaagtgccaccatgcctggctaattttttaggcatttttgtagaggcaaggtctcactatgttgcccaagctggtttcgaactcctggactcaagcagtactcctacctcagcctcccatagtgctgggactacaggcgtgagccactgtgtctggcctgaactatattctttggaagttcattgagaaagggtatatacctaaaggattataaaacatgctgctataaagacatatgcacacgtatgtttatcgcggcactattcacaatagcaaagacttggaaccaacccaaatgtccaacaacgatagactggattaagaaaatgtggcacatatacagcatggaatac

SEQ ID NO: 700555 - DNA, 1335 bp, Homo sapiens
tcagagcacagggaaaaatgtgcaaaaaagtagacagcagttcaaaatgcagtgtggaggtgagaaaggcagagtctaaaggagcaagcttcttatgccctggaatagttggattgttttattgtattcaaattcattttttaattttgacagtgtgatgttttgatacatgtcatgtatacaccgtgtaatgatcaagacaggataattagtatacttatccctcagatacttattgattctttgtggtgagaacattcaawatcctctcttctagttattttgaaatatacaatccattatttgttaactgtagtcatcatactgtgcaataattagaacttctaactgtaactttgtacattaaccaacctctccccattttcccatcttccctactgtccctagcttctggtgacccactattctactctttttttttttcttttttgagatggagtctcacactgtctccgtcaggagtgcagtggcgcgatcctggctcactgcaacctctgcctccagggttcaagtgattctcctgcctcagcctctcgagtagctgggattacaggtgcccgccatcacgcccagctaattttgtatttttagcagagacggggtttcaccatgttagccaggctggtctcaaactcctgacctcaggtatctgcctgccttggcctctcaaagtgttgggattacaggggtgggcaccgtgccccacctactattctactctttatgagatcaacttttttagattccatatatgaatgagatcatgtagtatcaaattcatcattttaaatattcttctgtatcatcaatttttaaaatattttcccacaatacttttgctcaccatccactttttgtaccccagaccgtccatctgagatcttttttttttccttcctgaactatatttgttttttgttttcttgagagtcccagcctctggagtagctgggactacagggaagtgccaccatgcctggctaattttttaggcatttttgtagaggcaaggtctcactatgttgcccaagctggtttcgaactcctggactcaagcagtactcctacctcagcctcccatagtgctgggactacaggcgtgagccactgtgtctggcctgaactatattctttggaagttcattgagaaagggtatatacctaaaggattataaaacatgctgctataaagacatatgcacacgtatgtttatcgcggcactattcacaatagcaaagacttggaaccaacccaaatgtccaacaacgatagactggattaagaaaatgtggcacatatacagcatggaatac

SEQ ID NO: 700556 - DNA, 1335 bp, Homo sapiens
tcagagcacagggaaaaatgtgcaaaaaagtagacagcagttcaaaatgcagtgtggaggtgagaaaggcagagtctaaaggagcaagcttcttatgccctggaatagttggattgttttattgtattcaaattcattttttaattttgacagtgtgatgttttgatacatgtcatgtatacaccgtgtaatgatcaagacaggataattagtatacttatccctcagatacttattgattctttgtggtgagaacattcaaaatcctctcttctagttattttgaaatatacaatccattatttgttaactgtartcatcatactgtgcaataattagaacttctaactgtaactttgtacattaaccaacctctccccattttcccatcttccctactgtccctagcttctggtgacccactattctactctttttttttttcttttttgagatggagtctcacactgtctccgtcaggagtgcagtggcgcgatcctggctcactgcaacctctgcctccagggttcaagtgattctcctgcctcagcctctcgagtagctgggattacaggtgcccgccatcacgcccagctaattttgtatttttagcagagacggggtttcaccatgttagccaggctggtctcaaactcctgacctcaggtatctgcctgccttggcctctcaaagtgttgggattacaggggtgggcaccgtgccccacctactattctactctttatgagatcaacttttttagattccatatatgaatgagatcatgtagtatcaaattcatcattttaaatattcttctgtatcatcaatttttaaaatattttcccacaatacttttgctcaccatccactttttgtaccccagaccgtccatctgagatcttttttttttccttcctgaactatatttgttttttgttttcttgagagtcccagcctctggagtagctgggactacagggaagtgccaccatgcctggctaattttttaggcatttttgtagaggcaaggtctcactatgttgcccaagctggtttcgaactcctggactcaagcagtactcctacctcagcctcccatagtgctgggactacaggcgtgagccactgtgtctggcctgaactatattctttggaagttcattgagaaagggtatatacctaaaggattataaaacatgctgctataaagacatatgcacacgtatgtttatcgcggcactattcacaatagcaaagacttggaaccaacccaaatgtccaacaacgatagactggattaagaaaatgtggcacatatacagcatggaatac

SEQ ID NO: 700557 - DNA, 1335 bp, Homo sapiens
tcagagcacagggaaaaatgtgcaaaaaagtagacagcagttcaaaatgcagtgtggaggtgagaaaggcagagtctaaaggagcaagcttcttatgccctggaatagttggattgttttattgtattcaaattcattttttaattttgacagtgtgatgttttgatacatgtcatgtatacaccgtgtaatgatcaagacaggataattagtatacttatccctcagatacttattgattctttgtggtgagaacattcaaaatcctctcttctagttattttgaaatatacaatccattatttgttaactgtagtcatcatactgtgcaataattagaacttctaactgtaactttgtacattaaccaacctctccccattttcccatcttccctactgtccctagcttctggtgacccactattctactctttttttttttcttttttgagatggagtctcacactgtctccgtcaggagtgcagtggcgcgatcctggctcactgcaacctctgcctccagggttcaagtgattctcctgcctcagcctctcgagtagctgggattacaggtgcccgccatcacgcccagctaattttgtatttttagcagagacggggtttcaccatgttagccaggctggtctcaaactcctgacctcaggtatctgcctgccttggcctctcaaagtgttgggattacaggggtgggcaccgtgccccacctactattctactctttatgagatcaacttttttagattccatatatgaatgagatcatgtagtatcaaattcatcattttaaatattcttctgtatcatcaatttttaaaatattttcccacaatacttttgctcaccatccactttttgtaccccagaccgtccatctgagatcttttttttttccttcctgaactatatttgttttttgttttcttgagagtcccagcctctggagtagctgggactacagggaagtgccaccatgcctggctaattttttaggcatttttgtagaggcaaggtctcactatgttgcccaagctggtttcgaactcctggactcaagcagtactcctacctcagcctcccatagtgctgggactacaggcgtgagccactgtgtctggcctgaactatattctttggaagttcattgagaaagggtatatacctaaaggattataaaacatgctgctataaagacayatgcacacgtatgtttatcgcggcactattcacaatagcaaagacttggaaccaacccaaatgtccaacaacgatagactggattaagaaaatgtggcacatatacagcatggaatac

SEQ ID NO: 700558 - DNA, 2143 bp, Homo sapiens
ggactgtaagagcatatcattctgcgtatcttagccatggcatgatagggcttagctaggagacacttttcatgttaaactgccttaaaaatatgtgcagtgctattattctagttatcaaagatgtggataccacctcttcaggtagcagagataagattctaccatataaaccaagcaatctcatcttgtttttacgtacacagtacattaagatttctttgagaagtacttacacataatagaaggtgaagctctcagaggttagatcagagcatggaagttattgtttaataacgggcaattaaaaatttgtagagagaaccactaattgcttctttatttaagtgagaaaaactgtaagataaaattttcccttgactataaaacaaaacctcaaaatggctactatgaaatatatggctttgagtagcgctgccacctggtggtttagtttgtaaaaattagtactaaaatctacttccaagtaggccaaaagaccatgctgcataggggtatttacccttcttttgaacacaggtgggtatctgccagatacaacaacattagggttgaataactcatactaagtttgaaaacaagctgcatcttggttcctcaatgatatatcagggactatcagattctctatttactcagacaaaagaaatacgatttcagagagtaaaactagttaaatcaatatgtgttgcaggagacacaatrtctagcatgtcactggtaatagccacttttctggtaaaagctccctagcttaattagtggaattaacacagctaaacaaatacggtaccaactgaaggggtggccagcatacaaaagcctttttttagggatacaaactttatatcaaagtgtataaaactgtccaggagaaaaatatgttgaaactaggatcatgggtaactcagtcctcaagagagttaatccttgctatgcattagggatagtccatcatatccttccatgatctggataaaagggtccacaagataatttacctccttttgctaagtaatctcctcattaataattcagcttcttgggcatcctgaatccttgccttatattgcagatatagatattttagaatctaggaagggatatcactttctaaagtaataaactgtccctttgttctatatttcagtcaagtgtgaatttattcattgttagactatcactgatcttctgatcattttgaagtgtagtgactaataaaagtccagtaagacttcagactactgtatattcaccaagataaatgccaccttatgaagctttatagcatattctcctgttagcaccacttcctacctttcaatgcatgctttcttggaggcgttgacttgaaaataagtttaaagggaaaaattaacaattagtaccaagtgagaaagagttgtttagtagaaaacccagtgtattgactgtggaagaataagcatttctacagaatgaaaatgctagtttatcataagagagtccaataaaaactgggatgtcagggtaaacttcacaaacaaatattaggaaagcaagttttaaaataaatcatagtaattccattaggatatatgaatggcctgataatatgtaagaataagattaaataaaatgggcaactacatttatgaatgtctatttcacagccccatttttttaggagttgtggtggcaaactatcaaaagttcaaaggaaatcaacaaaatggcaacgcaaggaccacagattatccagggctatctggtcctatgcctaacatgtagtatatgctcaatatatctctcctgaataaattattttaaaaagtatatggtaattgaaaagactttaatctcactaataacaaaagaagtgctaatggaaacaggccaatttttacctattaggtcagtaaacatgagaaacccgataggatttggtgttaaccaagatatctgtgggaggcagatatctctttgaacttttgggtggaatttgaattggtagaatattttcagagggtgacttggaaacatgtattaaaacaatgttagcctttaacaagtaattccatcttaaaattttattttaaaaagataataaacatgtacttaaaatctctgaagttaaaactac

SEQ ID NO: 700559 - DNA, 462 bp, Homo sapiens
  misc_feature 441, 448, 453, 454, 456, 457, 458, 460, 461: n = A,T,C or G
ttaaaattctatttaacttgcatacaacaaaattaacttgtttaggacatctggtttggaattttaacacacgtagactcctgtatcatccactacaatgaggatccaaaaccctgccttggctgtcctgtgtagtcacacctaaccctggcaaccactgatcccggtggctcataactgtaatcccagtgctttgggaaactgagacaggaggatcacttgaggccaggaatttgaaaccagcctgggcaacacagtgaaaacccatctctacaaaaaagtagccacgcatggtggcgtgtgcctgtggtcctagctactcgggaggcacagggwagaggatcacccgagcccaggaatttggaggcagccagtgagctatgatcatgcaactgcacttcagcctgggcagtaaagcgagaccctctctctctttttaanaaaaaanaaaannannnanna

SEQ ID NO: 700560 - DNA, 462 bp, Homo sapiens
  misc_feature 441, 448, 453, 454, 456, 457, 458, 460, 461: n = A,T,C or G
ttaaaattctatttaacttgcatacaacaaaattaacttgtttaggacatctggtttggaattttaacacacgtagactcctgtatcatccactacaatgaggatccaaaaccctgccttggctgtcctgtgtagtcacacctaaccctggcaaccactgatcccggtggctcataactgtaatcccagtgctttgggaaactgagacaggaggatcacttgaggccaggaatttgaaaccagcctgggcaacacagtgaaaacccatctctacaaaaaagtagccacgcatggtggcgtgtgcctgtggtcctagctactcgggaggcacagggtrgaggatcacccgagcccaggaatttggaggcagccagtgagctatgatcatgcaactgcacttcagcctgggcagtaaagcgagaccctctctctctttttaanaaaaaanaaaannannnanna

SEQ ID NO: 700561 - DNA, 592 bp, Homo sapiens
ctttcatattccaattacattagtctattcatctagcaatcaaattaaataaaatctaaagatgttataattcccagttataataaaaagcctataaactcttcagtggtttacacagcacctggaacaatgtgacagatgacagaggactctgtcttcagttagtggaaactgctatattaacattcctatcaaaaatctatttttccttatatttgcatggtctcaaatgtatttctagttttatatgcgtaattttaagcacatcactcataaaataatatgtttcagtacagtaaaatttaatgatttcagattgcactgaaaggcatctttaaaagatactaaaaaatcaatttctgtggcgtttaccttgtcctaaaatatgcctatttaacatgtgcctcaaaagctgaattctagtccaagcacaaaatattgyccttaaaattgtacatcttctttattatcaattatggcataccgaattatatacttagtatgtttaaaaattctgctttttaaaatacatgcccttgcatacaaattgaatgatttaatgttttaagctattaatgccaaaaatgtctga

SEQ ID NO: 700562 - DNA, 587 bp, Homo sapiens
taattccactaagagtagtggaagttaaatttacaccctcctatctatgcacctatctcaaataattttgtaggttaaacctaccagtctataaataaaaacaattcttacaacatttatttcaaagcttaagaaaaattaaaagaatttgagttaatccataccaaaattagataaagaacaaactgtaatgatatgtgtgcaaatttttatgtatatgcaaacattctgaataaatttaaaatcttagaatttcaaaatctcttttacctagcaactggaaatctatcagctataaaattctatttgtgttgttgcaaaacattttctgctaactttttaaaaatttgaaacatcatttttaattgacaaaaattgtatgtatttattgcatgtaatgtgatgttttgatatatgtatgcatcatcaaataattaaatcaagctaattaacattttagtcctctcacatacttagcattgttttgtgttgagaacatttcaaactactctcttagtaattattaagtacataatagattgttaaccatagtcatcatgmtgtacaatagctccgcaaaatattta

SEQ ID NO: 700563 - DNA, 594 bp, Homo sapiens
actcaagtagatcttcactcatgaagaaatttgaaataaagcagtttaaggacaggagaagcagagactgtggacatacagatgtggcagtcatcacagcagaaaaattaaaagagccaagtttatttagaggcaggtagagacaaagataagatggaccatgagtgagtcatcattggaatagaaataaatgggagcccacttttgaaaggacatcaacagactacaacttgagaacttcccatgcatctcagtgagttataaggtgctctgttgccaagaactctttaatctctttttctgtcagtttgattgttttagatttcacatataagtgagattgtgcagcatatatgtggctgctgmggcactgtcttggtgttcactaataaatctctatcacctatattaacttggatgtgtttctgatccttgtaacctaaaagtaccaaactaataccacagttcataggacaaaagactttcatattttgaagaaactacagagacagattattttaccagttccatattgaaagcttaaattccttccgtaatttctcataagtgttctttcaactactttgcccattc

SEQ ID NO: 700564 - DNA, 620 bp, Homo sapiens
tgatattgaagctaaatgtaaatcttccttttgttactctttccatcttgtattcattaaaaggaaatatgatataacaataaaacatcaaaagtacagaaagttaccaatttaaatcacatagtatgctaattactttttaagttttgaaattgtctgtttacaaaacactttgccaatattttggtattagttataacaatggttttaatttcatctttatcctcatcaatttaacagaaaaaaagtaaattagcaaactagtaaaagagttaaaatattcaaggctgaatttttcacaaacattccagccacacttygcagacattattttcccccaaatatagcaaataaatatatgccaaaatacaggagtgaaacttaccagatgtccaacagcctcaagccagacagatattggtcaaaacttgaaaattcacagatgtaagacagtctgttattctgcttcaagcactatttttatttcagtaaaggcagtgaagtgtatgacattagataaaaatatttatattttaattgtgtaattctgattaagtgaagacattcaaattatggtttatatgtatcatttcattaattctatttatgccattgtatcc

SEQ ID NO: 700565 - DNA, 1040 bp, Homo sapiens
agttatccttttttgttctgggtttattaacagtgttttgaatatatttttatgtctattttttactgtatatgctagcatgcttatgaatgaaactgtacaatattggaatttgcttcaaagttattcatgggagtgatagaagtatgtggagtagaaataaaacaacattgactatgaatagataattgtagaaaacagtaaattactatgtgtgtaatcactaaatattttttatttttaaaaatatctttaaggtttcttataacaaaacttaaaatccagtcctgttttccttcaaamcagttctagtatttgggatttgccgaggtaattattttgattaaatagaggtaatggttggctaagcggaaattcacttcttaaaggcagcaactgatgtcagaagtaatatcatggtgttttgtcactaattctaagatgagaccctcattgactttccttgatatatgaattgcggcagaagatttttattatgcaggctgtgttacatatacagaaagaaatcaaagaaatctttgattaggctcctgacttttgtttgttgatttgtttaatgcagtatttatttaaacacatgccagtaaatgaaagcaggatgtttcacatttgtcattttagcagagagaaaatgttaagaacaatgtaagtgtaagtaaatcatttaaggtttaaacaaaaatgaaatgagtgttctaagttgtacgttgtttcatttgggatcttgagttatgccatatgctccacttttatgttccaaagataagatattcataggatgtctgctcaatggatctttgacccatattattataagtattacagataattctccaattgcctatgacttcatatgttgtgtttcacctataaaaatatcactgaataagtatcaatttattgggggggaggatataattaaagtggtattattctaatattctccaatattaaattttgttcatcaaagagtagcatatgtgtgtaagctcaaatgggatgtcattagacaagaattc

SEQ ID NO: 700566 - DNA, 1040 bp, Homo sapiens
agttatccttttttgttctgggtttattaacagtgttttgaatatatttttatgtctattttttactgtatatgctagcatgcttatgaatgaaactgtacaatattggaatttgcttcaaagttattcatgggagtgatagaagtatgtggagtagaaataaaacaacattgactatgaatagataattgtagaaaacagtaaattactatgtgtgtaatcactaaatattttttatttttaaaaatatctttaaggtttcttataacaaaacttaaaatccagtcctgttttccttcaaaccagttctagtatttgggatttgccgaggtaattattttgattaaatagaggyaatggttggctaagcggaaattcacttcttaaaggcagcaactgatgtcagaagtaatatcatggtgttttgtcactaattctaagatgagaccctcattgactttccttgatatatgaattgcggcagaagatttttattatgcaggctgtgttacatatacagaaagaaatcaaagaaatctttgattaggctcctgacttttgtttgttgatttgtttaatgcagtatttatttaaacacatgccagtaaatgaaagcaggatgtttcacatttgtcattttagcagagagaaaatgttaagaacaatgtaagtgtaagtaaatcatttaaggtttaaacaaaaatgaaatgagtgttctaagttgtacgttgtttcatttgggatcttgagttatgccatatgctccacttttatgttccaaagataagatattcataggatgtctgctcaatggatctttgacccatattattataagtattacagataattctccaattgcctatgacttcatatgttgtgtttcacctataaaaatatcactgaataagtatcaatttattgggggggaggatataattaaagtggtattattctaatattctccaatattaaattttgttcatcaaagagtagcatatgtgtgtaagctcaaatgggatgtcattagacaagaattc

SEQ ID NO: 700567 - DNA, 642 bp, Homo sapiens
tgagggtttattcagagctcagcgctaggctgagccctttacatagtgtggccatatgcccccatttgcctgggacaatcctgggttactaatacaatgatcaacagtgcctccttttactctcgagtgtcccggtctggaagataactatatatttgccttaactctacaagcataaytgaatccctacaatgcactacaagaagagcactgctaatagtgtcattttctgatgaagaaacaggctcagagaagataagtaacttgcccaaggtcacacgattagcaagtggcagacccagaaacataggaattcagctcttgacttcaaagcctctttgctttgccacaacatcagatttcctgttctaaaatccattgcttcatgctttgaaggaccgagaagctgctatctccaaatactagaaaaataaccattaacgtcctgcagtgatcccagctcttcttccagccccacgcttggccattttgccttgttcgtttcccaagtgacagcgtgcacaataccgttcgcttgcaacagcagccccgtcatgggatgaatacataccatcatgcctactgtgtgtcaggcacggcacctactgtgtgccaggcacagcacatgttgtctgatcctga

SEQ ID NO: 700568 - DNA, 574 bp, Homo sapiens
acttttgggatatctctgagcaagtcagtattgcagaattaccctgatatttctttgtttgatgcctaaatacattcttaaaattgtaaaagacctgtttagtgtatctataaatgctacatagaatttgaagtttggataatttggaagttaaactayaacttgagtaataaatactcaaacatggcctagtgcagtggcttacacctataatcccagcactttgggaggctgaggtgggcagatcacctgaggtcaggagttcgagaccagcctggccagcaaggcgaaaccccatctctaataaaaatgcaaacattagccaggtgtggttgtccatgcctgtgatcccagctactctggaggctgaggcaggagaatggcttgaacccaggaggtggaggttgcagtgagccgagatcgcaccactgcactcaagcctgggcaacagactgagactccatctcaaaataaataaataaatactcagagactgaagctaatagatgtaacagaatttgatatgaggttacatttttatttatcttaaatgggaatgaaataaatagctcag

SEQ ID NO: 700569 - DNA, 574 bp, Homo sapiens
acttttgggatatctctgagcaagtcagtattgcagaattaccctgatatttctttgtttgatgcctaaatacattcttaaaattgtaaaagacctgtttagtgtatctataaatgctacatagaatttgaagtttggataatttggaagttaaactacaacttgagtaataaatactcaaacatggcctagtgcrgtggcttacacctataatcccagcactttgggaggctgaggtgggcagatcacctgaggtcaggagttcgagaccagcctggccagcaaggcgaaaccccatctctaataaaaatgcaaacattagccaggtgtggttgtccatgcctgtgatcccagctactctggaggctgaggcaggagaatggcttgaacccaggaggtggaggttgcagtgagccgagatcgcaccactgcactcaagcctgggcaacagactgagactccatctcaaaataaataaataaatactcagagactgaagctaatagatgtaacagaatttgatatgaggttacatttttatttatcttaaatgggaatgaaataaatagctcag

SEQ ID NO: 700570 - DNA, 574 bp, Homo sapiens
acttttgggatatctctgagcaagtcagtattgcagaattaccctgatatttctttgtttgatgcctaaatacattcttaaaattgtaaaagacctgtttagtgtatctataaatgctacatagaatttgaagtttggataatttggaagttaaactacaacttgagtaataaatactcaaacatggcctagtgcagtggcttacacctataatcccagcactttgggaggctgaggtgggcagatcacctgaggtcaggagttcgagaccagcctggccagcaaggcgaaaccccatctctaataaaaatgcaaacattagccaggtgtggttgtccatgcctgtgatcccagctactckggaggctgaggcaggagaatggcttgaacccaggaggtggaggttgcagtgagccgagatcgcaccactgcactcaagcctgggcaacagactgagactccatctcaaaataaataaataaatactcagagactgaagctaatagatgtaacagaatttgatatgaggttacatttttatttatcttaaatgggaatgaaataaatagctcag

SEQ ID NO: 700571 - DNA, 574 bp, Homo sapiens
acttttgggatatctctgagcaagtcagtattgcagaattaccctgatatttctttgtttgatgcctaaatacattcttaaaattgtaaaagacctgtttagtgtatctataaatgctacatagaatttgaagtttggataatttggaagttaaactacaacttgagtaataaatactcaaacatggcctagtgcagtggcttacacctataatcccagcactttgggaggctgaggtgggcagatcacctgaggtcaggagttcgagaccagcctggccagcaaggcgaaaccccatctctaataaaaatgcaaacattagccaggtgtggttgtccatgcctgtgatcccagctactctggaggctgaggcaggagaatggcttgaacccaggaggtggaggttgcagtgagccgagatcgcaccactgcactcaagcctgggcaacagactgagactccatctcaaaataaakaaataaatactcagagactgaagctaatagatgtaacagaatttgatatgaggttacatttttatttatcttaaatgggaatgaaataaatagctcag

SEQ ID NO: 700572 - DNA, 1534 bp, Homo sapiens
tggctcacacctgtcatctcaaaagtttaggaggccaaggcaggagaatcgcttgagcccagtagttggagaccagcccagtcaaccgaggaagacattgtttctacaaaaattttaaaaattagctgggcatagtggcatgtgcttrtagacctggctacccaggaggctgaggcaggagaatcatttgagcccaatattttgaggctgcagtgagctatcatgatgccactccactccagcctggtggacagagtccccatcacttaaaaaagaaaaataaattcatctaggcaaaaaggcaattagttggctgaatgacaataggaaatgtcaccaatagctgcaaactgatgattccatcctttatcacgttggcaactctccttattatgaacattaaaattaatactttcctgtaatttaaacctgcacctgcatttctttttgctaaaacgtactatcctcaattatattctataattttacttgctaatttttgcttccttttcctcactgaatatgaagtgctatattaatctttaaagtatatttttaaaagattatctaaaagctataaaactggaagttatattgctgacagcgaatcttctcttaagaactttaaaaatagacattgagctcacgcctgtaatcctagcactttgggaggccgagacgggcggatcacgaggtcaggagatcgagaccatcttggctaacacggtgaaaacccgtttccactaaaaatacaaaaaattagccgggcgtgttggcgggcgcctgtagtcccagctacttgggaggctgaggcaggagaatggcatgaacctgggaggcggagcttgcagtgagccgagatcgcgccactgcactccaacctgggagacacagcgagactccgtctcaaaaaaaaaaaaaaaaaaaatagacattgaaagacactgcagatgaacagtttgagtctagtgcaaaaaaacaggcaaactaggggctatcaaaccatagaattattagcgaaaatatttacttttgtttcaattgaaaatgccacataataagatttattttagtaattttttgtgtgtctcttctataggcaagtatcttaatgatatttaatttcagggaattgtgtggctcttgaaagagtcaaaatcaaaatttatgtgccagattttgcctctatctatgttatttgtctctctaactagtaattttccatgttgttttagagtgaatacagaacaaagttatagaatatagttagtgatatttctttacttttcaatggtagattactttggccatctagttaaactactggaaagatcttgctgtctattttgttattttgtagcttcttaccacaattgctggccatgaattttcttctttttctaaaactgagggaattggcaaaatttggaaaatatgatgtcactatgattgatcaacattataaatgtatttttagaggaaattattcattgtataatagaaaatgtgtaagtacacatcctatgagtcctga

SEQ ID NO: 700573 - DNA, 1534 bp, Homo sapiens
tggctcacacctgtcatctcaaaagtttaggaggccaaggcaggagaatcgcttgagcccagtagttggagaccagcccagtcaaccgaggaagacattgtttctacaaaaattttaaaaattagctgggcatagtggcatgtgcttatagacctggctacccaggaggctgaggcaggagaatcatttgagcccaatattttgaggctgcagtgagctatcaygatgccactccactccagcctggtggacagagtccccatcacttaaaaaagaaaaataaattcatctaggcaaaaaggcaattagttggctgaatgacaataggaaatgtcaccaatagctgcaaactgatgattccatcctttatcacgttggcaactctccttattatgaacattaaaattaatactttcctgtaatttaaacctgcacctgcatttctttttgctaaaacgtactatcctcaattatattctataattttacttgctaatttttgcttccttttcctcactgaatatgaagtgctatattaatctttaaagtatatttttaaaagattatctaaaagctataaaactggaagttatattgctgacagcgaatcttctcttaagaactttaaaaatagacattgagctcacgcctgtaatcctagcactttgggaggccgagacgggcggatcacgaggtcaggagatcgagaccatcttggctaacacggtgaaaacccgtttccactaaaaatacaaaaaattagccgggcgtgttggcgggcgcctgtagtcccagctacttgggaggctgaggcaggagaatggcatgaacctgggaggcggagcttgcagtgagccgagatcgcgccactgcactccaacctgggagacacagcgagactccgtctcaaaaaaaaaaaaaaaaaaaatagacattgaaagacactgcagatgaacagtttgagtctagtgcaaaaaaacaggcaaactaggggctatcaaaccatagaattattagcgaaaatatttacttttgtttcaattgaaaatgccacataataagatttattttagtaattttttgtgtgtctcttctataggcaagtatcttaatgatatttaatttcagggaattgtgtggctcttgaaagagtcaaaatcaaaatttatgtgccagattttgcctctatctatgttatttgtctctctaactagtaattttccatgttgttttagagtgaatacagaacaaagttatagaatatagttagtgatatttctttacttttcaatggtagattactttggccatctagttaaactactggaaagatcttgctgtctattttgttattttgtagcttcttaccacaattgctggccatgaattttcttctttttctaaaactgagggaattggcaaaatttggaaaatatgatgtcactatgattgatcaacattataaatgtatttttagaggaaattattcattgtataatagaaaatgtgtaagtacacatcctatgagtcctga

SEQ ID NO: 700574 - DNA, 1534 bp, Homo sapiens
tggctcacacctgtcatctcaaaagtttaggaggccaaggcaggagaatcgcttgagcccagtagttggagaccagcccagtcaaccgaggaagacattgtttctacaaaaattttaaaaattagctgggcatagtggcatgtgcttatagacctggctacccaggaggctgaggcaggagaatcatttgagcccaatattttgaggctgcagtgagctatcatratgccactccactccagcctggtggacagagtccccatcacttaaaaaagaaaaataaattcatctaggcaaaaaggcaattagttggctgaatgacaataggaaatgtcaccaatagctgcaaactgatgattccatcctttatcacgttggcaactctccttattatgaacattaaaattaatactttcctgtaatttaaacctgcacctgcatttctttttgctaaaacgtactatcctcaattatattctataattttacttgctaatttttgcttccttttcctcactgaatatgaagtgctatattaatctttaaagtatatttttaaaagattatctaaaagctataaaactggaagttatattgctgacagcgaatcttctcttaagaactttaaaaatagacattgagctcacgcctgtaatcctagcactttgggaggccgagacgggcggatcacgaggtcaggagatcgagaccatcttggctaacacggtgaaaacccgtttccactaaaaatacaaaaaattagccgggcgtgttggcgggcgcctgtagtcccagctacttgggaggctgaggcaggagaatggcatgaacctgggaggcggagcttgcagtgagccgagatcgcgccactgcactccaacctgggagacacagcgagactccgtctcaaaaaaaaaaaaaaaaaaaatagacattgaaagacactgcagatgaacagtttgagtctagtgcaaaaaaacaggcaaactaggggctatcaaaccatagaattattagcgaaaatatttacttttgtttcaattgaaaatgccacataataagatttattttagtaattttttgtgtgtctcttctataggcaagtatcttaatgatatttaatttcagggaattgtgtggctcttgaaagagtcaaaatcaaaatttatgtgccagattttgcctctatctatgttatttgtctctctaactagtaattttccatgttgttttagagtgaatacagaacaaagttatagaatatagttagtgatatttctttacttttcaatggtagattactttggccatctagttaaactactggaaagatcttgctgtctattttgttattttgtagcttcttaccacaattgctggccatgaattttcttctttttctaaaactgagggaattggcaaaatttggaaaatatgatgtcactatgattgatcaacattataaatgtatttttagaggaaattattcattgtataatagaaaatgtgtaagtacacatcctatgagtcctga

SEQ ID NO: 700575 - DNA, 1534 bp, Homo sapiens
tggctcacacctgtcatctcaaaagtttaggaggccaaggcaggagaatcgcttgagcccagtagttggagaccagcccagtcaaccgaggaagacattgtttctacaaaaattttaaaaattagctgggcatagtggcatgtgcttatagacctggctacccaggaggctgaggcaggagaatcatttgagcccaatattttgaggctgcagtgagctatcatgatgccactccactccagcctggtggacagagtccccatcacttaaaaaagaaaaataaattcatctaggcaaaaaggcaattagttggctgaatgacaataggaaatgtcaccaatagctgyaaactgatgattccatcctttatcacgttggcaactctccttattatgaacattaaaattaatactttcctgtaatttaaacctgcacctgcatttctttttgctaaaacgtactatcctcaattatattctataattttacttgctaatttttgcttccttttcctcactgaatatgaagtgctatattaatctttaaagtatatttttaaaagattatctaaaagctataaaactggaagttatattgctgacagcgaatcttctcttaagaactttaaaaatagacattgagctcacgcctgtaatcctagcactttgggaggccgagacgggcggatcacgaggtcaggagatcgagaccatcttggctaacacggtgaaaacccgtttccactaaaaatacaaaaaattagccgggcgtgttggcgggcgcctgtagtcccagctacttgggaggctgaggcaggagaatggcatgaacctgggaggcggagcttgcagtgagccgagatcgcgccactgcactccaacctgggagacacagcgagactccgtctcaaaaaaaaaaaaaaaaaaaatagacattgaaagacactgcagatgaacagtttgagtctagtgcaaaaaaacaggcaaactaggggctatcaaaccatagaattattagcgaaaatatttacttttgtttcaattgaaaatgccacataataagatttattttagtaattttttgtgtgtctcttctataggcaagtatcttaatgatatttaatttcagggaattgtgtggctcttgaaagagtcaaaatcaaaatttatgtgccagattttgcctctatctatgttatttgtctctctaactagtaattttccatgttgttttagagtgaatacagaacaaagttatagaatatagttagtgatatttctttacttttcaatggtagattactttggccatctagttaaactactggaaagatcttgctgtctattttgttattttgtagcttcttaccacaattgctggccatgaattttcttctttttctaaaactgagggaattggcaaaatttggaaaatatgatgtcactatgattgatcaacattataaatgtatttttagaggaaattattcattgtataatagaaaatgtgtaagtacacatcctatgagtcctga

SEQ ID NO: 700576 - DNA, 1534 bp, Homo sapiens
tggctcacacctgtcatctcaaaagtttaggaggccaaggcaggagaatcgcttgagcccagtagttggagaccagcccagtcaaccgaggaagacattgtttctacaaaaattttaaaaattagctgggcatagtggcatgtgcttatagacctggctacccaggaggctgaggcaggagaatcatttgagcccaatattttgaggctgcagtgagctatcatgatgccactccactccagcctggtggacagagtccccatcacttaaaaaagaaaaataaattcatctaggcaaaaaggcaattagttggctgaatgacaataggaaatgtcaccaatagctgcaaactgatgattccatcctttatcacgttggcaactctccttattatgaacattaaaattaatactttcctgtaatttaaacctgcacctgcatttctttttgctaaaaygtactatcctcaattatattctataattttacttgctaatttttgcttccttttcctcactgaatatgaagtgctatattaatctttaaagtatatttttaaaagattatctaaaagctataaaactggaagttatattgctgacagcgaatcttctcttaagaactttaaaaatagacattgagctcacgcctgtaatcctagcactttgggaggccgagacgggcggatcacgaggtcaggagatcgagaccatcttggctaacacggtgaaaacccgtttccactaaaaatacaaaaaattagccgggcgtgttggcgggcgcctgtagtcccagctacttgggaggctgaggcaggagaatggcatgaacctgggaggcggagcttgcagtgagccgagatcgcgccactgcactccaacctgggagacacagcgagactccgtctcaaaaaaaaaaaaaaaaaaaatagacattgaaagacactgcagatgaacagtttgagtctagtgcaaaaaaacaggcaaactaggggctatcaaaccatagaattattagcgaaaatatttacttttgtttcaattgaaaatgccacataataagatttattttagtaattttttgtgtgtctcttctataggcaagtatcttaatgatatttaatttcagggaattgtgtggctcttgaaagagtcaaaatcaaaatttatgtgccagattttgcctctatctatgttatttgtctctctaactagtaattttccatgttgttttagagtgaatacagaacaaagttatagaatatagttagtgatatttctttacttttcaatggtagattactttggccatctagttaaactactggaaagatcttgctgtctattttgttattttgtagcttcttaccacaattgctggccatgaattttcttctttttctaaaactgagggaattggcaaaatttggaaaatatgatgtcactatgattgatcaacattataaatgtatttttagaggaaattattcattgtataatagaaaatgtgtaagtacacatcctatgagtcctga

SEQ ID NO: 700577 - DNA, 2370 bp, Homo sapiens
ttgtgttactacattgatatctttgcatctggtggaacagtcagcttttccagttttatgaggtagtttttgtagggaaaatctttctcctatagatatgtcctatagtgttggtcaaatagagtattttgactttggttctgggtaggtgcaattgtacagtttctgtatgatttcttgagttctaatccacttcaacagtgtgtgctagtgccttggtggcctaggctgcagttgtttaccaaagctgtggtatagctttgctggggagtgctgatgccaagtagttctgtcttggggctctgggcagacacgcatgaggctgtgacagctctgttgctgaagggggtggagatgctgccaatggcaggcccaagagactggttctcaggtcctttcaggggtgcatgcaagggtgtgtggcagctctgcaaatgaaggcaacagggccaccagttgtggcagtgggacccctaagaaatacacaggtgcacccrgtggctccactgctggaaggagcagggtattcagtgataactagcctttgaatttttaaaggacactgtttaaagagagaatgcacatttagatattatttgtagaataatttcaaattttggaagtaaattatattaataaaaattttatattacttttagttccatctgtgatttgaggttaggctccttaatttacgaatgtcacagggagtacattaaatggtgggaaacaaagttcctggactctaaaatagacagttctcagttgcctctctgtcactctttctagtctatgcaaaattttataatgattcagggacacactgacatggtagcctcatgtgatggactctaactctcagggctgctggactcctgttttaaatttcactgactttcctaaacttactacacttagaatcagctgaagaactttatttttaaaaaattattatttattcatttatttatttagttagttagacacggaatttgctcttgtcgcccaggctggagtgcagtggcataatcttggctcactgcaacctccgcctcccaagttcaagcgattctcctgcatcagcctcccaagtagctgagagtacaggtgcccacaaccatgcctggctaattttttgtatttttggtagagatgaggtttcaccatgttggccaggctggtctccaactcctgacctcaggtgatctgcccacctcagcctcccaaagtgctgggattacaggtgtgagccactgtggacggcctgaagaacttcttaaagcataatgtctaagccatatcccattctgactgaatgttaattttctgacatttgaattctggaagctagatttctttaggaactattattttttcacagccagtcctaatttgatgagcatgttctatgacattttaatgtttttgcccctccgccatatctcaatcacagttctagacactgggaatcctctctgtattgtcttgtaacttgtaagtcttgtgtcctgtaaactgtatgtcttgctaactgcttcaagaagaaaaataagacataaacaactaaacataatgaaagtgaaaaataaataagtgttatataacactactagcttgagttatcagagtgaaggccaaacattcactaattcttatgggcaaaatcagaaacagctccctggagaagatcagattcagctagacttgtgagattgggaggaaataaggcctcaggctcagaaatcagacaagcttgaatttgaatttgtgaccccacttctgttggagattcagtttctcttaagaaaaatggggaaaattagataatgcattaattaatgaatgtaaaatctttagaaaaatgcctgaccccgtgcaagcctttagcaaatattagtggataataatttcaaaacacaaaggtgctttcttactacacctctgcctttagcttcaacaatttcttacctatttatacacacaagtacaaccactcattcacttactgactcccataacttgtagacatgttagctaaacactatgagagggattagggataaaattgatactgtataaagaggatgtatctcctgctgccttggaacttagagtctagtggggagacagaaaaataaaagtcattttttaagagtggtaagtgtgataaagagagttatctggtactatgaaagcttgtgatggggaatgaaagccagctgggtagacagggaaagctctcaaggaattgacacttgagctaatataaagaagaataagttgtaattacttcagtgaagaggggagaaaagggcactccaatgagagggaacagagtatatgaagcatcaggccaatgaactcccagca

SEQ ID NO: 700578 - DNA, 2370 bp, Homo sapiens
ttgtgttactacattgatatctttgcatctggtggaacagtcagcttttccagttttatgaggtagtttttgtagggaaaatctttctcctatagatatgtcctatagtgttggtcaaatagagtattttgactttggttctgggtaggtgcaattgtacagtttctgtatgatttcttgagttctaatccacttcaacagtgtgtgctagtgccttggtggcctaggctgcagttgtttaccaaagctgtggtatagctttgctggggagtgctgatgccaagtagttctgtcttggggctctgggcagacacgcatgaggctgtgacagctctgttgctgaagggggtggagatgctgccaatggcaggcccaagagactggttctcaggtcctttcaggggtgcatgcaagggtgtgtggcagctctgcaaatgaaggcaacagggccaccagttgtggcagtgggacccctaagaaatacacaggtgcacccggtggctccactgctggaaggagcagggtattcagtgataactagcctttgaatttttaaaggacactgtttaaagagagaatgcacatttagatattatttgtagaataatttcaaattttggaagtaaattatattaataaaaattttatattacttttagttccatctgtgatttgaggttaggctccttaatttacgaatgtcacagggagtacattaaatggtgggaaacaaagttcctggactctaaaatagacagttctcagttgcctctctgtcactctttctagtctatgcaaaattttataatgattcagggacacactgacatggtagcctcatgtgatggactctaactctcagggctgctrgactcctgttttaaatttcactgactttcctaaacttactacacttagaatcagctgaagaactttatttttaaaaaattattatttattcatttatttatttagttagttagacacggaatttgctcttgtcgcccaggctggagtgcagtggcataatcttggctcactgcaacctccgcctcccaagttcaagcgattctcctgcatcagcctcccaagtagctgagagtacaggtgcccacaaccatgcctggctaattttttgtatttttggtagagatgaggtttcaccatgttggccaggctggtctccaactcctgacctcaggtgatctgcccacctcagcctcccaaagtgctgggattacaggtgtgagccactgtggacggcctgaagaacttcttaaagcataatgtctaagccatatcccattctgactgaatgttaattttctgacatttgaattctggaagctagatttctttaggaactattattttttcacagccagtcctaatttgatgagcatgttctatgacattttaatgtttttgcccctccgccatatctcaatcacagttctagacactgggaatcctctctgtattgtcttgtaacttgtaagtcttgtgtcctgtaaactgtatgtcttgctaactgcttcaagaagaaaaataagacataaacaactaaacataatgaaagtgaaaaataaataagtgttatataacactactagcttgagttatcagagtgaaggccaaacattcactaattcttatgggcaaaatcagaaacagctccctggagaagatcagattcagctagacttgtgagattgggaggaaataaggcctcaggctcagaaatcagacaagcttgaatttgaatttgtgaccccacttctgttggagattcagtttctcttaagaaaaatggggaaaattagataatgcattaattaatgaatgtaaaatctttagaaaaatgcctgaccccgtgcaagcctttagcaaatattagtggataataatttcaaaacacaaaggtgctttcttactacacctctgcctttagcttcaacaatttcttacctatttatacacacaagtacaaccactcattcacttactgactcccataacttgtagacatgttagctaaacactatgagagggattagggataaaattgatactgtataaagaggatgtatctcctgctgccttggaacttagagtctagtggggagacagaaaaataaaagtcattttttaagagtggtaagtgtgataaagagagttatctggtactatgaaagcttgtgatggggaatgaaagccagctgggtagacagggaaagctctcaaggaattgacacttgagctaatataaagaagaataagttgtaattacttcagtgaagaggggagaaaagggcactccaatgagagggaacagagtatatgaagcatcaggccaatgaactcccagca

SEQ ID NO: 700579 - DNA, 1359 bp, Homo sapiens
tactcaacggtctcaatataagttaagaacacacaaatcacaggaataacaatctattgctgatgaatggggactggttagaatcaccactgtggagagtcatggcctctgcctcaaatcactgccctgcaccagttcacagacccagagcccctgaacagagtggacactgtaagaaggaagagtcctccgatagtgcaatcaacaggtctctttctcttgctcttccccaaatggtactctgatcattttctagtgtgtctgtgcatggaatagagaaatacctcgattttcttaagtcatggcatactggctgtgaacctcaaaggcctttgtgagttaccaggcagagtaatgacttttggagaccagctgatgtaagagcttttgcctgaatcatctcacagtagacttggtccctcataccctgcccagtgtttatctcctgtcactacggaggcaagaagaagctacatcacttagatagggaggaaaggtcatgtttgctgacagcagatgctcagaagaaataagtttcacttgtgtaggtggtgtccttaatggtgttaataatactattattagtaacaacaatagttaacatttattgaatagctactctacgtcaggtactgctacaaactcttcatattaattaaaaatcagaaactgggtgaaataattttgagactctttctaatattaggattatgtctctagggcctatttggaattactgatcatgccagtggctgcttttcctcatagtgttgtactctctcagtcctcctcataaaaagaaatttcagctgtgtgcctatttatcacttaaaaaaacatttttacttcagagcaattttagatttatagaaatattgcaaaagtggtacacaaatatcccagattcccccacccagttttgcctattgttaattaatgagccaatattgatacatcattattgactaaaatccatactttcctcagatttccttagtttttacctaatgttctttttctgttccaggattccatcatcagcatcacattacatttgcttctcatgtctccataggctcctcttggctgtccaatttcccgatctttccttgttttttgaggactttgacagttttgaggaatactggttagctattttacagaatatccctcatttgggatttgtctgatttttttycctcattggagtggggttttgggttttgggaggaaaacaatgaagagggtaaaatgccattcttatcacatcatatcaactgtacatactatgaacttgtcttagtccatttgcgttgctataaaagaatatctgaggctgagtaatatataaacaaaaga

SEQ ID NO: 700580 - DNA, 1058 bp, Homo sapiens
ttaaaagggaaaaattaaaaaccatcaaccaagaattctatattttaaaaactctctataaaaaaatgaatgaaatgtttaatgggcatagagtttcagttttgcatgataaaaaaattgctggagattggtggcacaacaatatgactatgcttcccattactgaactgtatgcttaaaaatggttatgatggtacattttatgttatgttcatcttaccacaattaaacataaattttttaaaaaaggagaaattaagattttccagaaaaacaaaaactaggaagtttgtcactagtagacctgccttacatgaaatattacaggaagtgcttcagactggaatgaaagggcactagatagtaacttgaagccatacaaagaaataaagaacactgataaatgtcatgatatatgtaaatataaacgccagtgttactgtatttttggtttttatctcctttttgccctatgtaatttaaaagccacattccacaatgtagatatagcctacgactacacttaggaaaaaaaattagtaaactgaaaaatgaaattaaaacactgagatacaatgactgatttatataagtaaatgagacctctcacactttattctaaatcagatatctcatatttgtatttcacakggaagagatccagaattgagctcaaatataaggatactgggaagcagagtctaacaaaaagatcaccagccaaaaagtcaagatacctaaaatgttatattgtcagctctgctaataattctcaatgtcacttgttaacttctccgggtcattacttcccaatttgtgaagcggcaaggatatgacaatattataagaatttatataaagaaaaaagaaaacagttgacataaaattatttaaattcttagtaaagtagcaggcaaatccaaaatattatcattattacgaaatcagcatgcacatgcagtttctttatttacctgatgatggtgaatgtttcttatgttgcaggaaaaatgctggtagagcagaaacttatcaacatctttctcatttaccttttt

SEQ ID NO: 700581 - DNA, 2167 bp, Homo sapiens
  misc_feature 1484, 1485, 1486, 1487, 1489, 1494, 1495, 1496, 1497: n = A,T,C or G
ctgggtgacaggtgagatcccaactcagaaaaaaaaataagaaaagaaaagaaaggaaaaatgtttcctggaaaagagctaaccctgacttgattttggtaggggtgggagaagcaaaaaaaatttttttttcagtagcaagtccataagatacagatgttcaaagacattcttttacgaaacagaagttatcttggctcccacgctcacattttcaccaaggatgggaaaacttaaaatttgcctcttaaggtaagttagtcacttctggttttaaacacaattaactcaagattaaaactcagtaaatgcaagatcatctccccctcacatttctgctcccctctttccccccaggagagatctaaagttggggtgggggtgcctcacctctcgttctggccaagagtaacgttttctgtccacttgccatcccctaccctcacagccttggctgcctctagctggtcctactggtcgatctcccactgatgtcattggtccctccgtggcctccagactgaaggtatgagcactggtcctcctagttgtccaggctggccctaggcctccctgctctgccccctgccccctggaggattggtaactctgggccactttccccatcccagccatgaggcccatccccttaggcctctcttccagccatcaccactctgaggctctggtgccatgtcagacccaatttcatgccaggctcctcttggaaactgcaactgcaacctctcaggctgcttcaagttttctactaggcccgaggagtgactggtgtgctggcraactggctcccttgggagggggttgggagaaaccctgatttgtagcttttgcttgattcctatagtatagatactcactatggttgatttcaagttgaggagaaataacatcaccgaccaataagatctcacaagctgtgacagcaaactctggcttggcactttgttgactccaggaaagggggaaagtgagcttggctctaatgtggcctccagcaaccaagctttcctcccacccctcaggaaccttccctctgatctcaactcctcaactacattcttagtgcttggggtagggatgatgtctcaaagtcttctctctcataggattcctcacggggcacttgaggaggcactaagtatgttgactgatgacagtattttaaaatattgctgttaggccgagcgcggtggcttatgcctgtaatcccagcactttgagaggccaaggcaggcagatcacctgaggtcaggagttcgagaccagcctggtcaacatggtgaaaccccgtctctactaaaaatacataaattagccaggtgtggtggcaggcgcctgtaatcccagctacttaggaggctaaggcaggaggattgcttgaacctgggaggcagaggttgcagtgagccgagatcatgccattgtcctccagcctgggcaacaagagtgagactccatctcannnnanaaaannnnaaaaaaaaaaaaaaatatatatatatatatatatatatatatatatatatatatatatatatatatatatatatatatctgttaaaggctacaccacactgtttttcactatcagaggcataaaggcaactcacctcttgtgattttccctgtagacctgatgaagttaaccaatgccccaaagctcctcaatcttgtgccagagagtatcccttccatattgccaaggaatgtttaatggagcaaggtttggggttttgtaaagtgtatttattgggatggatttggctgaagtctaagtctaattaattgatatcatggtttaaagttgtatgcaggaagacctgacaactcactagcagtctacaatcggcattattagttggtattaagtcttgaatagtctttgtcgccctaagagagaagcttcattttagaaagtataggattcattgcaacaaggacttattgagcacctcctatttgcaaagcacagcagatgtgcaggacagtgattttcaaagtggcctcagcatcacctgggcgcttgcacatccctggccaggcgcggtggctcacgcctgtagtcccagcattttgggaggccaaggcaggcggattacctgaggtcaggagtttgagatcagcctggccaacatggcaaaaccct

SEQ ID NO: 700582 - DNA, 1101 bp, Homo sapiens
tgctccaatgtatatttatgtttatatgattttcagtttagttgttagttatgcatcttatagcttaaaacatgtgaagattctgaaatggaagcaaagaagtaatttatgtcattaggcatgtaaaaattattcagagaattataactagctagtacacacattgatcaaagaaagaagaagaagaaagaagtttcagatgtcacttataaaatttagggtggatataagaaagtattttatttatgtgtttaatttttgtggatacatagtagatatatatatttatgggatacatgagatatgatacaggcatacaatgcataataattacaccagagaaaatggaatattcatcaactcaagcatttatcctttgtgttacaaaaaatctaattatactcttagttattttaaaatgtacaattaattttttaccatattcaccgtgttatgctaccaaatactaggacttatttattatttctaactatttttgtatccgttaatcattctcacttatcctccaccctcccactacccttcatagcttctagtaatcatctttctactctgtatctccatgagttcgattgttttgagttttagatcccacaaataagtgaaaacatgtaatatttgtctttctgtgcctggcttatttcacttagcataatgacctccagttccatccatgctattgcaaatgacaggatctcatttttttgtaatggctaaatagcacttcattgtgtatacataacrcattttctttattcattcatctgttgatggatataggttgcttccaaatcttggctattgtaaatcatgctggaataaatgtgagagcccagatatctcctcaacatactgatttcctttcttttgagtatatacctaggagtgggattgctggattgtatggcagctctttttagttttctgcttaacctccacactgttctccacagtgattgtactaactgtaattcccaccaacagataaaggtgattaaaaacaaataaaaatggatttttacagggtttttgaataaaacagaatatattttttcattttttctttttttttaaatttta

SEQ ID NO: 700583 - DNA, 1101 bp, Homo sapiens
tgctccaatgtatatttatgtttatatgattttcagtttagttgttagttatgcatcttatagcttaaaacatgtgaagattctgaaatggaagcaaagaagtaatttatgtcattaggcatgtaaaaattattcagagaattataactagctagtacacacattgatcaaagaaagaagaagaagaaagaagtttcagatgtcacttataaaatttagggtggatataagaaagtattttatttatgtgtttaatttttgtggatacatagtagatatatatatttatgggatacatgagatatgatacaggcatacaatgcataataattacaccagagaaaatggaatattcatcaactcaagcatttatcctttgtgttacaaaaaatctaattatactcttagttattttaaaatgtacaattaattttttaccatattcaccgtgttatgctaccaaatactaggacttatttattatttctaactatttttgtatccgttaatcattctcacttatcctccaccctcccactacccttcatagcttctagtaatcatctttctactctgtatctccatgagttcgattgttttgagttttagatcccacaaataagtgaaaacatgtaatatttgtctttctgtgcctggcttatttcacttagcataatgacctccagttccatccatgctattgcaaatgacaggatctcatttttttgtaatggctaaatagcacttcattgtgtatacataacgcattttctttattcattcatctgttgatggatataggttgcttccaaatcttggctattrtaaatcatgctggaataaatgtgagagcccagatatctcctcaacatactgatttcctttcttttgagtatatacctaggagtgggattgctggattgtatggcagctctttttagttttctgcttaacctccacactgttctccacagtgattgtactaactgtaattcccaccaacagataaaggtgattaaaaacaaataaaaatggatttttacagggtttttgaataaaacagaatatattttttcattttttctttttttttaaatttta

SEQ ID NO: 700584 - DNA, 1101 bp, Homo sapiens
tgctccaatgtatatttatgtttatatgattttcagtttagttgttagttatgcatcttatagcttaaaacatgtgaagattctgaaatggaagcaaagaagtaatttatgtcattaggcatgtaaaaattattcagagaattataactagctagtacacacattgatcaaagaaagaagaagaagaaagaagtttcagatgtcacttataaaatttagggtggatataagaaagtattttatttatgtgtttaatttttgtggatacatagtagatatatatatttatgggatacatgagatatgatacaggcatacaatgcataataattacaccagagaaaatggaatattcatcaactcaagcatttatcctttgtgttacaaaaaatctaattatactcttagttattttaaaatgtacaattaattttttaccatattcaccgtgttatgctaccaaatactaggacttatttattatttctaactatttttgtatccgttaatcattctcacttatcctccaccctcccactacccttcatagcttctagtaatcatctttctactctgtatctccatgagttcgattgttttgagttttagatcccacaaataagtgaaaacatgtaatatttgtctttctgtgcctggcttatttcacttagcataatgacctccagttccatccatgctattgcaaatgacaggatctcatttttttgtaatggctaaatagcacttcattgtgtatacataacgcattttctttattcattcatctgttgatggatataggttgcttccaaatcttggctattgtaaatcatgctggaataaatgtgagagcccagatatctcctcaacatactgatttyctttcttttgagtatatacctaggagtgggattgctggattgtatggcagctctttttagttttctgcttaacctccacactgttctccacagtgattgtactaactgtaattcccaccaacagataaaggtgattaaaaacaaataaaaatggatttttacagggtttttgaataaaacagaatatattttttcattttttctttttttttaaatttta

SEQ ID NO: 700585 - DNA, 1101 bp, Homo sapiens
tgctccaatgtatatttatgtttatatgattttcagtttagttgttagttatgcatcttatagcttaaaacatgtgaagattctgaaatggaagcaaagaagtaatttatgtcattaggcatgtaaaaattattcagagaattataactagctagtacacacattgatcaaagaaagaagaagaagaaagaagtttcagatgtcacttataaaatttagggtggatataagaaagtattttatttatgtgtttaatttttgtggatacatagtagatatatatatttatgggatacatgagatatgatacaggcatacaatgcataataattacaccagagaaaatggaatattcatcaactcaagcatttatcctttgtgttacaaaaaatctaattatactcttagttattttaaaatgtacaattaattttttaccatattcaccgtgttatgctaccaaatactaggacttatttattatttctaactatttttgtatccgttaatcattctcacttatcctccaccctcccactacccttcatagcttctagtaatcatctttctactctgtatctccatgagttcgattgttttgagttttagatcccacaaataagtgaaaacatgtaatatttgtctttctgtgcctggcttatttcacttagcataatgacctccagttccatccatgctattgcaaatgacaggatctcatttttttgtaatggctaaatagcacttcattgtgtatacataacgcattttctttattcattcatctgttgatggatataggttgcttccaaatcttggctattgtaaatcatgctggaataaatgtgagagcccagatatctcctcaacatactgatttcctttcttttgagtatatacctaggagygggattgctggattgtatggcagctctttttagttttctgcttaacctccacactgttctccacagtgattgtactaactgtaattcccaccaacagataaaggtgattaaaaacaaataaaaatggatttttacagggtttttgaataaaacagaatatattttttcattttttctttttttttaaatttta

SEQ ID NO: 700586 - DNA, 1249 bp, Homo sapiens
taaatgctgcaaggaatgcagcttcgttacctagaagagagcctgccacaggccagattctgttgaatggctgcatgggggttgaraaaagctgaggcctaaaggatcagtggttatgaggtgggtaaacatggagaagaagagtgttgtaggcagagggaatagcttgcaccaagtctggggtggaggaagagggcgacgaggactggagtagagtcaaacatgacctagagaattaacacatttcaggtattgctaattcccaatcttacctccctcaaggtctccagagggggattagtacgtggcccaagggacctggggcaagcatggggacccagacgacgaggcatctgggcggggggtctgtgtgctgctgcatgctccagtgctctgttggtcacagtcttagaaataggagcagtaggtgaatggggtcgttcaaggaagatggagagggccgggtgcggtggctcatgttggtagtcccagcactttggaaggccaaggtgggcagattgcttgagcccaggagctcaggaccagcctgggcaacatggtgaagccccatctctacaaaaaatgcaaaattagctgagcctgggagtcaaggctgcagtgagccgggattgtgctactgcactccagcctgggtgacagagcaaaaccctatctcaagaaaaaaaagaaaaaagaaaatggaaaggatgcaacagaaagtgagaagagggctggacggaggaggcatcaggaaacatgagctctactctttttttcgtatgtgattgttttgaaaaaattacttaacgtgctttttgaagattgccgtcctggttcttactggaactttacacataggcgtatcttgcagctttcacacacatgcagagggcattcactttttatttaataacacagtcaacgtaatacttacaactttcaaactgcagttggctatttcagtgcaaatcgctttaagagatgaaataaagttaaacgtaaggggatcagtttccttccagaagcttaaaaggagtcgaactctaacgcttcgtaaaactaatgcttctcttatttttgcatccaagtctggccagtaagtcctgcagaaatcatatccaaatagaaaaaataaactaagttagtttgggaaaagaaatttactagacagcatagaacattgatattactcagatcattactttatcctgtaatatatataagcaacctcatcggagaggctgaaaaa

SEQ ID NO: 700587 - DNA, 1249 bp, Homo sapiens
taaatgctgcaaggaatgcagcttcgttacctagaagagagcctgccacaggccagattctgttgaatggctgcatgggggttgagaaaagctgaggcctaaaggatcagtggttatgaggtgggtaaacatggagaagaagagtgttgtaggcagagggaatagcttgcaccaagtctggggtggaggaagagggcgacgaggactggagtagagtcaaacatgacctagagaattaacacatttcaggtattgctaattcccaatcttacctccctcaaggtctccagagggggattagtacgtggcccaagggacctggggcaagcatggggwcccagacgacgaggcatctgggcggggggtctgtgtgctgctgcatgctccagtgctctgttggtcacagtcttagaaataggagcagtaggtgaatggggtcgttcaaggaagatggagagggccgggtgcggtggctcatgttggtagtcccagcactttggaaggccaaggtgggcagattgcttgagcccaggagctcaggaccagcctgggcaacatggtgaagccccatctctacaaaaaatgcaaaattagctgagcctgggagtcaaggctgcagtgagccgggattgtgctactgcactccagcctgggtgacagagcaaaaccctatctcaagaaaaaaaagaaaaaagaaaatggaaaggatgcaacagaaagtgagaagagggctggacggaggaggcatcaggaaacatgagctctactctttttttcgtatgtgattgttttgaaaaaattacttaacgtgctttttgaagattgccgtcctggttcttactggaactttacacataggcgtatcttgcagctttcacacacatgcagagggcattcactttttatttaataacacagtcaacgtaatacttacaactttcaaactgcagttggctatttcagtgcaaatcgctttaagagatgaaataaagttaaacgtaaggggatcagtttccttccagaagcttaaaaggagtcgaactctaacgcttcgtaaaactaatgcttctcttatttttgcatccaagtctggccagtaagtcctgcagaaatcatatccaaatagaaaaaataaactaagttagtttgggaaaagaaatttactagacagcatagaacattgatattactcagatcattactttatcctgtaatatatataagcaacctcatcggagaggctgaaaaa

SEQ ID NO: 700588 - DNA, 941 bp, Homo sapiens
acaacatgaattcaggtaaatcactgattagtaaccataatttccctcttaacagctaattcttaaagaatgcttactattaacttctttaatctcacaaaaaccttttgaagtaaatataaatattatctgcattttgcagaggaagaaactggagattagtgagattaagaaacagcttttaaattggaaaaccagctggaatccaggtctctttgggccaaaacacaactgcttaatcttctttgctgcctcttcatgtgtagataacagattcaaaaagcagaaaagggtagatttgcattgtagcattggaattcttattgcaataattgttcaattgcacaataccccccmaaaagtgcaatctgtgttcatgctactactctattgatataaactcttttgaaagaatttcataaatctgaataccagttgttgaaatgcttgactttttaacatttgaacgaatagattaattttaatgagtttatttttacctgtctaaattggtaaacatttaggttttctgactttctttgtctctgaatattttttccagggtcaacgtctttttgaaaagttgctccagctgacttcgcaaaatattgaaatcaagctagtgagtgatgtaacagctgattcaaaggtattagaagccttgaaattaaagggtaagaccaaggttgatatgctattctaccgctgggtgttctgttaagatacctttaatttcacttaaaataatatataatttctttatggttagtacatttcacttagtacatagtacatttacatctttgaaaaataactcgattaaagtttttgagtggaggaactaattaatatattgggatttaaaaaaacagttgcatattagtgtaagcaaaataatctactggtcaataaatgatgattaactggaaagaagaatctta

SEQ ID NO: 700589 - DNA, 941 bp, Homo sapiens
acaacatgaattcaggtaaatcactgattagtaaccataatttccctcttaacagctaattcttaaagaatgcttactattaacttctttaatctcacaaaaaccttttgaagtaaatataaatattatctgcattttgcagaggaagaaactggagattagtgagattaagaaacagcttttaaattggaaaaccagctggaatccaggtctctttgggccaaaacacaactgcttaatcttctttgctgcctcttcatgtgtagataacagattcaaaaagcagaaaagggtagatttgcattgtagcattggaattcttattgcaataattgttcaattgcacaataccccccaaaaagtgcaatctgtgttcatgctactactctattgatataaactcttttgaaagaatttcataaatctgaataccagttgttgaaatgcttgactttttaacatttgaacgaatagattawttttaatgagtttatttttacctgtctaaattggtaaacatttaggttttctgactttctttgtctctgaatattttttccagggtcaacgtctttttgaaaagttgctccagctgacttcgcaaaatattgaaatcaagctagtgagtgatgtaacagctgattcaaaggtattagaagccttgaaattaaagggtaagaccaaggttgatatgctattctaccgctgggtgttctgttaagatacctttaatttcacttaaaataatatataatttctttatggttagtacatttcacttagtacatagtacatttacatctttgaaaaataactcgattaaagtttttgagtggaggaactaattaatatattgggatttaaaaaaacagttgcatattagtgtaagcaaaataatctactggtcaataaatgatgattaactggaaagaagaatctta

SEQ ID NO: 700590 - DNA, 627 bp, Homo sapiens
ttcttaatttcacttcctaaccatctccacctgtatccctcatataaacatctcaaatgcaacatgttgactcagctcacatgctttctttccctccctgcaccaacacagcatctgtccctatacctgaatttccatgtgctcagtcactcatgttagaaactcaactccacgctctcgtacgccacatctaatgagccatggtctatagactctatccccccgtctttcttctagataccacatttcctcctcacatacctgccttatttcaggtctcttaatactttgcttaagcctttgtcacctttcctctttcaccatctgatcttccacacagctaccaaagagatcttccaccacatggttattatcaccttacgtgttcccccaaattgcatgcaggtgtgaggatgcctgaggaatatcatgcatgcaataaaaggcacaagtattaaatatatagctcaatgaatttcacaaagtaaacacatccacataaaaccgtcacgggtcaagatgtagaacgytgcagacatctcagaaagccttctcagtccctcttgcagtcagtgccctccgcagagggaaccactatttcgacctctaccatagattacctttatc

SEQ ID NO: 700591 - DNA, 627 bp, Homo sapiens
ttcttaatttcacttcctaaccatctccacctgtatccctcatataaacatctcaaatgcaacatgttgactcagctcacatgctttctttccctccctgcaccaacacagcatctgtccctatacctgaatttccatgtgctcagtcactcatgttagaaactcaactccacgctctcgtacgccacatctaatgagccatggtctatagactctatccccccgtctttcttctagataccacatttcctcctcacatacctgccttatttcaggtctcttaatactttgcttaagcctttgtcacctttcctctttcaccatctgatcttccacacagctaccaaagagatcttccaccacatggttattatcaccttacgtgttcccccaaattgcatgcaggtgtgaggatgcctgaggaatatcatgcatgcaataaaaggcacaagtattaaatatatagctcaatgaatttcacaaagtaaacacatccacataaaaccgtcacgggtcaagatgtagaacgttgcagacatctcagaaagccttctcagtcccycttgcagtcagtgccctccgcagagggaaccactatttcgacctctaccatagattacctttatc

SEQ ID NO: 700592 - DNA, 656 bp, Homo sapiens
aagatattcaaccggctcacggctctacaggctctacaggaagcatrgtgcaggcatctgcttggcttctggggaggcctcaggaagcttataatgatggtggaaggtgaaggggaacaggtacgtcacatggccagagcaggagcaagagagagagagtgggggtgagaggcaccacacacttttaaatgactagatctcctgtgaacttagagcgtgagctcacttaacaccaaagagatggcccaacccattcatgagggaccggcccccatgatccaaacacctcccaccaggccccacccccagcattggagattacaattcaacatgagatctgggcaggaacaaatattcaaattataccagagaggttaagaaaattgaccaaggtcacacagcaagcatgtggtgaatacgttttgttaacccaggtaactgactctagaatttatgctccttttaatctgtcacagttgagttttactttgatgacttgttattagtgactgctgtaaatctataactgtttaggtcatctctactgtacaatggtcatgggtgattgaaccactaattaatcatgtgtctttgggtttattcactcattaaacaatgacttgttgagccccaattatgtgacagctactgagtaa

SEQ ID NO: 700593 - DNA, 656 bp, Homo sapiens
aagatattcaaccggctcacggctctacaggctctacaggaagcatagtgcaggcatctgcttggcttctggggaggcctcaggaagcttataatgatggtggaaggtgaaggggaacaggtacgtcacatggccagagcaggagcaagagagagagagtgggggtgagaggcaccacacacttttaaatgactagatctcctgtgaacttagagcgtgagctcacttaacaccaaagagatggcccaacccattcatgagggacyggcccccatgatccaaacacctcccaccaggccccacccccagcattggagattacaattcaacatgagatctgggcaggaacaaatattcaaattataccagagaggttaagaaaattgaccaaggtcacacagcaagcatgtggtgaatacgttttgttaacccaggtaactgactctagaatttatgctccttttaatctgtcacagttgagttttactttgatgacttgttattagtgactgctgtaaatctataactgtttaggtcatctctactgtacaatggtcatgggtgattgaaccactaattaatcatgtgtctttgggtttattcactcattaaacaatgacttgttgagccccaattatgtgacagctactgagtaa

SEQ ID NO: 700594 - DNA, 1035 bp, Homo sapiens
taaacttactgtataaaaatgttagggccaggaggggtggctcacgcctgtaaacccggcactttgagaggccgaggcaggaggatcggttgaacccaggagttcgagaccagcctgaccaacagggcgaaaccccgtctctactaaaaatacaaaaactagccgggcgtggtggtgggcgcctgtaatcccagcttctcgggaggctgaggcaggagaattgcttgaacctgggaggcggaggttgcagtgagctgagatcacgccctgcactccagcctgggcgacagagggagacttggtcatgctccctccccgccctccgycagttttaggaataaatacctttttatttaagctaaagtgtgggtacacccttcctctaggattctccatcaaggaataagaagccatattaggacaatttagagggcagttaaccctagtagacatagtggttcttaaaaggcttggggcctcagactgtacacaggcttcacatggaatctgatttgttcctttatcccagtccctcacccagaacccgaatctagcccttcatgttataaaaagggccagaggtccaaagagggtaagtgccttgtgcaaaattattcaactactttgtagaggattttaactagggttcagttagctccgcccacactataaaaggctctttctaaaaaacgaaacatgattaagggcacacggctccagcgttaacaaagctctttgttagctgggaaatgcccccctccccgactcatctgcttatcatctgcatagaattatgtactcaaaagcaggaaaattattgagaaaaccattggtccccggctgcagaccccaaggttgggagctggttcccgtttcctcccagagccggcagggggggcaccaggcaaagtttgcaagacgcgcctccctcccacccctcccccttcctcgcccaacttcccatagccgcggcctcaactaaaagtggccattgacctttcaagctttcgagcagtgatgcaatagaatagtatt

SEQ ID NO: 700595 - DNA, 611 bp, Homo sapiens
tgtttcttccagtttggagggcagtggaactggggtgaccaacaatgaggagaggatgggaagatatttgctcaactttataccagtgaatctttctctagttggctaacccagtggctatataaggggtgtatgacctttgattagttaatgaagaaaataaaacatattttcttgtctcatgagcttttctctaggatarctaaaatagtatttctttaatcagctaattacttttctctgtccttatgtgacacataattatgtgcacttgcatgatcatgaaccacaggaatgaagagtttgggctgcaactatcagtttgattttgtccagcccagtcagcccaagacctataaggacaaagttacagtctgacaaagtcaggcttattggcttgttgcattgagagagattgcccaacagacaccatgggaccatctcaccaaaccaaagaaaagataaaattatagtaatttggaggaagggtagagtttaggtgaaatttaaatgaaacggtattctggtagactcaaaacaaagcagggctatttataatggggtgaacatctggtctggccttcaaagtagacccaggatcttgttgtctt

SEQ ID NO: 700596 - DNA, 2250 bp, Homo sapiens
agaattccaaagagtgtatatatgtgtatatgtgtgtgtatatatatgtgtgtgtattaatgcrcattaaaagaaaaataatagcagagaacaatggtgagtttgaggatctgggggctgatcaaagaaaagacagaaagatagaacaagaaggcaatattgcacaacgcaagctttattggacaggattgcagaaaagggaaagtcctcacagcagaagactttccagagacacccagaagaagagggcaagggaaattccaggggagacggggatcggtgagggggcacatgtgtccaggtggtattgcccagaagcaatacagggagtctctggctcagagagctcaaaagggctgcagcagtttggggtcttctacagctacaaggtttgtcttctctgtggctagcagatgttaaatgcaattgtgtagaggatgcaaagcaggtgagctgtaagtggctgaaaatatgcttatttgggctacctttaagcaattggctgtgaaagaatttgcgtttggccctggcaggttctgagctaaccatcctactgtgctgtgaataagcaaacaatgtaggggccaataaacaggggccatttttcactcatttctatgacaaatattcctttcaaagtcttaagttatgaaaattaaagcatctgatactacccagtaatctagaaccaaacaaaatggactgtattcatacgtgttatataaatccattatcataggaaagaaacactatacctcaaaacagctttttttattcctgtaataattttatacatgtccatatattagtttgtatcactctgcattttaactacagtattggttgatatgtctttatttcctactatactgttaacactttaaaaacagcaactttttctggctcttcttagtgccccaagaacctagaatgagtttccggtacataatggacacccaattaatatttcttaagggtgaatgaaggaaaataaagaatagaattatatgataccctcaagtcctgacttgaccactacacaatctatgcatgtaacaaaattgcatttgtaccccatacatttaaacaaattttttaaatgaatagaattataacatctctccaagtccacaaagaaatcaagaataattctatgtaatccatatttattttcaggttgtatatccatttttagctttattgttctaacacataaaaacaatcttcacacatatgtcaaatcagtgaataaactagcaactcacccatatttttaaaacataatttaattattaagaaatattcattaattccatcccagttatttttgtggatggctgaatccctaaatggaataatattagtttataacttaaaatgacctgggttgcaattttaaaactactcactaaaagtggtttaaatattggaaatttatgatcccacacaagtaggagtctaaaggcaactggctcaagtttgtctaattgactgctcaacatatctgggctctagttttgcttctctataatgtttttgcttttcttttgtggtacaaggtggcagccacacttctgagcatcatgtccttatacaataacgctcaatggcagaaagggaggtagaatttctccatgggtcgctctctttgttagggcaaaatagttctcccagaaggcccccttatgtcttgttggctagaacctggtgctgtttccacttcaaagcaatcacccacacgaggaacctgacttcttccatcaaaaagttggtgggaccagacacggtggcccaagcctgtaatcccgacattttgggaggccaaagtgggaggatcacttaagcccaggagttcaagaccagcctgtgcaatatagcaggatctcatctctacaaaagtagaaaaacttagtcaggcaccctggcttattcctgcagtcccacacttggggaagccaaagtgggaggattacttgagcctaggagttcaagaccagcctgggcaatatagcaggatctcatctctacaaaaaatagaaaaacttagccaggcatggtggctcatgcctgtagtcccagctacaaggatcgcttgagtccaggaagtgaggcttcagtgagctatgattgtaccacagcacaccagcctgggtaacaaagcaaaactctgattcaaaaaaaaaaaaaaacacatggagaagaggaaagaattagtggctccagttctactaagaggtactaagatgatgc

SEQ ID NO: 700597 - DNA, 832 bp, Homo sapiens
tttgattggctacaagcaactgactaacagctagccaacactggaggaagcaagaaactagaaactaagaaaataaggctgaaacacacacagccaagagcatttactcatccaacaaacatttattgagcaccataggcttgaatgtaataagcatccaataaaatatctggggaaagtatgaccaagtatgaccctctggtagttagacattcagactgtgtttttctttcacacattagcttttgctcactattaacaatgctgtaagttttgacaaaaagaaatayttccgttgcaagcaaactgaagtaatgtgttttttatagcaatatttgcttgccagggtttccaaactagactaatggagttcgatcatggaaattaatggttaaagatatgttctacaaggcaaagcagttggaatggttttagtcaattactgaaggcaattacattttatattgtaaagggactctcttatggccaacctgactgcctgtatttaagagttattatctttgttatttgtatgataaaatatttaacagaataaggattagagggttaagaaaagtgaggagtggagactggtttggcaatttcaagaatcggaaagagaagacgagtatcttatgcttttatttccctgttcaaatgccagcagccacacactcaaattgcctgagtcatgatcatgcaaaattaaccttgcctatttctgggatgaaaaataatttgaaagtatgcttgtaatataagatttttatttaaacatatgtttaaatattgatattcacttgaaaacaaactataaaatgtttaaatgaaa

SEQ ID NO: 700598 - DNA, 832 bp, Homo sapiens
tttgattggctacaagcaactgactaacagctagccaacactggaggaagcaagaaactagaaactaagaaaataaggctgaaacacacacagccaagagcatttactcatccaacaaacatttattgagcaccataggcttgaatgtaataagcatccaataaaatatctggggaaagtatgaccaagtatgaccctctggtagttagacattcagactgtgtttttctttcacacattagcttttgctcactattaacaatgctgtaagttttgacaaaaagaaatatttccgttgcaagcaaactgaagtaatgtgttttttatagcaatatttgcttgccagggtttccaaactagactaatggagttcgatcatggaaattaatggttaaagatatgttctacaaggcaaagcagttggaatggttttagtcaattactgaaggcaattacattttatattgtaaagggactctcttatggccaacctgactgcctgtatttaagagttattatctttgttatttgtatgataaaatatttaacagaataaggattagagggttaagaaaagtgaggagtggagactggtttggcaatttcaagaatcggaaagagaagacgagtatcttatgcttttatttccctgttcaaatgccagcagccacacactcaaattgcctgagtcatgatcatgcaaaattaaccttgcctatttctgggatgaaaaataatttgaaagtatgcttgtaatataagatttttatttaaacatatgtktaaatattgatattcacttgaaaacaaactataaaatgtttaaatgaaa

SEQ ID NO: 700599 - DNA, 635 bp, Homo sapiens
tacaaattactgcataacagaaaaatagcgccgggcgcagtggctcacgcctgtaatcccagcactttgggaggccaaggcaggcagatcacctgaggtccggagttcgagaccagactgaccaacatggagaaaccccatctctactaaaaatacaaaattagccgagcgtggtggcgcatgtctgtaatcccagctactcgggagcctgaggcagcagaatggcttgaacccgggaggcggaggttgctgtgagccgagatcgygccattgcactccagcctgggcaacaagagtgaaactccatctcaaaaaaaaaaagagagagaaataccattacatgtcccttgcttctaggagctaccttgatcaagtttgccgaagaaggaatcatatgcctcccctttgtttagtttactatcagattgatgggaattctagatgcccttactcttattactgtgattccctaacagcctgttcaggaatgcctccaagctgtatcttggatcgagttaaattcagcaactccttactacaaagcaacactcggaaatagacctaccaggtccttggtttaatccaatccacgaagccctgctacaagattctaaacttaatctatacaatctttc

SEQ ID NO: 700600 - DNA, 635 bp, Homo sapiens
tacaaattactgcataacagaaaaatagcgccgggcgcagtggctcacgcctgtaatcccagcactttgggaggccaaggcaggcagatcacctgaggtccggagttcgagaccagactgaccaacatggagaaaccccatctctactaaaaatacaaaattagccgagcgtggtggcgcatgtctgtaatcccagctactcgggagcctgaggcagcagaatggcttgaacccgggaggcggaggttgctgtgagccgagatcgcgccattgcactccagcctgggcaacaagagtgaaactccatctcaaaaaaaaaaagagagagaaataccattacatgtcccttgcttctaggagctaccttgatcaagtttgccgaagaaggaatcatatgcctcccctttgtttagtttactatcagattgatgggaattctagatgcccttactcttattactgtsattccctaacagcctgttcaggaatgcctccaagctgtatcttggatcgagttaaattcagcaactccttactacaaagcaacactcggaaatagacctaccaggtccttggtttaatccaatccacgaagccctgctacaagattctaaacttaatctatacaatctttc

SEQ ID NO: 700601 - DNA, 647 bp, Homo sapiens
ctctcaagccacccttccctgaccactttccccatcaccctccttgtcctgctggatttctttctcatcagcacttacggctgcccaacagaccacacatagtgtttatctgcatattcatttcttgtccattggccctgctctgaaatgcaagcttgatgagggcaggaataggctgttttgtgcatcactgcatccccaagacttggaacaatgtccggcaccttgctggccctctataaatgttaggtctcccaaaaggcaggagacagggtcactacaggcaatgaacacagcataagcaaaggcctggtggtggggacagagcataatccaagcagggacccacacggagttcctttgacctggtgctgccaccctggttaggggaaatgggctctgcttaccaccaagacaccttggacrcatggatttcttagaagcccagtgaaaatgctttgggctgactccttctccgatacttcctcatcccctgttctgtttgacccctcatcctttgccggggtcattgctgccttcatctgcagcccaaggataggggtacaggcagccagggctgggggcccctcagtcccaactagcagctttgggggtctttggaaggctggtatctaacagaatgaggg

SEQ ID NO: 700602 - DNA, 600 bp, Homo sapiens
aaagaaatggaaaccccaaatcaaccaaaaacgaaaaaaaaaaaaattcctgttttgtaaaccgcttccccaaaaggcatcaggatctgatgaatttactggtaaattatttcagatttttgaggtgcaactaattctactctttcaacagtatcagtatttgacaaacatttcgtgagtgcctacttcagtcctttattcagtctcagcccaatagaaagttggtgtcatgaaagataaactctttgggctcacggaaaatgacrgggaagttcattggttcatcttatcaagcaaacgtgatcttgacccctagacctaagagagaaaacctcctaagctttgcagtaatacaagaaatagcaacaacaaaaaacactggtgtatgtataattacagaaactgtgtctcctctacaattaaaaaaaaaatcacatacttcaaaggaagcagacaggaaattatatatgtaaataatgtatcgaaattaataagaacatcaagacctctaagtgaacaaactaagatttatgagaagctaacgtgaaaatgcttactgaaaaacgttatagcctaaattaagacaattactattttaca

SEQ ID NO: 700603 - DNA, 565 bp, Homo sapiens
gagccggtattgcaactttggttgtgagttccgaacctaagcggtctcccactaggctggggtgtcctgtagatccagaagccagctggaagaaagtgtggcatgaacatggcagaggttgttattaaaggaagacaatggggatgaccccagatgcactgccacatgacccagccatgcagacattcctggtgtctgagacttcataaatgtcattattgaagttttcaggaacgttttgaaaagtgagcaataaaagaactggatttaagctgggcayggtggctcacacctgtaatcccagcactttgggaggccgaggcaggcaaatcacttgaggccaggagtttgaaaccagcctgggcaatgtggcgaaatcccatctttactaaaaatacaaaaattagccagatgtggtggtgcacgcctgtaatcccagctactccaaaactgaagcaggagaatcacttgaacccaagaggcagaggttgcagtgagccaagattgcgccactgccctccagcctgggcgacacagcaagactccacctcaaaacaaaacaaaa

SEQ ID NO: 700604 - DNA, 565 bp, Homo sapiens
gagccggtattgcaactttggttgtgagttccgaacctaagcggtctcccactaggctggggtgtcctgtagatccagaagccagctggaagaaagtgtggcatgaacatggcagaggttgttattaaaggaagacaatggggatgaccccagatgcactgccacatgacccagccatgcagacattcctggtgtctgagacttcataaatgtcattattgaagttttcaggaacgttttgaaaagtgagcaataaaagaactggatttaagctgggcatggtggctcacacctgtaatcccagcactttgggaggccgaggcaggcaaatcacttgaggccaggagtttgaaaccagcctgggcaaygtggcgaaatcccatctttactaaaaatacaaaaattagccagatgtggtggtgcacgcctgtaatcccagctactccaaaactgaagcaggagaatcacttgaacccaagaggcagaggttgcagtgagccaagattgcgccactgccctccagcctgggcgacacagcaagactccacctcaaaacaaaacaaaa

SEQ ID NO: 700605 - DNA, 610 bp, Homo sapiens
tttgcataagaacccatatatcacagggcacgcccttagggcttatggttcaatcccacttctaagaaaatgttctgattcagtgtcagcaaggcccttccccagctgactgccggactctgtgggacaggacaccccaacttctcaacaagccttctatggggacaccggactctaagctcttgccctgctctatcactgctccatcttggccagctctttgttcctcagtaaaatcaggctttgcctatctcgaccacggccaggcggtcaggggccctcactccatgtctgactcacagctctatttccaatgcagaccttccttctggctggaaatccacctgcccagcagccagcgagagacctggaggaactggggaccatgacaaggcacacccatatgccaaggttctttggtgtacatcagctcatktaagaggacagagctatctcaggaaagacaaaaacagacctcagaacccctctccacagtggggaaggacctgtttttaatacagtctgaaagataaaaggattctgtctccaccgctgtccactgaggcttcgactcaaatacatactgctcaaccagaccctaaaacatcca

SEQ ID NO: 700606 - DNA, 585 bp, Homo sapiens
gtaagtaagtcagcaaatctcattgttttgagctaagtgcctacgttaggctctccctaaacaggtttgatgggctggttttttcccaatatgctttggaaatcattgtataatactgacaagaaaagtgtccatctctgcaccacccaaaatcactgcctcccttgggagacaccggccagagcaaagccttcccaacagagcacagcgaccccatagagtggcccctgcctgtcactgctctcctggaaaccaagaacaggagttcttacacctgcccaccttctgccctcactcccactgscccaacagcaaacccttcctcccctgctatggaccttgaaaagctctccgtcctaggactctgccagccccgggccctcaagcctcatctgcttccagcccctgacttcatgcctgaagagcagcaagctttttttttttttttgagactgggtgtcactgtcacccaggctggagtgcagtggtgcattcacagctcattgcagccttcacttcctgggctccagcaatcctcccacttcagcctctggagtaactgggaccacaggctcatgccaccat

SEQ ID NO: 700607 - DNA, 774 bp, Homo sapiens
attttctaattcatctaaatagaaggaccatcaagatttctcagtttttggacatttcataatatayatgaatgtttaaatgttcctcaagtcagagggccatgttgtataaatccttcacaaagtatgttttacttgtactttctgaacaacccgtacaaattagctatcacacaatggaaaggatgtctggctctgacagctgccattttctgctcagacagttactgacagagtaagaattaagcctggtggctcaatggtcagctaatccaggccggccctgattccatgggctggtagattctaacaaactatttttagttttttcacttacaagataaaaatatacttttctagcttggatattatacatataccagtgggttttaaagagaaacacgtatttaatctaatttaaaatcaaaaggctatgtagaggcagcaaataacttaagataaaattgcactaggctgatcaaatttggcttccagtaatgaaatacaacgatgtgggggtttgtagttgcatcatttaaactgtcttacgtggaatcagattcagcattgcactggagaaagaatcctacgcttttttggtgtggtctgtctggataaaagcgtggcatcaccataatcttccatggcagatttcgcacaaaacacggagggctaaggaccgactcactcagtctgctgaagcgctccacagtgaactgaaaggttgcctcggagcgccaactggtgtctgcaaaaaaaacacatcatcagtca

SEQ ID NO: 700608 - DNA, 621 bp, Homo sapiens
ctggcataattcattttcttgcagttataggactcatggcagcttgcttcttcaaagcccacaatcaacaatgaatggagggaggggaagaaagagagagaaggacacagatggaggaagagagacaggaactctagcacagtggataacagaatattatgtgatcacatttctgttggtcagaagccagtcacacgttgtattagtcagttttgcgttgccataaaggaatacctgaggctgggtaatttataaagaaaagaggtttatttgtctcattgttctgcaggccatacaagcatgattccagcatctgctcctggtgaggcctcasaaagcttacaatcatggcagaaggtgaatggggagcagcgtatcacatgagtgagggaaccagagagaggaggaggtgccaggctcctttcaacagccagctctcctctgatctcattatcttggggagggcaccaagccattcatgcgggatctgcccccataacccaaacacctcccactaggccccaccttcaacactggggatcacatttcagcatgagattcagaggagacaaacatccaaaccatgtcacagttcctaaccatactcaaaggctcaaggaa

SEQ ID NO: 700609 - DNA, 1658 bp, Homo sapiens
aacaaaatggtgtgtaattagttttatgtttgagaaatatcatccttatagtaatatagaaattgcttcctaaatgtcctcccttgtamtttatacttaaaaattctggaagaacataacctcctgccctcctttgctttctttgcaaagaacctactgcaatctcagcataagaggaatttattcatctccatacaaaatgagagaatattattggaacatgtttatttaataagtagaatgtgtgcttcgacacaacctgggcctaagttaaaaatatagctttactggctgggtgcggtggctcacgcctgtaatcccagcactatgggaggccaagacgggcagatcatgaggtcaggagattgagactatcctggctaacatggtgtaaccccatctttactaaaaatacaaaaaaattagccgggcgtggtggctggcgcctgtagtcccagctactcggtaggccgaggcaggagaatggcgtgaacccgggaggcagagcttgcagtgagccgagatcgcgccactgcactccagcctgggtgacagagcaagaccccacctcaaaaaaaaaataattatacacacacacacacacacacacacacacacacacacacacacacacacacatataacaaatatgtatagctttactgcttaatagtcatgtatcatttttgagcctcagtttttgtcatctgttacaatgggaatggtactcttcaaatggttattttgagaaatattttcagtatattgaagcccctcggtcacattttgtttgtatgctggtgtatatgactgttttcttggattcttaaattattcctctcagactatacgttcaaaatgaactgaatgaaatgctgttggatttacatcgccataaaaatgaaacaatcaactacctaccactgaaccaaattttattttgaactttattggtataatatgtcagtgacagaagagaaaagatttcagtgcaaccgctttacattccaaacaatgcataattagggctcagagcaagaatcaaaatctaggtacacactgagttttaagcacattctaacagatcctgaacaaaaacccaaattctgttctgcacagatggtggaagacaatattcctgtgctgccaaaaatatgtgttgactgagcgaagaactaaatgacattaggattgttctttcagtattacctttcatgcgggcttcaagttgtttcagactaaatggaaaacgttcaaggacttatcagagaataatcagtgcacacaggatgttgatgctttgtcaggatgtgtttcaatgtggaataagatttcaaattggattaatatgcagagtctcaaataccaaacaccaacactgctagcaaacttgatcatctaaattccagagataaaagagtgggaaggtttgcaaatagtatatagattgggcccagcccagtgtccatctcatcccatgttttctggggggaaagcacgtttcctcctggggacatcctgatctaatttttttcaatacacagcactggctaaattcagatttgctgacccctggagtctagttattctgctctgccaatccaaatgatgctttctcaacacttgcattggctgaattatttaaaatcatttaaatg

SEQ ID NO: 700610 - DNA, 648 bp, Homo sapiens
agtaggtgtgatatacgcacaaacactggcctgcgcaggggtagaggtgttcgtggcttggagggagagggcagatcattggacactggctcccctttcctcttcttactttctgaagaattttcacttgtgtcctggactggtttcccagactacatacatccagacacatagagcatatagagttaaatgcctgacctgcttctgcagggtttcaaagaccaggatatgagcatccattttacatgatgtgtgctaatatatatatatatatacacacacatatatatacacttatctgtttatatataaattataaaataggaatacacatatatacaaatatatacacattttggtatatattttacatataaatatatacacatttttgtatatattttacatataaatatatacacattttggtatatattttacatataaatatatacacatttttgtatatattttacatataaatatatacacattttggtatatattttacatataaatatatacacatttttgtatatattttacatataaatatatacacatttttgtatatattttatatattatatttatatacatataaacatataaaaaatttgcacacattatgtgtgtgtgtktttgtgt

SEQ ID NO: 700611 - DNA, 648 bp, Homo sapiens
agtaggtgtgatatacgcacaaacactggcctgcgcaggggtagaggtgttcgtggcttggagggagagggcagatcattggacactggctcccctttcctcttcttactttctgaagaattttcacttgtgtcctggactggtttcccagactacatacatccagacacatagagcatatagagttaaatgcctgacctgcttctgcagggtttcaaagaccaggatatgagcatccattttacatgatgtgtgctaatatatatatatatatacacacacatatatatacacttatctgtttatatataaattataaaataggaatacacatatatacaaatatatacacattttggtatatattttacatataaatatatacacatttttgtatatattttacatataaatatatacacattttggtatatattttacatataaatatatacacatttttgtatatattttacatataaatatatacacattttggtatatattttacatataaatatatacacatttttgtatatattttacatataaatatatacacatttttgtatatattttatatattatatttatatacatataaacatataaaaaatttgcacacattatgtgtgtgtgtgtktgtgt

SEQ ID NO: 700612 - DNA, 3736 bp, Homo sapiens
  misc_feature 264, 265, 266, 267, 268, 269, 270, 271, 272, 273, 274, 275,276, 277, 278, 279, 280, 281, 282, 283, 284, 285, 286, 287,288, 289, 290, 291, 292, 293, 294, 295, 296, 297, 298, 299,300, 301, 302, 303, 304, 305, 306, 307, 308, 309, 310: n = A,T,C or G
  misc_feature 311, 312, 313, 314, 315, 316, 317, 318, 319, 320, 321, 322,323, 324, 325, 326, 327, 328, 329, 330, 331, 332, 333, 334,335, 336, 337, 338, 339, 340, 341, 342, 343, 344, 345, 346,347, 348, 349, 350, 351, 352, 353, 354, 355, 356, 357: n = A,T,C or G
  misc_feature 358, 359, 360, 361, 362, 363, 2039, 2040, 2041, 2042, 2043,2044, 2045, 2046, 2047, 2048, 2049, 2050, 2051, 2052, 2053,2054, 2055, 2056, 2057, 2058, 2059, 2060, 2061, 2062, 2063,2064, 2065, 2066, 2067, 2068, 2069, 2070, 2071, 2072: n = A,T,C or G
  misc_feature 2073, 2074, 2075, 2076, 2077, 2078, 2079, 2080, 2081, 2082,2083, 2084, 2085, 2086, 2087, 2088, 2089, 2090, 2091, 2092,2093, 2094, 2095, 2096, 2097, 2098, 2099, 2100, 2101, 2102,2103, 2104, 2105, 2106, 2107, 2108, 2109, 2110, 2111: n = A,T,C or G
  misc_feature 2112, 2113, 2114, 2115, 2116, 2117, 2118, 2119, 2120, 2121,2122, 2123, 2124, 2125, 2126, 2127, 2128, 2129, 2130, 2131,2132, 2133, 2134, 2135, 2136, 2137, 2138: n = A,T,C or G
tggactcctgctatcctcctgcctgagactctcaagtagttgacactacaggcacgcaccaccatgcctggttaatttctttgtttgttttttgtagagatggggtctatgttacccaggctggtccagaactccttagctcaagtgagcctcccaccccagactcccaaagcactgaaatattttttatttttaaagatttattcctctcaaacaattacacagaaaactcttctgctttacagtacattacctcaaaatttnnnnnnnnnnnnnnnnnnnnnnnnnnnnnnnnnnnnnnnnnnnnnnnnnnnnnnnnnnnnnnnnnnnnnnnnnnnnnnnnnnnnnnnnnnnnnnnnnnnnagcttccaaaacagttttccgtaagtcctgttttggtatagtaaagctgatgttatacttaaataaaatttatggtaatctgttacatgggtggccccaaatggattcacacatttgtacccttgaacctgggctagatttgtgacttgctttaaccagtataataaggcagaaatgatactgtatcccttacaagtctaaaccttaagaagatctggttgcagaccaggcacggtggctcacgcctgtaatcccagcactctgggaggccgaggcggacagatcacctgagctcaggagttccagactagcctgtccaacatggtgaaaccccatctctactaatacaaaaattagctgggcatggtggtgcacgcctgtaatcccagctactcgggaagctgaggcaggagaattgcttgaacctgggaggtggaggttgcagtgagccaagactgagccactgcactccagcctgggtgacagagtgagactccctctcaaaaaaaaagatctggttgcttctgttttgtactcttgtgagccctaagccatcagctaccaggtaaggccagcaactctgctggaaaggctacttggagagaaaagcagccattagagtgatcaccagcaaaacctgcccaactgagcccaacccaggaaagcaaaactgtaacaaagaaaatggttgttttaagtcacttggtttagggctgtttgctacacagcagtacataactgaaacaacactcacctggttccttgtgtgttctgcataatttgttcaaaccccagaaaaaggagaggtataattaattacactccgcaaaattacaacctgagaagataaagttctatgcccttgttaatgttagtgattccactaaactccaggttccaagaggaaaggcttcatatctgtcatctcaacactgtactcccagcacctagaaatatgtctggcacatagtaggtacgccagtatgtgctgtgagtgaactgtagatttaagaaatgtcaagacggccaggcgtggtggctcatgcctgtaatcccaatactttgggaggctgaggcgggcagatcacctgtggtctggagttcaagaccagcctgaccaacatggagaaaccccgtctctactaaaaatacaaaattagccaggtgtggtggtgcatgcctgcaatcccaactacttgggaggctgaggcaggagaatctcttgaacccaggaggcggaagctgcagtgagccaagattgcgccattgcactccagcctgggcagcaagagggaaactccgtctcaaaaaaaaaaagaaaaaacaaatgtcaagactaaatcaacaaatgctactcttccttataacttaaaaaccatgctagtcttccttataacttaaaaaccatctgacgtatggttttacattatacattccctaaaaaagttgtttaaatgtatgaattgaagcatccactaaggagggctttttaatatctttgggtttttttcaatggtagagcttatgatctaatacaaaaataataaaatatcatgatacaggttgagtatccctaatccaaatatccaaaatctgaaatactccagtgaatgtttctgttgagtaatgtaggtggctcaaagtttcccattttggagcatttcaaactttgaatnnnnnnnnnnnnnnnnnnnnnnnnnnnnnnnnnnnnnnnnnnnnnnnnnnnnnnnnnnnnnnnnnnnnnnnnnnnnnnnnnnnnnnnnnnnnnnnnnnnnaaaaataatttaaagaaaataagcactcttaataaaaaaataaatttaattgggttcttttttgggggggttctcccagattgatttaatatttgaaaataggccgggcatggtggctcacgcctgtaatctcagcactttgggaggccgaggcggaaggatcacgaggtcagcagtttgagaccattctggctaacacggtgaaaccccgtctctactaaaaatacaaaaaattagctgggcgtggtggctggcgcctatagtcccagctacttgggaggctgagacaggagaatggtgtgaacccgggaggcggagcttacatgagccaagattgcgccactgcattccagcctgggggacagagcgagacgccatctcaaaaaaaaaaawttttttttgaaaatataaatttaccatattaacaaataatcgggaaaagctatttgatcctctctcaaaattttgcagatggggaagggaggtagaaggaaagagtgctggattctttatgggagatccttgagcctccctcttggtgcaggacaacttatcaaaactcaccattccaagttagggcttcttgataagcactcacatttaaaaacagaatcttttattgtgaaacatcacacatacacagaaaagtactttccttcaaaatatatagatgaaactgatttatcacaaaatacacatttgtaaccatcacacaagtcaagaaagagaacattgtcagcaccccaggaatactctctcatgtcgcttccgaaacactgacttctcgagttcttgtgtttaagaaaaaggaaaatattttctggttattgtattttaaaattgaaaactagtgtcttaaactcagaagtaccagtttgtatttatttatttatttatttatttatttatttatttatattttattttatatttttaagacagagtcttgccctgtcacccaggctggagtgcggtgcaatcttggctcactgcaacctctacctcctgggttcaagcagttatcgtgcatcagcataccgagtagcttggattacaggagtgtgtgccaccatggctggctaatttttttttttctttgggatttttagtacacccccggtttctccatgttggtcaggctggtcttgagctcctgacctcaggtgattcaccctccttagcctcccaaagtgctgggattacaggtgtgagccaccacgcccggcccaccagtttttatttttaaaaattattcttctttaccatattaagaagactaaagagaaattaacgggaatcacagaagaaaaaatgagaatgggagaaacaagagattgagagtcttcaaaatagaataggaaaaagataaaaacgtcatttccataaattcagagacctaccaaaaccagaaccaaaattaggatagatatgcgcaatgaaaagatactgtgcacacagatgaaagaattttcatggggcagtatcaccacatatttctttaaggcgatttctgctaaaaatctcttatatgggtacttttgaaattatagcaaaatgcagtatattatttcatagacactttgtgccttggatttaat

SEQ ID NO: 700613 - DNA, 219 bp, Homo sapiens
cacaaaggaatgtccaactttcagctgaaatgagaatgtctttatctaaattccactaaacctggcayctttcagagagttctctgacagaaacaaaagttaaacacagtgtctgcaagcctgccaagctccccttatcagaataaccttcaatttagggctggcctatatcattgactttagaaaattacctgtcattccatttttgcttcttgtgtc

SEQ ID NO: 700614 - DNA, 1623 bp, Homo sapiens
catagaggggaccagtgggaactgtgggacagagggaggtctgcacaccctccctggacaccatgaggcccatcttgggtcccctgagtccagaccagcccccaagaagctcacagtctggtaggaagccgaggaggcaaacgaacaggaacagccctaaataactgcacagtgcccaggctgccaggagagtgtgtgggcagagaaggctcccagagcagaaaaaggatgctcaaggatgtattccaggccagggagcagcgtgtgcgggggccgtgcggaatggcgcattctgcaaaatgcaatgtggcgtctggctggggggccactcygcactccctggcctggctatgagtccaagccacccaggggtgagcttctgtagagcaggagtccctggctcttccctgagaggggacgtcatggccccaggtgtggctggcagaggacctgcaggctagggaagagggcatgaggtcggcaggttagaagtggctggggaagcacacgcaggtcgcctctctgtggcagttgtctcttctgtgaagttgagaccggtgggggagataaagtactaagcactgcaaatacagagatccttggagaaatcgagtcactggagtctcctctaggaatggggggctgctggggtagggccagttccaggcacggagggggctgagggacacagcaggacaggctccagaccatccccaagtggcctgaaggtgacctcgaccccctcagctgccttgtgtgtgtccctccggccctggcccagaaaggagatggtgcatgcctgtttctagacctctagacccctcgtggggtccctgggctctctctgccagggacaagcaggggcaccttgctccctttacaactcccactgtccagcgagagttggagctcgctgagtgccacatgccgttaggacctaggtgggagatgggggtgccgaagaggggatggggactgtggagaagtagatgaaatttccctaggctggctggatgtgccgcaagtgtctgagcaggggctaagcccacccccttgaatctcagacggagccactggggcccggtgaggcccaacaattgtccccagagcctcagagtgcctacagggcacagtgggaggcagcactgagctgaaaggagcgtaatctctaagcaggtttaacctaaaatagagcctgatagctcaatgacagatgcttaatttgtcacaatatttctgtcattatgctgggacagatattcttggtttgttcaagaacaaggtctttttttttttttttttttttgagtcattatacagcataaaagagaccacaccccaaacaagattgggacagcgctgggcccctgagccaagccaagaggaatcaccccgcccacacaaccaccccgcccacacagccttcccttcccggagccacgagccacaaccaggcctacctggctggaagaggggcttcaggggctgactccacctgggagtgggtgaggggaggtgacctcaagctcctttaaagccttgcctctcaactcctcactcccaaatccctccaaaggagataaaatgactcctataaagattagagatcatgcaccagcatga

SEQ ID NO: 700615 - DNA, 2657 bp, Homo sapiens
  misc_feature 1133, 1134, 1135, 1136, 1137, 1138, 1139, 1140, 1141, 1142,1143, 1144, 1145, 1146, 1147, 1148, 1149, 1150, 1151, 1152,1153, 1154, 1155, 1156, 1157, 1158, 1159, 1160, 1161, 1162,1163, 1164, 1165, 1166, 1167, 1168, 1169, 1170, 1171: n = A,T,C or G
  misc_feature 1172, 1173, 1174, 1175, 1176, 1177, 1178, 1179, 1180, 1181,1182, 1183, 1184, 1185, 1186, 1187, 1188, 1189, 1190, 1191,1192, 1193, 1194, 1195, 1196, 1197, 1198, 1199, 1200, 1201,1202, 1203, 1204, 1205, 1206, 1207, 1208, 1209, 1210: n = A,T,C or G
  misc_feature 1211, 1212, 1213, 1214, 1215, 1216, 1217, 1218, 1219, 1220,1221, 1222, 1223, 1224, 1225, 1226, 1227, 1228, 1229, 1230,1231, 1232: n = A,T,C or G
taaagaacagatgcttaggaataaataaacaattttgttggtgagtgttgttaccaaattataatcaattcaagtcactaaattggactattttatggtgctattgaaaattatacttacttggatagtaaaagaaaagactagataaggattaaatgttttactatgttccctgattcttccagaatttgtgtcaagtgcaagcttatgaaacaaagtgccaacttacaggacttttactctctgcagtgatttgtctatgttatgactttctaaatgtttcaagattttaccatatgatctcagttctcaaaaacaaaattatgtatgctatcttaatgaataatcaccaaatgaaggttagtatactacatacaaaaatacatataaaaataataataaaaaattctggaacttaaaaaagattaggcagtctgttcatatacatgttacaatgctgttttaaatgaatttttttgaatcatacacattggctatctcatacattcccattccatcttatcttcacatcacattctcccctgactgcttggaccattgcatttatcgctaacccactctgatttattccttgtccatatctttggctttcatgcttttgttatttccatgctagctatgctattgaagagggcatttctgatctccaggagcaatgcttaaaaccccccgcttctaaaccttgagctgtttcatctggacctatttactttaggggctattacctggaccaaagttttgagtgaggatagttatattgtaactatttaatgctctgtgtgtatagagattttttgataaaattataatatttgtcatcatttacccactaataccgtctattagcattattttcatatatacctttgctatgatttaatgtcctctccaaaactcatgtggaaatttaatctccattgtaatgccactaagagatggggcctttgtaaagtaattaggattaaattaggacatcagggtgggacccccatgatagtactggaggctacataagcagaggaaggccatatggtagttttttttttttttccgtactagttctgaacatgagctctctttctttttttcctgcttctttattttaaaatttnnnnnnnnnnnnnnnnnnnnnnnnnnnnnnnnnnnnnnnnnnnnnnnnnnnnnnnnnnnnnnnnnnnnnnnnnnnnnnnnnnnnnnnnnnnnnnnnnnnnacaaatgtgaattcaattaatggttttcttttttaaaataaaagcagaaatatttgtaagatacaaaaaatggaaaatagaacataatgtagatttacttaggcattacacatttttgaatacccatgaagtattgaaggggttaaaactgtaattgatttaaactttctgttatatttctgtagctgtaatagttttcaatatttcaaaaataaaatcatactaattttgttatgtgttattctattgtacaccagtttctgagagaaaacatgattgtatagccaaaggcctttaaaattaattcatccaggtaaattttctttgtatatcatattaaatatgtaatttgcagcaaaggacaggtccttttgggtttaatctgaactttgaattttgaatctcagaataaaatttatttgagctgaatcttacaaatcaaaatatcttctacatgaacatggagaatataaatataaatgcaaagatatttgtattatatttacaaaaacgttctttgacctctatttagttgtgtagaattgatattctgaattatacctgccagcctttggcactgatgagaattctatctcaaggatataataggctaatgcctcatgacaatagggcaaaggattagagtcctattggagattatgtatttgtcagttttgtgcatttagtttgagcaatgtgtggaagaagtaaaatgtgaatgttcatatrttgtgcatagctcatactcaaactacagtgaaaatgtaataaaatttgttccatgagtacatgcctaatttgtgtttaaacctgcataaacaatttatgattatgtcagtcattatacaagagtcaatcacataatttcattgcagtttttcagtctaaacagctttggtagagaccgtttgaattgcatctctacgctctttctacccaggacccctccatgagcaaagctgccccttgcccagtttttcccatatcactcaaaattcactgcatcagtctcttacttgcagcttttttagggggaggacaattccagtaggctcctaaatcgtttgcctgtttctacaccccacatggcagccggagtatacgtttataaatataaatgttcactcctttgcttaagacttgccataggatttccaataaaacaggaataaaattcaactgttttcttcacttcggtctcaattgtctcaattctccaagcttatttcctgttactctcatcctcatgctgtgttctagccacctgcactcgctagctatttctccatcttgcccaacttgctccctctcttgcggctcttgtaggtgcttcctgagtttctgaaacattcttccctagatcctcaagaaacgtctcatattttaaaactttgaacaattgccatctaatagagaggagtttta

SEQ ID NO: 700616 - DNA, 2169 bp, Homo sapiens
aaaatctttcctaagagaatatgcaatcatcaatttttatttattaaaatttgcctagagggtagagtttgaattctctgaattttacaaaaagctttcaaactttagaatatgtatatcctgcttaactgtgctctgcattccactaaaccacatgcagttcccaatggcttagagtctcaccgtgcctaagtatgtagggttcttgtcttctttcctttagcccagcagtattaaacttgataagagctaaaatttggaagactgtatcaaatgtgggttgtgaacttttttatcttcttcaggcaatttcttccctagtgaagaataagatgtttcatttcagtgcccacatgtttataatcaagctggtataatgttgttttgaagttcttatggtttctatgttctttagtaattgagaataagaataatacagtacactgcagatactgcctaggatacttattcataggagagaaaaatggaggcattgtccaggtcttttaaaatctctaaaggtgaaaatcatttcagaaacatacaacaggatatttatactttttatgggatttccatttttcatgttctttttcattttgacttttccatttcctgcttttctgataatcgacataaaatttcatttggcttatacaaacataactgcccttacatacagtaagtgcattgacttgaaattatttatggtgaaataaccactatatattgtatcttatcactatgcccgatatctaattcacagtatgtcttataaattgatagtattaggcaacttttatttggaagtatatttcatttaaaatatatcatttaagtggaaaatcatatttgcttagattaataatgagtatttctattatttagttgtgtttgctttcataaatctgaaagaaaaaaatactttmttgctattcaggtctaagacaaaaaaatgttttctcttttaatgctacaacacacaggtagaaaaataaaaatgatattttagcaggtgccagctacatctaatatgatattctgtcaacacagaaaccatgagttgtatgttttaaagattgcaaattgttttcttcagtaaatacagactggattcctgtgtgtcaaaatgatgctctctaaaaaacaatgaaattttgcatcaaaaaaacaacataaaattgtcagccatgagacaaatatagcttagttcaaattccaataagcaacattgaaatgcagggtacaagtcgatgcactataaatatgggaatgctatatggctaatagaggtttcaatcaggaaagatcttttacttgaagggtagtcagggttatcccacatcattacagaataatcaaaataatatattcaaataataaaatgtataaaatagtattttagtcacacatataaagctcaggatgtcagagatcctgtataatctaataatatgtgataatgatgactatgataagatttaaattgctcacattgatctgaatgatgtaagaatcatagaaggcctggcgacctctttcaaatttcagcaactattttatttgaaaaaataaatgcagaaaatgctttttgaaagtattcccagtaacattaatagtttaaacatattctgactgtctatctttgaccttcttagacatattatgtttactatgcatgccctttaaagatctgttaaaatgaatgaattcacacattcttctgagcaatgctattgatttttccaaaaccaaaacaaaacacacaaacaaaaaaggattaagcactcactattaattaaatttagagtatgtggtttttatatatctctaacccttccaaataaaaatccacccaacagaaattctgggatcgtcctcaagtatagtcctctcagagtggataaccaaatctaattacattcctgcatagaatgcttcagtattacccattacatttagcctagattttcaagttgctttcctagctaaatgatatcacttatctccagttactctttaaacacttatagaaatgggactattatgaaagctgtgagatattgcatacaaaacaagatatgtgtattggcattttaacaaagcaatgcaaatgtagatatgaaggtttatatgagtttgatttggttgcctggacttcaacttgat

SEQ ID NO: 700617 - DNA, 641 bp, Homo sapiens
tcaaaatattgaatgagcctgtgttctctctacagaatataacattctgtggaaagcttaaaatcttaaataatgcctatatatttatgcacacagatataataggttatctataaaatatatacataaaggtatatgaaggtatacaaatacatataaagatgtgtgtatatataggtatatgtgcatgtatttgtgtgataatgtaaaacataaaatatacttcaaaaaaattattctgtcccccaaagattctgctatcgccccagtttgttttccctatttcctcttttagtttacaatgaagcctgcctgcaactgaacctttactcttcttccttccctctcactcttctccagctctgtgactttgttgtgttttacatgtcagtaaatggcaccctcctatactttgtaatttcaaccagaaaccaaagaaagattctgacaccttattctcagacacattctacaaggtgagtgcaaaaattgcgttttttgcattgttggaatttgctgtttgatcatggaatacattcttaaataaatgtggttatcttatatatcattttaatgggcatttcttgcattattatatatatatwttttttgctaatgacattacttgctgtttattttgt

SEQ ID NO: 700618 - DNA, 2673 bp, Homo sapiens
aaagagggtcttagcccttcctcaagcagcagaagtgctttcctgctggccttgaagaagcaaacagttgagttgtaaactacctatggaaagggcctgcctctaagaattgaggacctgaattccgtaactgtaagaaactaaattctaccaacaacctgactgatcttggaataagatcttgagtttccagattcctggcctcctgaaactgagatcataaacatatgtcattttaagctgctaaatgtgtgataatttgtaccttaacaacagaaaactaatatatttcttagtgcctcagcacccactgtagttcatacatatcctctttccctttcttttacaacctagaaagattctataatgttctgatcagtttcagttactaaaacttagccctgtccagttcataattttaacttcatatccatttacctattcctcttggccaggcatagtggctcaagcctgcaatccctgcactttgggaggctaaggcaggaggatttcttgaacctaggagttcaagaccagactggacaacatagcaagaccccgtctctattaaaaaaattattttctcatccagtacaggttacagctgtggtgttgtctggttggagtggtatggacagaattttgctttttcctccaatttcagggtctaagttcctatgttgagagaaataaatgggagcaggggacccagagatattattatatgtgtgtatgtggtgaatgatttgacctatttcatctggcttattcagtctgcaaaagtgttgtgcatgcttttcacaggaccatgctcagcttcactctggcctcctctgttgctgaggatccctcagagaggggcagctggactcccttgatctcctgccagtggactattccccaaatgccttcttcagatgaaaaggactattagtggtcatggcacctgactggggagtccaagagctcccgtcccttctctatcccctacactcccacacctgagagctttgggtatgtagaggttctcttctgtggtttctgaggattatggagaactggaagggacaaggttgtccccaactcctgcaaaattatgctacagtcttttcaagccctgatggaaagtcccttcaattttcctgccttctgaaataaatatgaagaagcaagtctgtatgttcacaaatgccctttaatttaatttcaggggattcatgttagcttctcacataccaggagcaatatcagtttggtctacataagttttagctcaatattttttcatccagaaaatgaaaatagagctttctttcctgtaagcctctccatacactcaccagtctacaccagtgttttgtaaaccctcatccattctaacatacaagacacctctattgccttcagaagaagaacaacctcttacattgagaattctactcccctcagggttggcttctctttgttctaccactttccatcttcttttcatatagactggaaaatatttgtttaggagacagggagtgggtgtccatgtgtgaggtgagtaaaacacatttggtttgggtcacatgtaaagccctttagggtggagtctagatttaaatattgtatatcagttgtacttttctttagagttcagagtataagagatattttttctcaaatgtgagctttagctaaacttcctgaactgcaggaaaagtctcacaaaagatctcattgcatagttaattgtttcaaaatgttaaaactagctatctgagaagaggaaattgtaaagctttaaaggccagcaacatccatgctctttttacctcctcccacaaaataaaatgtgcttattcactattaatagttraagcaagcagtcaaaaaatttctgttcactatccttcctactggtactatgaaaaatgaaagaaaaagaaagaaactcagattttaagtttgatttttcatacattagactctcagccagtgacagcaccaactggacacaaaaccatcacaaaaaaacaaacttcatttcaaataactgtggatatacccccttgttgatttcagggctcagaccatcttgtgtctgtgatcacttctagacaagtctcaggtgttgagagtatctcccacagttacaaatgaaacaaacaacaaacctgcaaagctgcatgtccactcaggaaagtatacattttcagtgtcaagtccttttttaatttataaactttatgtttaatacaacttttaggttcatagcaaaattaatcagaaggtacagagatttcccatgtacccctaactcccaatatgcagagcctcccccattatcaacataccccaccaaagtggtacatttgttccaattgatgaacatacattgacacatcattactatctaaagtctacagtttaaattagggtacactctaggtgttgtatattctatgggttttgacaaatatataatgacatgtatcaaccattgtaatatggtatagaagagtttcattgccctaaaattccactgtgttctgcctattcaacctgccctttcccctaacccctggcaaccactaatttatttactgtctccatagttttaccttttccagaatgatatagagttagaatcaaacagtatgtagccttttcacattggcttctttc

SEQ ID NO: 700619 - DNA, 1122 bp, Homo sapiens
gggtgtacacccagtaatgggatgactgggtcaaatggtatttctagttccagatccttgaggaattgccacactgtcttccacaatggttgaactagtttatagtcccaccaacagtgtaagtgttcctatttctccacatcctctccagcacctgttgtttcctgactttttaatgatcgccattctaactggtgtgagatggtatctcattttggttttgatttgcatttctctgatggccagtgatggtgagcattttttcatgtgtctgttggctgcataaatgtcttcttttgagaagtgtctgttcatatccttygcccactttttatggggttgtttgtttttttctagtaaatttgtttgagttctttgtagattctggatattagtcctttgtcagatgagtagattgcaaaaattttctcccattctgtaggttgcctgtacactctcatggtagtttcttttgctgtgcagaagccctttagtttaattagatcccatttgtcaattttggcttttgttgccattgcttttagtgttttagacatgataacgtaagataaagtagctttttctgcctttcctaacttgccaggttgcagaaaatagtaaaagaaatagtatttcttaaataattctctcttttggattgtgaatcattttacacatgcaaatggaattctttccacttggctttcttttacccaatgaaatttagtattgaacgagaaaagtgtatgctagcaacagtgaatttggcactgtaaactcactgtcaacactaagaaaatcaaagggaacaaacacgaaaagcaagcttttctaacatttggttgatggcagtttgtcttgaaagccttttctataacatatcatagcaaataatacccatcatgacatccatataataaaccatctgcccacttgcctatatatgactacaggaaagttttcccttgacccacctaaaaatatgccccattcatcttgaaatttggtagctgtgccaaagcacaaagaaaggatgattaaatggcacatttctatgattagacacacaaacttcctggaagatttaccacctacaacactgaagacctatgatcttcaaat

SEQ ID NO: 700620 - DNA, 1859 bp, Homo sapiens
caggtatcacaatatcacatggaccccaaaaatatataaaactattacatatccattttttaaataacaaaaaaaaaagagaaaaactcccttattacctgaatacgtctcattctgggatgcttctcatgattgaggcttcaggggtgggtgtcccatccctgcccaccttccctctatgtttgagggaattgatgcccagaaaggttcagtcatttgtccacagtcacacagcaagttacctgccaagtctggatctgggccaaactcctatgtgctttccaggaaatcgcatgttagatatttcttggtcccattcagaagtcccaagtcatgcatggtggctatgagctgagcacatggacacagcagggcattaaaccctgaaggctgaacaaacagattcagtgtgtgtgtcgtaagcacgagcagtgacagccggtggaytgcagaattatgactgtgctccaaggcagctggacttgggcaaaatttggctcacacaaaaggttattataacccaagtgaagattttttttccttctcacttccctagtccatcagtaaggaaaagcggggtgcctgcaggcagccgtcctgcatcttgtcagtaaggtcacacagtaaatgacagaggtcatagggctcatgtccaaaaccagacacccctttcaccctcgtcctggctgtgtggcgatctccttcctgccctatctctgctgctctgtcatctcctcttagcttttgttgctcctctggcccacgggaaggagcagggctcatagcttagggtctgatacacttagattcaaatcccagctcatccacgaaatggatccctcctcccaggctattaggagaggtccatgagagagcatctgtgagcacttggctcagtgcctggcacacagtaggagctcagtaaatattcatgccttccccctgccggattgtgagttcctgtttttctctgtcttatgtagggccagccttggaggctttccatgtcaccatcaataataatacgaggccgggcgaggtggctcacgcctgtaatcccagcactttgggaggctgaggcgggtggatcacttgaggtcaggagttcaaaaccagcctgatcaacacggtgaaacccagtctctaccacaaatacaaaattagccgggcatggtggtgcacacctgtaaccccagctacttgggaggctgaggcaggaaaatcacttgaacctgggaggcggaggttgcggtgagccaagatcgcaccattgcactccaggctgggcaacaagagcaaaactctgtctcaaaataaataaataaataaataaaataataataataacacaaattgtatgtctttccatgaccagccctttcctgcattcggctctgcattggtgctgtgtgggaggcactaggactacccttaggccccagacagaggagcccatgcctatgggttcccagaggggccctcctgtggctgcacaccttcccacaaggtcatatacacattccacagggtccaggggatgtgaccatcataagccagcgccctctagcttctaaattgaaccctgggtaccccaggccccagagtccctgcccgtgggcctctcccccattcattcagctgagggcggagaggcacactggtgtgtacccaggcttaggggggaaaggtgggctgtgcttgggggctgagcttgaatggaaggtgggttgtccctctgcatggaccagagctgctcaaggggtaggacggagcttggaatggcaggagaggaggggtgaggggcaggccacaggccagggcctcagatgggggctggcactccccagccaccgcttgca

SEQ ID NO: 700621 - DNA, 1489 bp, Homo sapiens
  misc_feature 1030, 1031, 1032, 1033, 1034, 1035, 1036, 1037, 1038, 1039,1040, 1041, 1042, 1043, 1044, 1045, 1046, 1047, 1048, 1049,1050, 1051, 1052, 1053, 1054, 1055, 1056, 1057, 1058, 1059,1060, 1061, 1062, 1063, 1064, 1065, 1066, 1067, 1068: n = A,T,C or G
  misc_feature 1069, 1070, 1071, 1072, 1073, 1074, 1075, 1076, 1077, 1078,1079, 1080, 1081, 1082, 1083, 1084, 1085, 1086, 1087, 1088,1089, 1090, 1091, 1092, 1093, 1094, 1095, 1096, 1097, 1098,1099, 1100, 1101, 1102, 1103, 1104, 1105, 1106, 1107: n = A,T,C or G
  misc_feature 1108, 1109, 1110, 1111, 1112, 1113, 1114, 1115, 1116, 1117,1118, 1119, 1120, 1121, 1122, 1123, 1124, 1125, 1126, 1127,1128, 1129: n = A,T,C or G
ttcaaagatctcactagagctttgtcagcaagtaggaagacttccacatttactcctcaacatgggtctgaaagaatctacgtttcagaccaaatgtgcaacacagcactacatttcttcatgttagtgattatttgttttatttatttatttatttatttatatttttattttgagactgagtctcactctgtagcccaagctgaagtgcagtggcgtgatgttggcttactgcaacctccacctctggggctcaagtaattctcatgcctcagcctctcgagtagcggggactacaggtacatgccatcacacccggataatttttttttattttagtatttaatattagcatttagtatttagtattttgtatttagatttcaccatgttgctccaggtggtctcgaactcctgagctcaggcgatctgcctgcctttggcctcccaaagcgtactgggattacaggcataagccaccatgtccagcctatttattactaatatgtatcttttcatatttgtagtagtagccattaatatctgcaaaattgtttactaggctttgatagggcccattaatatctgcaaaattgtttatgtagctttggtcaatctcaacctaattgttgatttatttaaagcctacttycctttgtagggtcattaataaacagaaatatttaaatagtttttaattaggcctaggaaaaagaaaaatacatataagctctaataattacattgtcagattcagcaagaatctttttgtacctgtttacctgttgccatgaaggtccattcccttttttccactggtctgaattttcttctttcttaggctcatctcaaatctcatttgttttcttcagccttttttatccaacccaggcctgtctccaactcccaaaacactgatttgtctggccatttttgacacttagcttgtattttattgttatctctcatctctgctcttcaataagccctgtgagaaactcaggatggagccatattgcctattctttcnnnnnnnnnnnnnnnnnnnnnnnnnnnnnnnnnnnnnnnnnnnnnnnnnnnnnnnnnnnnnnnnnnnnnnnnnnnnnnnnnnnnnnnnnnnnnnnnnnnntaaacgttccctgagagtaggaccttctcctgtaacacatgctgttatgtgaatgatgaccctatttagtgcttttgtgcatgcagaataattttccactttcttctttgtgagaggactgaactttctctaaatttcatagggaaagatggcaactgtgatgaagaccgattcaatgttaaatagaaagaatgtaggctccacagccaggcagagtctgtttaaatcctctgtcaaatattagatatccaactcatggcaggttatttattctggatttctgtttccttgtttgcaaaatatggagataataatatctggggataacagtatcagttttgcagccttgatgcaaggatt

SEQ ID NO: 700622 - DNA, 1548 bp, Homo sapiens
gtgctcctttctgttcccctaagattgaacagcatggtttccctgaaccacttgtcacgtggagatggctagtaagatgggccatgtctgtctcctacaatccactgtgaactccttgagggcatggaccatattatatgcaatctgcccctcccatctcccccaactccctactgcccattaacacccccacctatamaccctggaactaagccatccattccccagatttgctgactgaaagactgaatttgtcttggacctctggggttcttgatagaatccatggggtccctaacttggatgaggacaattgcattattttcactaatctcctactgaaacagcatttctaccaatcatgaagataggcaacaaacacggaagtggtattagcagtacctgtgaatttgtcactggtaagatcacagatatttccatagaacattacagttgttacaattatcttgaagtagcatttatgcttcaaactacaatatgtatcaggcccactgctagatcttattaataatgcattaataaaggagcacttattagtgtatgatcgattttcagtatattttaaaaactatatttcaatctagctgatttcctttgcaattctatgtattttgttttacatattttaagacaccatttgaggtggtgtcacgaggctccaaggagggcatggcacgacaaagatggaggacttcaggtcatggaggtccagggataggcttttttggcctgctaatcccctgaaatgaatgaaaacggcagaaggttagcttcctatgtatgtgattctagaaaaagtatttctgactttcattaggaactccaatatggctaagaattagaccagtcgttctcaactagaggtgattttccccctaggggacatttggcaatatctggagaaattttggttgtcacattgggaggtgctactggcattcagtgggtagaggtcagggacgctgctaaacatcctatatgtacaggacagcctcccacagtgaagaattatcccacccaaaatgttgatagtgttgaggttgagaaaccctggattagactactgcacattcacagaaatctctccgattgttaagatctgtagtaaaaaaaaatagtgcacatcttcattaaaaacatctgtgataattgtgtcacccagcacttaatgcacgaaatagggagatgggggtagcggagagcgaagagtaactgcctgcagactagaggaggctccttagaggagatgaactgagcctgggaccgtgagttagatttgctaggttgagaaggttgcagtggaagggcgtatgaggcaaagggccaagcactgcaggtgacaaattagtggtgtgactgaggcacatgctgtgcaggggagaggggctaaaatgaggctcagtgccagcatccctaatgacctagttcttggtcctttcctaaaggatcattgtagagagccaaagatactgtttgacccctgcctctctcatcagcggacaaggtgcccctgccagaaggcatgca

SEQ ID NO: 700623 - DNA, 1548 bp, Homo sapiens
gtgctcctttctgttcccctaagattgaacagcatggtttccctgaaccacttgtcacgtggagatggctagtaagatgggccatgtctgtctcctacaatccactgtgaactccttgagggcatggaccatattatatgcaatctgcccctcccatctcccccaactccctactgcccattaacacccccacctataaaccctggaactaagccatccattccccagatttgctgactgaaagactgaatttgtcttggacctctggggttcttgatagaatccatggggtccctaacttggatgaggacaattgcattattttcactaatctcctactgaaacagcatttctaccaatcatgaagataggcaacaaacacggaagtggtattagcagtacctgtgaatttgtcactggtaagatcacagatatttccatagaacattacagttgttacaattatcttgaagtagcatttatgcttcaractacaatatgtatcaggcccactgctagatcttattaataatgcattaataaaggagcacttattagtgtatgatcgattttcagtatattttaaaaactatatttcaatctagctgatttcctttgcaattctatgtattttgttttacatattttaagacaccatttgaggtggtgtcacgaggctccaaggagggcatggcacgacaaagatggaggacttcaggtcatggaggtccagggataggcttttttggcctgctaatcccctgaaatgaatgaaaacggcagaaggttagcttcctatgtatgtgattctagaaaaagtatttctgactttcattaggaactccaatatggctaagaattagaccagtcgttctcaactagaggtgattttccccctaggggacatttggcaatatctggagaaattttggttgtcacattgggaggtgctactggcattcagtgggtagaggtcagggacgctgctaaacatcctatatgtacaggacagcctcccacagtgaagaattatcccacccaaaatgttgatagtgttgaggttgagaaaccctggattagactactgcacattcacagaaatctctccgattgttaagatctgtagtaaaaaaaaatagtgcacatcttcattaaaaacatctgtgataattgtgtcacccagcacttaatgcacgaaatagggagatgggggtagcggagagcgaagagtaactgcctgcagactagaggaggctccttagaggagatgaactgagcctgggaccgtgagttagatttgctaggttgagaaggttgcagtggaagggcgtatgaggcaaagggccaagcactgcaggtgacaaattagtggtgtgactgaggcacatgctgtgcaggggagaggggctaaaatgaggctcagtgccagcatccctaatgacctagttcttggtcctttcctaaaggatcattgtagagagccaaagatactgtttgacccctgcctctctcatcagcggacaaggtgcccctgccagaaggcatgca

SEQ ID NO: 700624 - DNA, 694 bp, Homo sapiens
aaaatgtgggcaagagcctttattgtggttttcccaagaaggaatgggcaagatcaggtaagcagctgagcaggtttaggattgcctagtttgaataatttcagagggcaccagggtatgtggaccacccttagctgtccgatgtatggccctgggtaattagggcagggggatagtagataaacaatgagatctcaataaaagaggtagaggccaggcacagtggctcacacctgtaatcccagcactttgggaggccaaggtgggaggatcacttgagcacaggagttcaagaccagcctgagcaacatggtgaaatcccatctctataaaaatgttttcaaaaatttgtctgagtgtggtggttactcagctaaacttgtggtcccagctactcagggggcttaagtggtcccagctattcaggaggctgaagtgggaggatcacttgagcctaggagttcgaagctgcagtgacccacgatcgtaccactgtgctccagcctgggcaaaaaagtgagatcctgactcaaaaaaaaaattaaattaaaaaaaaaaataataaaagacttagttgtgctctacccaattgggatcatcagtttgcayatgaaaggcatacttccgggagagctctttgctattttaggtcaacaaagtcccaagatgtcaaagtatcagaaaatacagacaa

SEQ ID NO: 700625 - DNA, 968 bp, Homo sapiens
tattcmttattttaaaggccctacattacatccaacacatctacctccatctccccaactagtctgtggtgggcagaataatgtcccctccacccccaaagatgttcatgtcttaatccctggaacttataaatatgttactttggccaaagggacttggcaaatgagatatagttaataaccttgagatggggaatgtagcctgcattttccaggtgggcccaatctaatccaagggtccttacaagagggaggaagaagggtcagagtcagataaggagatgtgatattggaagcagaagtttgagtgatgcggggctgtgagcctctacaagctgaaaaaggcaaggaagagaattcttccctagtgttttcagaaaggaacccagccctgccaccaccttgattttagccgagtgaggccaggttggacttctgaactctagaactggagcataccacatttgtgttgtgtaagccctgaatttgtggtcgtttgtcgcagcagccacaggcagctcatgctcagcctttgtgtatctgatcatggcagtccctccgcctccctgctggagacgaggcatctccccaaagctagtgtttactgtatgttgttatgttctgagcattgcactaagggctggttatgtcatttaatttctttcagtaaccctctgaagtggataccctcattgtcttcatctcatggtgaggaaccaaaggatgctaagtaacttgctcaaagccacacgagtaacaagatctgggattcaggtgctgggactctgtggtgtgattccagtggctttctgaccactgatgccacagtgatagcaaccagctgggtcttggggagggctgccttgatcctgctcattgccaatcacaactggtgtcatttatcaaacattaactccacaccccaccctgcccgaatgctttccatacgatatcctcagtgctcggat

SEQ ID NO: 700626 - DNA, 968 bp, Homo sapiens
tattccttattttaaaggccctacattacatccaacacatctacctccatctccccaactagtctgtggtgggcagaataatgtcccctccacccccaaagatgttcatgtcttaatccctggaacttataaatatgttrctttggccaaagggacttggcaaatgagatatagttaataaccttgagatggggaatgtagcctgcattttccaggtgggcccaatctaatccaagggtccttacaagagggaggaagaagggtcagagtcagataaggagatgtgatattggaagcagaagtttgagtgatgcggggctgtgagcctctacaagctgaaaaaggcaaggaagagaattcttccctagtgttttcagaaaggaacccagccctgccaccaccttgattttagccgagtgaggccaggttggacttctgaactctagaactggagcataccacatttgtgttgtgtaagccctgaatttgtggtcgtttgtcgcagcagccacaggcagctcatgctcagcctttgtgtatctgatcatggcagtccctccgcctccctgctggagacgaggcatctccccaaagctagtgtttactgtatgttgttatgttctgagcattgcactaagggctggttatgtcatttaatttctttcagtaaccctctgaagtggataccctcattgtcttcatctcatggtgaggaaccaaaggatgctaagtaacttgctcaaagccacacgagtaacaagatctgggattcaggtgctgggactctgtggtgtgattccagtggctttctgaccactgatgccacagtgatagcaaccagctgggtcttggggagggctgccttgatcctgctcattgccaatcacaactggtgtcatttatcaaacattaactccacaccccaccctgcccgaatgctttccatacgatatcctcagtgctcggat

SEQ ID NO: 700627 - DNA, 968 bp, Homo sapiens
tattccttattttaaaggccctacattacatccaacacatctacctccatctccccaactagtctgtggtgggcagaataatgtcccctccacccccaaagatgttcatgtcttaatccctggaacttataaatatgttacyttggccaaagggacttggcaaatgagatatagttaataaccttgagatggggaatgtagcctgcattttccaggtgggcccaatctaatccaagggtccttacaagagggaggaagaagggtcagagtcagataaggagatgtgatattggaagcagaagtttgagtgatgcggggctgtgagcctctacaagctgaaaaaggcaaggaagagaattcttccctagtgttttcagaaaggaacccagccctgccaccaccttgattttagccgagtgaggccaggttggacttctgaactctagaactggagcataccacatttgtgttgtgtaagccctgaatttgtggtcgtttgtcgcagcagccacaggcagctcatgctcagcctttgtgtatctgatcatggcagtccctccgcctccctgctggagacgaggcatctccccaaagctagtgtttactgtatgttgttatgttctgagcattgcactaagggctggttatgtcatttaatttctttcagtaaccctctgaagtggataccctcattgtcttcatctcatggtgaggaaccaaaggatgctaagtaacttgctcaaagccacacgagtaacaagatctgggattcaggtgctgggactctgtggtgtgattccagtggctttctgaccactgatgccacagtgatagcaaccagctgggtcttggggagggctgccttgatcctgctcattgccaatcacaactggtgtcatttatcaaacattaactccacaccccaccctgcccgaatgctttccatacgatatcctcagtgctcggat

SEQ ID NO: 700628 - DNA, 968 bp, Homo sapiens
tattccttattttaaaggccctacattacatccaacacatctacctccatctccccaactagtctgtggtgggcagaataatgtcccctccacccccaaagatgttcatgtcttaatccctggaacttataaatatgttactttggccaaagggacttggcaaatgagatatagttaataaccttgagatggggaatgtagcctgcattttccaggtgggcccaatctaatccaagggtccttacaagagggaggaagaagggtcagagtcagataaggagatgtgatattggaagcagaagtttgagtgatgcggggctgtgagcctctacaagctgaaaaaggcaaggaagagaattcttccctagtgttttcagaaaggaacccagccctgccaccaccttgattttagccgagtgaggccaggttggacttctgaactctagaactggagcataccacatttgtgttgtgtaagccctgaatttgtggtcgtttgtcgcagcagccacaggcagctcatgctcagcctttgtgtatctgatcatggcagtccctccgcctccctgctggagacgaggcatctccccaaagctagtgtttactgtatgttgttatgttctgagcattgcactaagggctggttatgtcatttaatttctttcagtaaccctctgaagtggataccctcattgtcttcatctcatggtgaggaaccaaaggatgctaagtaacttgctcaaagccacacgagtaacaagatctgggattcaggtgctgggactctgtggtgtgattccagtggctttctgaccactgatgccacagtgatagcaaccagctgggtcttggggagggctgccttgatcctgctcattgccaatcayaactggtgtcatttatcaaacattaactccacaccccaccctgcccgaatgctttccatacgatatcctcagtgctcggat

SEQ ID NO: 700629 - DNA, 1458 bp, Homo sapiens
ggagccatttattacagccccttgaaaaatcaccttccctagagtatttccattgcagaggcagagtggttaccctgggctgcagaaaatggacctcttcctggacttgcttcctacttccacgctcataccatttccctgtgtttggttcacgtttctacattagcgacctgacaaaggtcacttttagagatggggggtggagaggggggcgcagggcggtgctgtggctgctgagggtctgtagcgtaaggctgtgtaagccctgggtaggctttgcagtactgctggcttgcagctaagagaaagcttctgcycaggactccgtgaggtactcagggcaggtgtggtggatgaggaattcaggcagaatagatccatagatatatccactgttattaagccagtgtttggggcatccagcactagaatcccggttctccagttcttggtctactgctccgtccagttggatctgacaatattcttagctatctttgtggcagatactcacagagaggcacatgtgggggattttacatagagtgtgtcattatatgatcactaaattatcctcagagggtctaaaacagtgttcatatcagtttctgagtcatccatgacccctccaatgatggttgcattaagaggctgaatgaagatcagtattgtatttcacccattcttagctctagtgatgttgggacatctatagatgtgagtctctcttctgctgagtataaacttgggacactggtgaatatgatagggctaaaattatgcaattgtgactgagtctaagggacacaaacgatcatatggaagaagaaatcttgcagctgaataaactaataacgaacccagagaggttaaatggagggcatgaaataagagaagtgtacaaggttttgtcatggttagactatcctggatttactgttggctgatagaatatgtgagtaggtgacattaaattttacagtagagttatatattccattttatccttttatatactaaaaagtagcaatattatcttcttttgcctaggattacgggacagctaccacagtagaagagatcaaattgcccttaaaaatctccagtctgatgtcacagaggcaaaatctgacttcaccaaggtaacatacatttctaacttctagaatagtcagcaaaatgcacccatctataaaatataatcactgacctacttgtgatgtgattgcattttattttatttagtcaaaattgaattaatgtagcaaacaatctaaccgtgctatagatttaattattcttttatcatcttcagcaacaatttgtaagcttgcagcatcttagaatatggcaattgctcccaattttaaactaaaatttatcagctagagagagacatagaaagagagggagaattatgccatacagcattttgaagatgcgaaagaggtactctga

SEQ ID NO: 700630 - DNA, 1458 bp, Homo sapiens
ggagccatttattacagccccttgaaaaatcaccttccctagagtatttccattgcagaggcagagtggttaccctgggctgcagaaaatggacctcttcctggacttgcttcctacttccacgctcataccatttccctgtgtttggttcacgtttctacattagcgacctgacaaaggtcacttttagagatggggggtggagaggggggcgcagggcggtgctgtggctgctgagggtctgtagcgtaaggctgtgtaagccctgggtaggctttgcagtactgctggcttgcagctaagagaaagcttctgctcaggactccgtgaggtactcagggcaggtgtggtggatgaggaattcaggcagaatagatccatagatatatccactgttattaagccagtgtttggggcatccagcactagaatcccggttctccagttcttggtctactgctccgtccagttggatctgacaatattcttagctatctttgtggcagatactcacagagaggcacatgtgggggattttacatagagtgtgtcattatatgatcactaaattatcctcagagggtctaaaacagtgttcatatcagtttctgagtcatccatgacccctccaatgatggttgcattaagaggctgaatgaagatcagtattgtatttcacccattcttagctctagtgatgttgggacatctatagatgtgagtctctcttctgctgagtataaacttgggacactggtgaatatgatagggctaaaattatgcaattgtgactgagtctaagggacacaaacgatcatatggaagaagaaatcttgcagctgaataaactaataacgaacccagagaggttaaatggagggcatgaaataagagaagtgtacaaggttttgtcatggttagactatcctggatttactgttggctgatagaatatgtgagtaggtgacattaaattttacagtagagttatatattccattttatccttttatatactaaaaagtagcaatattatcttcttttgcctaggattacgggacagctaccacagtagaagagatcaaattgcccttaaaaatctccagtctgatgtcacagaggcraaatctgacttcaccaaggtaacatacatttctaacttctagaatagtcagcaaaatgcacccatctataaaatataatcactgacctacttgtgatgtgattgcattttattttatttagtcaaaattgaattaatgtagcaaacaatctaaccgtgctatagatttaattattcttttatcatcttcagcaacaatttgtaagcttgcagcatcttagaatatggcaattgctcccaattttaaactaaaatttatcagctagagagagacatagaaagagagggagaattatgccatacagcattttgaagatgcgaaagaggtactctga

SEQ ID NO: 700631 - DNA, 984 bp, Homo sapiens
taataggagaaaaggtatttaagaaacaaaaagcaacacagtacaacataatagctgagagaaaagaggtatgtacatagtacaagggaaacaccaggtaaaatgtggtcaatttccctggaatggcgatggggagatgggaagggcatctgcaagcggatgtctacctgaacttaacttgattgcccaggtccaagcactgaggtgacctgaacatctacccaggcatgattggtttgaaatgtgcagacatgaggtttgggaagggccaggggtggaatgatatggtttggctctgtgtctccagccaaatctcaccttgtagctcccataattcccacttgttgtgggagggaccagtgggagataattgaatcatggggatgggtctttcccatgctcttcttgtgatagtgaatacgtctcacaagatcttatggttttaaaaattggagtttccctgcacaagctctctttttttgcctgccaccatccatttaagatgtgactttttcctccttgccttccatcatgattgtgagacctccccagccatatggaactgtaaccccattaaacctctttcttttgtaaattgcccagtctggggtatgtctttttcagcagcatgaaaacagactaatacaccatactaggcttgagtaaattcactgagtagttcattgccccagagaggggatgacagatgtcacacagcctgctaccatttccttgacttgtcacttccttctttacacacccctgggttaaaggaaatatctcttctggctctcttcagagtwatcaaaccacatttttaaaattttggcagcagtttccactcatgccccaacatactcacctaccttaattgggctataagaaagttttctcagaaaaggcagttctccctcaagcagggattgtcagacaagctgctaagggaatgaaacttttatgacacaaagaaagcttcattgtgat

SEQ ID NO: 700632 - DNA, 624 bp, Homo sapiens
ggcctactgcaaactatagtataacaccagagatagtaatttgctgtttatatttgcaacaatttatattctatcaaattatatcaaaggtggttttatcaaattatattacaatttatttaattatatcctgagctgtttctggaaagctgactacaatcttacatatgcttttcctgtatcttccacaatagccatcaccaaactccttcccttgaagcactaatatgatgagattttaatggttattttatggggggaaaatggacttgttatcaataagtttragagattttattttaaagaaaaaatacacaaaatctatgtaaaggacttctctgagcctttaacagtctaatagtcttgcaggctgcataccattctagagtcttgagctatggcagtaacaatacaaaaattccaagacttcatggcatttacactctagtaagaggagacagacatgaaaaataaacatgtgggctgggcacagtggctcatgcgtataatcccagcactttgggaggccaaagtgggtggatcatgaggtcaggagttggagaccagcctggccaacatggtgaaaccctgtctctactaaaaatacaaaaaatagctggacat

SEQ ID NO: 700633 - DNA, 739 bp, Homo sapiens
cctcccaaagtgctgggattacaggcgtgaacccccatacctggctgaaaattctttattatctcccttcaaagagacaaacagaaaatgaaattgttgtcttagaatatcttacaataaagattagcttacagaaaaccaagactggtcatgaggttttctttctctactctttcacatgttatatgttttgtaggaattttggccaagaatctagaggctaaatctgtatacatggttttaaaaaactgatataactgcaccaaaaactggagagagggcagtggggacatcacatcctagatattgacatttcaaatggagatactttctttacaagtgtagattcctaacctttaatgcattctgagaatttgacatggatttgttttatagctctcaaagtattcaatttagaacaacaacaaaaattgcattagaaaacatactatgctgggcccggcgaagtggctcacacttgtaatcccagcactttgggaggccaggtgggcagatcacctgaggtcaggagtttgaaaccagcttggccwccatggtaaaaccccatctctactaaagaaaaaaaaaaaaaagaaagaaaattagccgggtgtgttagtgcatgcctgtagtcctagctacctgggaggctgagacaggagattgcagtgagctaagaacactccactgcactccagcctgggcaacagagctagactccatcacaaaaaaaaaaaaa

SEQ ID NO: 700634 - DNA, 2499 bp, Homo sapiens
gttgagttaatgaaggagactagaattgccacattaaaatactgacaactttagtttcatgaatgattataaggagtcagtgtaactataacaattaatgaaatattatttcgactgaatccaaaacctacaaatccgcaaaacctacaatctctgaatctcagaatagtagcctagaaaacgtgggaactgaatactgtggttacctcagctatactgtagtattgtaggagggaaataactccccaagggcatataaacaagaacattatcttttctactttttcttttgagattcccttcttgtttttcaaaaagcccctgttagctgaattaatgaaagcaaatgacatatgctattttaaattattatttaagctttgaaaaatcatacattattttcatataacttagtccataagttcctattatgcttgcttctctgagtatatttggagtataaaacaaggaagataatcctttgggaaagttggtttctgttcatatcagtctgtgtgttcatttattcatttgtgaaatgggtgaaataaccctgacctcaacaatatattatagtggcctctgctatggaaggtatgaagttactgaactgttaagagaagggtggtccatacataagtagcaatgttatcatttctgaagcccaactgcatatttttatttactttwttacagactcagctctgaggtgggtagcctgtctttaacacagaaaagagtttaggaactcctcaaatgtgtaaaggccatttctatttgctgaagcatagctcttcaccacttaatcattgaaaattatgttgtagaatatttagtgatgggggaatgtttataatacatcaaatggttaaaacagttaactatgttcctaatattataaaagcataaagaatccaaatatagacatataaaaaggcttaaagaaaatatatcaaattctcaaggaaaataaaaagtaaatggaacccggaattttgtttcatgaatgataaatacaaaagtgagactcgactacatgccttattagtcaagggaaccctaatagtgccctttcctgttgtgtggaaagtaaggtataataggagaaaagtaaatctaacaatattttaagttttaggagctgacatttaaatttgttttagacttaactttcctatcattatattgtgaggttaagaaattggcatatattacattcaatatgctagatgcaaatgatcttctggtcatcccactcttagctgataattttcaagctgaatatagatcatgcatagaatttaatatggatttttttagagacagcttattgttttttaatcctgtgtactactacttagtcattttccctgactgatgacaatttaatgaaaagtgaaataaaaaacaatactaactatctggttttctggaactggttaaaatatattgaaagtttttcttatgtatgtgagtcatatttgaggctattgtcgatgtctgtaaattctcatgttgcttcttttaacacttgtcaatcatataaatggtattctgacacccaatatataacttaaaattaaataacttagaattcaagcaaatatattttttaactagttttgagtaggtgaagtatttgaagtatttaagagacttggaatgattttggtgacattatttgctaataattaatctcatctccatctttatgtaaaatttcagattgttttccgggatactcaacagataaatatgtgacagacctatggcctttaatttcttcttgaaagatgagaaaacaacatttcattttctttgacttggtgggaactacccttggagggtggtgacagttcatggattaaccctggtatcctgtccattaccaatgtacaccaattctgactgcatctttagaaataagaatattgcatttttagtctaaggtaggtagggaatcctggaaaggataaaattctgatgtccttttctcaatgtatttcaaaaaaattaaccactgcttttaaactttattatttacctgtttaggacaatttggcttcatgttagcaatggaagtttctctttctgactcgtgtttaactttgttgttgagctggaaaaacacaagaaaaggccagtgggaatagatgaaagaacatgcaggaatttctcttcaagttttgctatttcctgtaacaatagacgctttttgaggcctccattccacatccaaagacacatattaaagtgcactaacattcaacaccaaatttaattatttcacaataatatgttgaaaaagcttttataattttgctcctgaaactctgtgtccaagtaaatttaactgatatgtatctgtgaatttggagacatcttgcatacatgaatattcttgcgaagtgaaaaaaacctaatctacaaatctttttcaggtacaaagagattattagaagactaagtggaacaatgaataaagttgacaatgtatta

SEQ ID NO: 700635 - DNA, 1361 bp, Homo sapiens
cttttgtttttccaggttgctaaaggcaacactttgttgtgagaatgtgttgcttattcatttgttcataattttgaggctggagggctaytacttgcttttttgggtcttgcaaacatttcatttgggagtaaatgtgacagttcttcattggtattgtctgatcttctgcaggccatttactgctctgagtgctttgtcttcatatgtaaagaagtgattagttggtttgggccacagggtatctagacaactaactactgataagccaccacctgctgggaatgggtaatgacttgattgattgattggagatggagtcttgctctgtcacccaggctggagtgcaatggcacgatcttggctcactgcctcaacctcaacctcctcggttcaagctattctcctgcctcagcctcacaagtaactgggactataggtgcgccaccatgcctggctaatttttgtatttttagtacaaaatttctccatgttggccaggctggtcttgaacttctgacctcaagtgatctgcccatcttggcctcccaaaatgctgggattataggcatgaaccactgcgcctggcctgggaatgggtaatggatttaacactaggatattgtgaattttgctgcctggttggccttttggagacccatctgagctcagtgtcaccatatacaggaaataacgattatttgagcaaactttattcaggagttagaattcagtgactataaaattatctgtatccgttttctgctcagtctaatactgtactaattctgaagtgtctggagctgtatgttctgagttatttacctagaagttacagaattgtgccaatttatttagttaccctcctggatcttttttgttgttgttgttttggttttgagacggagtcttgctctgtcgcccaggctggagtgcagtggtgtgatctcagctcactgcaacctctgcctcccgggttcaagtgattctcctgcctcagcctcctgagcagctgggattacaggcgcgtgccaccacgcctggctagtttttgtatttttagtagagtcagggttttaccatgttggtcagtctgatcttgaactcgtgaccttgtgatccacctgcctctgcttcccaaagtgctgggattacaggcgtgagccatgatgcctggccaccctcctggatcttggtagtaaaataacttgagtatactacctaaattactttgaattagtttttttaagattttttttaaatttttaatttttttttgttttgagacagagtctctctctgtcacccatgctagagtaagtacagtggcatgatcatagctcactgtagccttgacctct

SEQ ID NO: 700636 - DNA, 1361 bp, Homo sapiens
cttttgtttttccaggttgctaaaggcaacactttgttgtgagaatgtgttgcttattcatttgttcataattttgaggctggagggctattacttgcttttttgggtcttgcaaacatttcatttgggagtaaatgtgacagttcttcattggtattgtytgatcttctgcaggccatttactgctctgagtgctttgtcttcatatgtaaagaagtgattagttggtttgggccacagggtatctagacaactaactactgataagccaccacctgctgggaatgggtaatgacttgattgattgattggagatggagtcttgctctgtcacccaggctggagtgcaatggcacgatcttggctcactgcctcaacctcaacctcctcggttcaagctattctcctgcctcagcctcacaagtaactgggactataggtgcgccaccatgcctggctaatttttgtatttttagtacaaaatttctccatgttggccaggctggtcttgaacttctgacctcaagtgatctgcccatcttggcctcccaaaatgctgggattataggcatgaaccactgcgcctggcctgggaatgggtaatggatttaacactaggatattgtgaattttgctgcctggttggccttttggagacccatctgagctcagtgtcaccatatacaggaaataacgattatttgagcaaactttattcaggagttagaattcagtgactataaaattatctgtatccgttttctgctcagtctaatactgtactaattctgaagtgtctggagctgtatgttctgagttatttacctagaagttacagaattgtgccaatttatttagttaccctcctggatcttttttgttgttgttgttttggttttgagacggagtcttgctctgtcgcccaggctggagtgcagtggtgtgatctcagctcactgcaacctctgcctcccgggttcaagtgattctcctgcctcagcctcctgagcagctgggattacaggcgcgtgccaccacgcctggctagtttttgtatttttagtagagtcagggttttaccatgttggtcagtctgatcttgaactcgtgaccttgtgatccacctgcctctgcttcccaaagtgctgggattacaggcgtgagccatgatgcctggccaccctcctggatcttggtagtaaaataacttgagtatactacctaaattactttgaattagtttttttaagattttttttaaatttttaatttttttttgttttgagacagagtctctctctgtcacccatgctagagtaagtacagtggcatgatcatagctcactgtagccttgacctct

SEQ ID NO: 700637 - DNA, 650 bp, Homo sapiens
tttgtcaaagccttttctgcacctattgagataatcatgtggtttttatcrttggttctgtgtatatgctggattacgtttactgatttgcatatgttgaaccaacgttgcatcccagggatgaagcccacttgatcatggtggataagctttttgatgtgctgctgggttcgtttttctttataaattacccagtctcaggtatttctttatagcaacatgagaatagaccaatataatcttactaactacttgaaactccccataatagaagcattgttgtttttattcaagagacaatggaaacaaggataacagaagttaggtttccaaaggtagataccaagtgagctgcagaactggttttcaaactctttttgcttctctgtagctttttaatttctcttcccttggtttcccttatctccttttcactcatccaaatatgatctaattatcttaaagctgtactttaataaaaccattctggaattcttcagctccctttgattttccccttctctggcagcttacatcatttggagtcatcactgtatcagtctctgtttctggcatgaaaatgaccattttcatcctcatggtagatggctcacataacccctctttgtgtgtcctgctacttgatggac

SEQ ID NO: 700638 - DNA, 837 bp, Homo sapiens
gggagcatgacattatcacagagacagatatatggtaacttggaaattttttgtaggtaattcctattcttaaacttaatatgagttgccaatttggaacactgctacattatatttatcacagagttataacttttaatggtttgagggatcatagatctgaccacatcaatatttggctcattttcaaaatagaaagtgctgaaacaccaaaatactgagctgaattctttaaaactttaaagctgaaaaaccactcatgtacataaagtgaaataagaatcaacctagtgtaaatggctgcatttttgaaattccattgtaaatcttaataaaaaatattgttttaaaaagccagcatgtttggaaatgggtgtaatttgcattaaaatcagatgagattatttcttggttttactactaagacacatggacacaggaaggggaacatcacacaccagggcctgttgtggggtgggggaaggggggagggatagcattaggagatatacctagtgttaaatgacgagttaatgggtgtagcacaccaacatggcacatgtatacayatgtaactaacctgcacattgtgcacatgtaccctaaaacttaaagtataattgaaaaaaaaaaagacagattgtggatgcttatggaaaatacgtttactttttctagactcctagaaggccattttgaggacttctgtaataattcactaaatagatagaaaactgcctagacctatacttcgctgtaagatagtcctcttttggtctaaccctcatttctatttagctaactagctagtcaggagtgtaaggtaggcagtataaa

SEQ ID NO: 700639 - DNA, 837 bp, Homo sapiens
gggagcatgacattatcacagagacagatatatggtaacttggaaattttttgtaggtaattcctattcttaaacttaatatgagttgccaatttggaacactgctacattatatttatcacagagttataacttttaatggtttgagggatcatagatctgaccacatcaatatttggctcattttcaaaatagaaagtgctgaaacaccaaaatactgagctgaattctttaaaactttaaagctgaaaaaccactcatgtacataaagtgaaataagaatcaacctagtgtaaatggctgcatttttgaaattccattgtaaatcttaataaaaaatattgttttaaaaagccagcatgtttggaaatgggtgtaatttgcattaaaatcagatgagattatttcttggttttactactaagacacatggacacaggaaggggaacatcacacaccagggcctgttgtggggtgggggaaggggggagggatagcattaggagatatacctagtgttaaatgacgagttaatgggtgtagcacaccaacatggcacatgtatacacatgtaactaacctgcacattgtgcacatgtaccctaaaacttaaagtataattgaaaaaaaaaaagacagattgtggatgctyatggaaaatacgtttactttttctagactcctagaaggccattttgaggacttctgtaataattcactaaatagatagaaaactgcctagacctatacttcgctgtaagatagtcctcttttggtctaaccctcatttctatttagctaactagctagtcaggagtgtaaggtaggcagtataaa

SEQ ID NO: 700640 - DNA, 604 bp, Homo sapiens
gtggggatttwtctttaggtattgggtggttgttatttattttgaatccagtagattcccagacatgcagggtcatgtctaactgggccacaaactctttctgcctcttgacattttcaggcatagacaacaggctcttcacagtgcactgtggatgtcacaaaatccccataaattgtccttaaattattgcccatgttttattaaaaagtattatttaggaagtaacctctgaaaagaaagaactcttttaattttctttactaatatttaaaaatttagtccacatataaaagcatgtctgtcatattatgccccaaatcctcttattgagcaattggaaaacatattcctaagctgaggcttacagtcattgctcgttatctgcaggggttggtttcaggacccccacagattccagcatctgacaatgctcaagtccctggtataaagtggcacagcatctgcatataagccatgcccgtgctcctgtgcacttgaaatcatctcagatctctcctcaaccccataggcaggaactgctatgcaaatagttgttatcctctctgccagcccctacctccacctaccttgtcttatgcct

SEQ ID NO: 700641 - DNA, 604 bp, Homo sapiens
gtggggatttatctttaggtattgggtggttgttatttattttgaatccagtagattcccagacatgcagggtcatgtctaactgggccacaaactctttctgcctcttgacattttcaggcatagacaacaggctcttcacagtgcactgtggatgtcacaaaatccccataaattgtccttaaattattkcccatgttttattaaaaagtattatttaggaagtaacctctgaaaagaaagaactcttttaattttctttactaatatttaaaaatttagtccacatataaaagcatgtctgtcatattatgccccaaatcctcttattgagcaattggaaaacatattcctaagctgaggcttacagtcattgctcgttatctgcaggggttggtttcaggacccccacagattccagcatctgacaatgctcaagtccctggtataaagtggcacagcatctgcatataagccatgcccgtgctcctgtgcacttgaaatcatctcagatctctcctcaaccccataggcaggaactgctatgcaaatagttgttatcctctctgccagcccctacctccacctaccttgtcttatgcct

SEQ ID NO: 700642 - DNA, 677 bp, Homo sapiens
agcaacaaagctatatatatatttttctaaactgrcagtaaatatgctcatttatttgatttataaattgacactggatactgttatttagtttagaatatattattattaggctattgcaggacaggtccatatttagaaacatagaatagtctgttttttgttgcataaatgttcaattatttagactggttacatttgactgaaatgtgtgagggatgtcaaataaatacataaataattttataataaatgtttttctttaattttgaaagaatttcctttactccttgtgctcccctgttataaatggatattcttccttgtattaatggtacttggccttaacatattagctcctcttttaatactgttagattctaaatatatagactttatctcaggtagcctgtgactctcaagggccagaataaaacatagtaggtgctaagtacttgcttaaaaaaaaagaaaatgagagatcatgtcggatatatcatgctgctcctgagcactttgcacagcactttttacctggtaaattagaggaaatgttgggaaattaatgaataccagtatgccaaataaataaggtaagatgctttccatcaaaaatgggacacagtttttattaaagtgctaacaaataccatagaattgttaacataaaatatact

SEQ ID NO: 700643 - DNA, 637 bp, Homo sapiens
cagtgattctcaaatgtttgtgtgcatctgatgggcttgctaaaatacagattgctgggccccaccctggagtttctgattctgtggttctgaaagagatcagaaaatgtgtacatttataacaagtttccaggtgttactgctctgggaatcatatttttaagaacccctgagttttactaatgttttctacactgacctgttcctaagaatcacctgcaagtgcctggaaaaaagaatacaaagttctcaactccattccctgtggattcccattcagtaaatctctagcgctccaggtgttgattacaaacaggtgtattggagattttaagatgtcaagagccaagattaactctgaaccagcggctttagtgtatttacgatttagggagagatggtcaatccaggtgagaaatctactacaatatatctctggmattctcagattcaccatttgtagatttgactattcagaaggaactgcactaaatcatattctttgaaggcaaagttttacgtctttcctcctagatttgcacagaaaatactagtggaagaaaaggagaaaaaagtgggggtggggaggaaggaagggagaaaggaaaaaagaagagaaaaactccccctccttgac

SEQ ID NO: 700644 - DNA, 1788 bp, Homo sapiens
tgcagaggcagtccagagttcagcctactggttaaaacattcacaccagcaacaaacctagatttgactttttttttttttttttttaatcttttgagacagactctcgttctgtcaccaggctggagtgcagtggtgcaatctcggctcactgcaagctccacctcccgggttcatgccattctcctgcctcagcctcccgagcagctgggactacaggtgcccgccaccatgcctggctaatttttcttttttttaatagagacggggcttcaccatgttggccaggatggtctcaatctcctgacctcgtgatcggcccgcctcggcctcccaaagtgctgggattacaggtgtgagccactgcacccaacctagatttgattttttttaaccatagctagctagttatgtaggctttgagtgatgtgtttattttttctgaatgttgctttggtttttgttttcaccttatttctaaaaggcttgtgtactgattgactggagggtggtgagaaataaatatgacaacctcatccagttattggtgttgctataatattaaattatacaacaaatataaagtacttagcacagtccctgccacacaggaggtatttagtaaatgacaggtcttattatgaaggtcagaattttgaatatatctccctaatcagactgttagatctgacagacctactttattctgaaataaaacttaactacacaagaaggtaaagtctgatcatgtttgctgactagctgtaaagggcatcacaaatacagtatattcattttcaaacacagatgaggcactaaagctgatcaaatcatatgttttatgttaagtaaagatttgggctcayttttttaagtatataaaagcaaagatttgagaaaccaccagcagaaacatgtagaaaaatgctggagctaatcatgcctcatcaggtctacctcttggtagagatcttagccatgcttgctgatggccatgtggaaaactgtatctttcagcctcctgagagcattcagagctaaccggtatttgttttcattttttaatttattttttcctgtggacaatacagctccactatatatatatatatatatattttttttttttttttttttttttttaagatggagtctcactctgttgcccaggctggagggcaatggtgtgatctcagctcactgcaacctctgtctcagttcaagccattcttctgcctcaggatcccaagcagctgggtctataggcatgcattaccatgcctggctaatttttgtaattttagtagagacagggtttcaccaacttggccaggctggtctcgaactcccgacctcaagtcatctgcctgtctcaacctcccaaagtgctaagattacaggcgtgagccactgtgtccagcccacagtatttttttatgccaactaagacaataggagtcaaaagttcaagggaaaagaacctttgagttcaagtgaaaagaacctctggcaatgaatccactcggaggaagtggttaagttcaaccattgcaattttagccaatctagactctaaattagaataaagtgcatggcagggaagcataggcttttattgcttttggtggtagtggtagtttttttctttcagtacaaacttggaaaagcaaaaggcagtggaggcaaaatgcttgcattttttgagatatttttgtttctgtttctcatttggaggacaatcctgtaggagaacacaaaaataaagtgttctttagagctaagtcatgg

SEQ ID NO: 700645 - DNA, 1788 bp, Homo sapiens
tgcagaggcagtccagagttcagcctactggttaaaacattcacaccagcaacaaacctagatttgactttttttttttttttttttaatcttttgagacagactctcgttctgtcaccaggctggagtgcagtggtgcaatctcggctcactgcaagctccacctcccgggttcatgccattctcctgcctcagcctcccgagcagctgggactacaggtgcccgccaccatgcctggctaatttttcttttttttaatagagacggggcttcaccatgttggccaggatggtctcaatctcctgacctcgtgatcggcccgcctcggcctcccaaagtgctgggattacaggtgtgagccactgcacccaacctagatttgattttttttaaccatagctagctagttatgtaggctttgagtgatgtgtttattttttctgaatgttgctttggtttttgttttcaccttatttctaaaaggcttgtgtactgattgactggagggtggtgagaaataaatatgacaacctcatccagttattggtgttgctataatattaaattatacaacaaatataaagtacttagcacagtccctgccacacaggaggtatttagtaaatgacaggtcttattatgaaggtcagaattttgaatatatctccctaatcagactgttagatctgacagacctactttattctgaaataaaacttaactacacaagaaggtaaagtctgatcatgtttgctgactagctgtaaagggcatcacaaatacagtatattcattttcaaacacagatgaggcactaaagctgatcaaatcatatgttttatgttaagtaaagatttgggctcatttttttaagtatataaaagcaaagatttgagaaaccaccagcagaaacatgtagaaaaatgctggagctaatcatgcctcatcaggtctacctcttggtagagatcttagccatgcttgctgatggccatgtggaaaactgtatctttcagcctcctgagagcattcagagctaaccggtatttgttttcattttttaatttattttttcctgtggacaatacagctccactatatatatatatatatatattttttttttttttttttttttttttaagatggagtctcactctgttgcccaggctggagggcaatggtgtgatctcagctcactgcaacctctgtctcagttcaagccattcttctgcctcaggatcccaagcagctgggtctataggcatgcattaccatgcctggctaatttttgtaattttagtagagacagggtttcaccaacttggccaggctggtctygaactcccgacctcaagtcatctgcctgtctcaacctcccaaagtgctaagattacaggcgtgagccactgtgtccagcccacagtatttttttatgccaactaagacaataggagtcaaaagttcaagggaaaagaacctttgagttcaagtgaaaagaacctctggcaatgaatccactcggaggaagtggttaagttcaaccattgcaattttagccaatctagactctaaattagaataaagtgcatggcagggaagcataggcttttattgcttttggtggtagtggtagtttttttctttcagtacaaacttggaaaagcaaaaggcagtggaggcaaaatgcttgcattttttgagatatttttgtttctgtttctcatttggaggacaatcctgtaggagaacacaaaaataaagtgttctttagagctaagtcatgg

SEQ ID NO: 700646 - DNA, 670 bp, Homo sapiens
tgtcagctaatttaatttaattgcatggcataattatttcacctatttctctaaaaagagattgtaataagagaactgcaaggaggttataaaatctcactttatttctcgattaccaggaaaggtctctgctgaaagttaccagacaattacagattcggcgggttttcatagttcttcaatgtatttgttayataccattagtcaccaggtaaagccgttcactaatagcaatgcccttcaacaatagccccagagaatttaacactgattgatggcaggtcacctggaattggttggcagaatttccaattttctgttgggaaattgcttatttctccaagtctattcccatttttacaagtggacagaaagctgagattatacattattatgtgtctaaatataaaattgtgatggatggtgtcacacatttaaagagagttaagcatttaatttaagatttaaaaagtttcaagaagtttaaaatgtatttttggtctttcttgggaattcacaaactgatccgtattgggagaaatactgaaagattgcctaaggaataccatttagatggggtattatattcataaaaattatccttctagattttcaaagcagtaggaccagaattttcttgtaaatatatttgaagagttcagacttatcc

SEQ ID NO: 700647 - DNA, 616 bp, Homo sapiens
tttggatggctaaattcagtcttaacccaagccatgttccaacaatgcaaacaggtattggtagataaaaatggattttcccttcaacatcctaataacaataaaaaatagttaaatatgatatacactcctgaaaacaacccaggtgttaacagccaagaaaactacgtgactacttgtcacctagttctgccagtgtgcagtttgctgatctcctttaatcttaatgtacagtaaaaattatcttaaacagtctccacataggtgattcattctatcacccagcactatttgctcttttttttttttttgagatggagtctcgctctgtcacccaggctggagtgcagtggcgtgatatcaggtcactgcaacctccgcctcctgggttcaagcaattcttctgtctcagcctcgccagtaactgggactacaggcacctgtcaccacgtctggctaattttggtatttttagtrgagacagggttcaccctattggtctggctggtcttgaacttatgacctcaggtgatccaccagcctcggactcccaaagtgctgggattacaggcatgagccactgtgcccggcccatttgctctttaaaaacatgaca

SEQ ID NO: 700648 - DNA, 643 bp, Homo sapiens
gcagctttcatgccttctcctgtggaatcaggatgcatcactttcccagcaaatccatgtgttcaaccaggaggccccactgagctttgaaactcaccgcaaagctacagtaatccaaagagtatggcgccggcataaaggcaggcatatagaccaaaagagtagaatagagaccccagaaataaaccctcgcatatatggtccaatgattcttgacaagggtgccaagaccattcaatgaggaaaagaaggtcttttcaacaaacagtgctgggaaaactgaatatccacctacataagaatgaatttggaccctgacctaacaccatatgccaaaattaattcaaaatggattacagacctacatgtaggagctaaaaccataaaactcttagaagaaaacaaggatacagcttcatgacattggatttggtgaygatttcttagatataacgtcaaaggcacaagcaacaaaggaaaaaaatagacaaattggacttcataaaaattaaaaccttttgtgagtcaaaagacactatcaacagagtaaaaaggcaacccacagaatgggagaaaatatttgcaaatcatgtatctggtaaggaattgatatcctcaagagatttcagtgtccagagttttg

SEQ ID NO: 700649 - DNA, 1129 bp, Homo sapiens
gtgcatcacgcttggacaattcactagtgggttgtcaaatgactatagagggatactgaggcccagaaaccttataccaactgtctaaggggccagagtttgagcagactcagaagggtggtctcctcatctcaagaccttccacttaattacatctgcaaagaccctttttccaaataagagctcagtcacaggttctggggattaggacatgaacacacctttttggggaccattattcaatccactacatacttcctgctgaagacatgtggggtcccactgctcctgagaaaagtggaaacttctgaccttgacaaccaagatcctctttagcctggttcttcatcccctctccaactttattatctattacgaacctgcacaacatgaagcttatacaagcccccatcatcatcatcatcatcatcatcatcatcatcatcatcatcagggatgtcttctagaaggtaatagtatccaagtagagtcctgacttagaagttagtcttctaactccttttgagcctgctctgactctggcctcttggacagttgacctaaggtattagggcctcagtttccctctgcaatcacttgacaacccatttagtgagctgtccaagtgtgacgcacatacaggaaaggtaaacgtatgtcttccctgcttatctgacagggtaatggagaggacaaaatacatgaaagatggaaagcactctgtgaattaaagtgtgacgcaaatgaggtgcatgcacgatcattctcgtctcctgggatttggccacctggatgctggaatgatcctgagcttcctgaggcaaccttggcatttataacaagtcagcrccctttgcttctgggaagaaaagcacgaggtttctgagggttggaataatgcagagaggtagctcctaaattgtctgcttctgtgagctcagggctgtttcactgtctctggccgcttggcatcgttgtgttgagggccccctcacagacatcagtggtgtctgtactagggtggcactggagatccaagccagaccctcagagccaagcctttgctccagcctacctggagaagatggctgtggccctagagaccctcccggtcacccccaaaccagca

SEQ ID NO: 700650 - DNA, 1625 bp, Homo sapiens
tggccggcaagggcccaacacttagcaattgtcaaagaatcggcagacgtgtccagtgggagctgaggcagggacagggacatcaggcccacgtgttgaaggcgtgggcctcccacaccactgccctcagtgttgtgtaactcaaaaacccatgtgtaacttttgactctcctaaagcttaactacgaatagcctgctgttgaccagaagccttactgagaacagtcaatgaacacatattttgtatgtcattatgtgtattttattttgtaagttatatgttactgcattcttatgataaagtaagctggagaaaagaaaatgttataaagaagatgataagggacagaaaacatatttactcattaggtggaagcggatcatcataaaggtcttcacccttcttgtctttacattgaggaggctgaagaggaggatgaggaggggtaggtcttgctgtctcgcaggtggcagagatggaaggaaatctgtgcataagtggaccatgcagttcaaacccatgttgttcaagggtcacctggagttgaggaaggtgccgtctttctcccaaggcccagggttttctttgcagagagcctcgtgatttagccctctggagaggagggaagcgaggccaagcttagccgtgtgtcatggatgtgttgtttgggccccagggcatgagtcacctgccctagttttttgttttttttttttttgtaaaggtcctgctgttgggtggattcatattttcggtatcagcctgggagatcctgagtgcaggatgtggttctgcccctctggtccctgttctgttgtgtgcatttgtgtacacgtgcacccacctccccttcttcaaggtgcttgcccttccgccacccgatgcccaacagggacccaacttaagacacacacaattatttctgcaggtcccttgagctcaaagtcacccgaatgtgagctggagtgaatgcaaccaagcagtcccagcaacacagactgccctgctggatgccagcatgactgggaatttcactcccccactgacgggggagcctgggggtgttcatgtgtgttttcctcggtggtgtgaagaaagtcatttggtcctgtaacggctgccctgtcacggtgggaagttagaaaacaaacttggcaatcacacccaccttgacttcccaaccctgcgagagagcttcacagcaggaccaggagaacagttcttgggacctttctctttccacctgtttcatctcacactgctgcccctgcttctgtgacctgcagcagtctgcagggtttgaacccttgatctgccagaagcccaccccagggctgggaccaacttgctctgctgccagtcccaccccccctggcasagggacacatggatggggacgtagatgggtgctgactggtcatgaatgacctccagaacaggaacagaggagggtttttcagtggggcggccccaaggtgccagcgcggggaaaagtggctgcccggacattaggtagatgtattatttgtcctcaaaggtctgcacaggatcctgggccaactggggcagctctcaggctgggctttgccagatcggagagcaaggcccccaggctgctcccaca

SEQ ID NO: 700651 - DNA, 1625 bp, Homo sapiens
tggccggcaagggcccaacacttagcaattgtcaaagaatcggcagacgtgtccagtgggagctgaggcagggacagggacatcaggcccacgtgttgaaggcgtgggcctcccacaccactgccctcagtgttgtgtaactcaaaaacccatgtgtaacttttgactctcctaaagcttaactacgaatagcctgctgttgaccagaagccttactgagaacagtcaatgaacacatattttgtatgtcattatgtgtattttattttgtaagttatatgttactgcattcttatgataaagtaagctggagaaaagaaaatgttataaagaagatgataagggacagaaaacatatttactcattaggtggaagcggatcatcataaaggtcttcacccttcttgtctttacattgaggaggctgaagaggaggatgaggaggggtaggtcttgctgtctcgcaggtggcagagatggaaggaaatctgtgcataagtggaccatgcagttcaaacccatgttgttcaagggtcacctggagttgaggaaggtgccgtctttctcccaaggcccagggttttctttgcagagagcctcgtgatttagccctctggagaggagggaagcgaggccaagcttagccgtgtgtcatggatgtgttgtttgggccccagggcatgagtcacctgccctagttttttgttttttttttttttgtaaaggtcctgctgttgggtggattcatattttcggtatcagcctgggagatcctgagtgcaggatgtggttctgcccctctggtccctgttctgttgtgtgcatttgtgtacacgtgcacccacctccccttcttcaaggtgcttgcccttccgccacccgatgcccaacagggacccaacttaagacacacacaattatttctgcaggtcccttgagctcaaagtcacccgaatgtgagctggagtgaatgcaaccaagcagtcccagcaacacagactgccctgctggatgccagcatgactgggaatttcactcccccactgacgggggagcctgggggtgttcatgtgtgttttcctcggtggtgtgaagaaagtcatttggtcctgtaacggctgccctgtcacggtgggaagttagaaaacaaacttggcaatcacacccaccttgacttcccaaccctgcgagagagcttcacagcaggaccaggagaacagttcttgggacctttctctttccacctgtttcatctcacactgctgcccctgcttctgtgacctgcagcagtctgcagggtttgaacccttgatctgccagaagcccaccccagggctgggaccaacttgctctgctgccagtcccaccccccctggcagagggacacatggatggggacgtagatgggtgctgactggtcatgaatgacctccagaacaggaacagaggagggtttttcagtggggcggccccaaggtgccagcgcggggaaaagtggctgcccggacattaggtagatgtattatttgtcctcaaaggtctgcrcaggatcctgggccaactggggcagctctcaggctgggctttgccagatcggagagcaaggcccccaggctgctcccaca

SEQ ID NO: 700652 - DNA, 844 bp, Homo sapiens
atgttaaactcattgaaaaaatacccttacagaaacatccagaataatgtttgactaaatatctgggcgtcatggcccggccaagttgacacataaaattgatgatcacacacacctaaaagcaaaatgacagagaacaattaaatgtaacagaaggggaaatatttattgggcaataacaaaccaaaaactgatttgacaatatctactttagacaatatctactttagacaatattaattagctgcaaaacatcaaatgaatgcaagttattttatgttgttgataagctgtaaaataaacaagacaggtgtcatagtcatgaagaagttttgcacttaataacaatattgaaatataacaaaactaatacatcaaagtaaatcaaataacaataagcttatatatactagtagacatcaccagaaagacaataatagtggatgaatttaatatgccacttttagtatttgatggtttaagtaaactaaaaataaaggacattaaatgttactaaggttacctttttaataaaacattaatgtttttattactaatagtattaagarttactcattgataacatgccatcgaaaacatacctttctttttgacatctatggattatttacaaaagtggatctcataactgagctcaaaacaggccgtaatgaaaatcctgatacataccaaaaataaaaacagcttggggttgagttatattctttgtctataaggcagccaaactagaaactaatagaataaatttaaacaacataaacagaggaaatcctacacatttgaaaaaaaatactctcctaaatactcttggtcaatttacaaa

SEQ ID NO: 700653 - DNA, 1348 bp, Homo sapiens
gaatgtatgagagttccaattgctttgtatctttgtcagcacttggtgttggcagtttttaaaattttagccatctaatataggtgtgtaatagtatcttgtagtttttatttgcatttctctcatgattaatgatgttaaacatcttttcatatgtttatttaccatcatatcttttgtgaagtgtctatgcaaatttttgctcaattaggttgttttcttaactgagttttaagagtttgtatattgagattaaattgatttcctgcagtattaaagttttcttcatcttaatctggtacttttttttccttactatgttgcccatgctggtctcaaactcctggcctcaagcgatcctcctgccttggcttccctgggattacaggcatcagcttcctcgcacaacaatttcttataacgtttattccttggatgaaattcctactgtaattacattttcttttctttttttgagatggagtctcactctctcgcccagcctggagtgcagtggcgcgatctcggctcactgcaacctccgcctcctgggttcaagcaattctctgcctcagcctcctgagtagctggaattacaggtgcctgctaccacacccggctaatttttgtatttttagtagagacagggtttcaccatcttggccaggctggtcttgaactcctgacctcatgatccacccgccttggcctcccaaagtgctgagattacaggcgtgagccactgggcccagccataaatacattttcaattcttctatacaacacatacatgcatacattgctgtggaagtggcttgttgtggaagcatctgccactgagagagcgtggcctaaaagcacaggagccagtccctgaggacawctgggctacaacggtgaacagtaaaaatggacaatgggaactttaaagagttttcctgccacaacatagtctgtagtgtcaccctagtgctctcttttgacaaagcttaacactgtgccagctagtaaaggaaaaatacttacacagttcagctccagtgtcaaaaagtagggcaaagaagagtggatttggagatggtggggcaataaactgaaaatagacacacttctctattttgtgtcatccctcttttctaattcaactatttcaacccctattcaggacccccatctcacacccaattgctctaaaagcttcctaatccatcttcctgcctctattcttataatatcttcccaaatccatcttcaacaaagatgacagtgatttaagagtccaattttgaaaataatattctcatacttaaaattcctaagtccctcctcctaaacaaagcatgttaca

SEQ ID NO: 700654 - DNA, 644 bp, Homo sapiens
attaagaaaactacaaaattattaaatacatcatctgaagagaagaactgatcaatgatctcataggccaatttgtagatgtcttcattttcatgattttgaagttgttcaattttctccagccctgcaagaaattttgcaatgtgaaacaatagtaatatttaaagagcagtgacaagttagaataatctttggaacacataatccaatttctgaatcgcaaattttttgaattataatttttgggaatttaaaggtgaatcttaaatataaaaaaattttatgcacaaagatacagcatatttatcttaaaatyaacaacctgagtgtctaactgcttgtaaatgtacaaataagtgtataaataagtaatgagacatctgcctattcatcagaatacataaccaatgtttataaccagcaataacatgtaaaattccatttaagtaaaaagcggaatcttcctactttccagcacctgccaagtttttctagtgagcacgtatgaaaataaatttaaaatactggtgattaataaatatgatgcttaagatacctgttaagtttactggaaaatgatgaagatctaacacagtatttcaggggaaaagagaattttccctgtaaacattaatgagtttaaa

SEQ ID NO: 700655 - DNA, 644 bp, Homo sapiens
attaagaaaactacaaaattattaaatacatcatctgaagagaagaactgatcaatgatctcataggccaatttgtagatgtcttcattttcatgattttgaagttgttcaattttctccagccctgcaagaaattttgcaatgtgaaacaatagtaatatttaaagagcagtgacaagttagaataatctttggaacacataatccaatttctgaatcgcaaattttttgaattataatttttgggaatttaaaggtgaatcttaaatataaaaaaattttatgcacaaagatacagcatatttatcttaaaatcaacaacctgagtgtctaactgcttgtaaatgtacaaataagtgtataaataagtaatgagacatctgcctattcatcagaatacataaccaatgtttataaccagcaataacatgtaaaattccatttaagtaaaaagcrgaatcttcctactttccagcacctgccaagtttttctagtgagcacgtatgaaaataaatttaaaatactggtgattaataaatatgatgcttaagatacctgttaagtttactggaaaatgatgaagatctaacacagtatttcaggggaaaagagaattttccctgtaaacattaatgagtttaaa

SEQ ID NO: 700656 - DNA, 1485 bp, Homo sapiens
tgctttgctccacatccctggaaacctaccaggtcccctcacctctttttttttttttttttttttttttttgagatggagtctcgctgtgtcacccaggctggtgtgcagtggtgcgatcttggctcactgcaaccttcgcctcccgggttcaagcaattctcctgcctcagccttcttagtagctgggattacaggtgcatgccaccacacccagcaaatttttgtatttctagtagagatggggtttcaccatgttggtcaggctggtctcgaactcctgacctcgtgatctgccctcctcggcctcccaaagtgctgggattacaggcttcagccactgsgcctggccaccctcacttctttttttgcttcccagcagggggagttactaccagggctctttggggagccaggacccctcggccgagcaacctgggccgtccccaccgtgcgcagcggctggatccagggcctgcgctccctggcacagcaccccagcgccctgcgcttcctggccgaccatggtgagtgcgcccacaccccaccccattcctcatcctgcctgtgtgatcccagggaattcactgcaccttgctgaatctgagtgtctggtctgtgcgatgtctcagggttgttgcaaagactgcactgtgacagtacggctgtccagtgttctctggttggcaggtcaggccctaggagccaggacggctttctcagccacttacagatcagccgtgaggactcagtctttgaaactatttgggagccaggcgtggtgatgcgtggctatagtcccagctactcgggaggctgaagcaagaggatcacttgagcccaggggttcgaggctacagtgagcagtggttgagccactgcactccaacttaggcaacagagcaagaccccgtctcaaaaaaacaagaaacgaggctgggcacggtggctcacgcctgtaatctcagcactttgggaggccgaggcgggtggatcacctgaggtcaggagttcaagaccagcctggccaacatggtgaaaccctgtctctacgagaatacaaaaattagccgggcatgatggcgggtgcctgtaatcccagctacttgggaggctgaggtggcagaatggcttgaacctgggaggtggaagttgcagtgaactgagatcgcaccattgtactccaccctgggcaacagaacaagactctgtctcaaaaaaaaaaaaaaaaaaaacaacaagaaggaacgaattgggaagcatcacaagctgtgtgtgtttaacgctcggggggaggaggtgcttgtctccagggagcttcagttcctgttcttttttgcttttgagtggagaggcatttgggggcatcttggggggccctctgctatttgtatcttccctgaggccctctgcctcccccagctctattctggctcacccccttttccctctcttcccccatcccctacccaggtgcggtcgaca

SEQ ID NO: 700657 - DNA, 1247 bp, Homo sapiens
gtagaatagtataaccagcctcttcatacctgttatccaggtgcaataattatcagtacatggccaatcttgtttcatttctattttccattgctccactccccctgatgacttattttaattaattcaacccccaagacactatattatttcatttgtcaggagttcaggatgtatctctaagacaaaaagactattttttaaaacaccataatctcattattgcaccttaaaaatgaacaatcattctataatgtcactaataatcagccagttttcaagtttccccatttgkctcagagtgtttttgtacagtgttgtgttggatccagacaagacccacacattgcatgtggctggaaagtctctgaattcttgttatatcataacaattcctccactcctcactaccacctgccccacctcacagaccatgcacatttctttggtttggtcatggagaggatttgagcaggtgtgtcatgggccgggggtgctggctagaacaatcccctggggagggtatacagaacagggccaggtgacccagaaacatggttggaaaaggaaaagtgtgcaaggacaaggcagtaaagatggaaaggagggcacccacgtctaagaaatagttaaagtgaaactggaacaatcagcgactgattggagggacagggtgagcaagaggaggagtcagctggtggtacccagctttctgatttaagcagtaggagtacagggtgttattagctagaaggagggagttggggtagggggaggagcaaagcattattgggatacagatttggttgtttaaacaaagaccaaaacaaaacatacacacacacgcacacacacacacacaacacacacatgcacaaagtgacttagacaacattattttctgcctaaatgttaaagcttaagcagcttacaaccaaggtggtggctccatggttttgggatgccagcgccttgtactactgtattagtccgttttgatgctgctgataaagacatacctgagactgggaagaaaaagaggtttaattggatttacagttccacatggctggggaggcctcagaatcatggcaggaggcgaaagacacttcttacatggcagcggcaagagagaatgaggaagaagcaaaagtggaaacccttgaaaaacgcatcagatttcgcaagacttattcactatcatgagaatagcatgggaaagaccagcccccatgacttaattatct

SEQ ID NO: 700658 - DNA, 1247 bp, Homo sapiens
gtagaatagtataaccagcctcttcatacctgttatccaggtgcaataattatcagtacatggccaatcttgtttcatttctattttccattgctccactccccctgatgacttattttaattaattcaacccccaagacactatattatttcatttgtcaggagttcaggatgtatctctaagacaaaaagactattttttaaaacaccataatctcattattgcaccttaaaaatgaacaatcattctataatgtcactaataatcagccagttttcaagtttccccatttggctcagagtgtttttgtacagtgttgtgttggatccagacaagacccacacattgcatgtggctggaaagtctctgaattcttgttatatcataacaattcctccactcctcactaccacctgccccacctcacagaccatgcacatttctttggtttggtcatggagaggatttgagcaggtgtgtcatgggccgggggtgctggctagaacaatcccctggggagggtatacagaacagggccaggtgacccagaaacatggttggaaaaggaaaagtgtgcaaggacaaggcagtaaagatggaaaggagggcacccacgtctaagaaatagttaaagtgaaactggaacaatcagcgactgattggagggacagggtgagcaagaggaggagtcagctggtggtacccagctttctgatttaagcagtaggagtacagggtgttattarctagaaggagggagttggggtagggggaggagcaaagcattattgggatacagatttggttgtttaaacaaagaccaaaacaaaacatacacacacacgcacacacacacacacaacacacacatgcacaaagtgacttagacaacattattttctgcctaaatgttaaagcttaagcagcttacaaccaaggtggtggctccatggttttgggatgccagcgccttgtactactgtattagtccgttttgatgctgctgataaagacatacctgagactgggaagaaaaagaggtttaattggatttacagttccacatggctggggaggcctcagaatcatggcaggaggcgaaagacacttcttacatggcagcggcaagagagaatgaggaagaagcaaaagtggaaacccttgaaaaacgcatcagatttcgcaagacttattcactatcatgagaatagcatgggaaagaccagcccccatgacttaattatct

SEQ ID NO: 700659 - DNA, 1086 bp, Homo sapiens
tttcctaaaaaaagttcttctttcctttcagcctttctctctgtctctctccccctcctctctgtccattcttttacaacctcaggagttaatggcagtacattagtttgcttgaaagattaaaaaacttagaaaaaattaatacgaaacaatatttttcctacaactttttacagaatatttatatttattggtttgtttgtttgttgagacaggatctggctctgttgcccagactggagtgcagtggtgcaatctgggctcactgcaacctcacctcctgggctcaagcaatcctcgcacctcagtgtcctgagtagctgggactacagggcacatgccaccacacccagctaatttttgtggggtgttttttttttttttttttatagaggagcaggttttgtcacgttgcccaggctggtcttgaacgcctgagctcaagcgatctgcctgccttggcctcccaaattgctgggattacaggtgtgagccactgctcctggccaagaaaatttattataataaaatgaatatgggctttggagtctagccatgacttgaggtagattcgacagccaaacttttgaaggctattttaattctgactgatgtgactgtagttgaaaggaataatgaaaaacatttacatcaagaaggagaggggcayatggcctgcatctgaggccgtatttcctctgtatgtgtgaaggtggataatcaccgcagtcccctgaccacctccccggtgtgtcctcactaggtatggaaaccgcggggccaggttggtgtatttttcatcttgagaatgggagtggggtttttcgaatgtttccaagagttccatcatgtggaggtaccctgctggctccttcaatttcccggtcaggcctttcttctccactggccacagatgatcagggggaggtccgaaagctgactgtgtacacaaaagagcccttctcagttgaagcaaagcaatcgtactttactgtcctttaagtttttctactttaatgcacctcattttcttgttacaaaattccaaaatactatgaaatgcaaaaaagagaaaggaaagaagag

SEQ ID NO: 700660 - DNA, 1533 bp, Homo sapiens
gcaaagcacatctaccaaaccctcactgcctcctccactgtgcagttgctctttaaacaaattcaaatggaatctaagcacaaaagctaagcacactgaaagaacatttctatatatgcacttggtaggtttcaaagctcacagaacagactgcagaatttcacatatgcaagatgatgaaacacattcttagggacccgagggtcccaaacaagtcaggcgctaggacctccaccgtattctccaggcccaagttgtgggggtctttttgtccgttacacccatgcatgtaatcagcgattgttcctattgtaaaccctagattcaccatctgtatgctccaaaaggctgggggattgttaataccccatccctatgggattaatctgcaatttcacactaaatgatttttaagtataatttgttacaatgatacattaccatttctaaaacaaacagccaggattgttatgaggcaagtatctggggagtgctatattggaacaagtttatacgccctggtttcacgttcacctcacttcagacacaaatgggaagagatgggaaaggccccatctagaatcttgggaatgggctgttggtgagtgaacacgctgctttttgttactggggagcatgatccgaacacacaatagtagtaagactgaaagaaagttctctaagcagttctttaaaaccactcacggttgctgggtgtttgcaggataaagctgtttgcagtgaaaagtacaagtttggattctcagttgagcaaygaactatttaaaaaggcccttttgtggacaaaggaagagctcccccccacccacccaaatcaatctgtgacataaaaaagaggtggcttgaagcatgcagaggaattatgcattttcatgtaacactcttatttttgtcttagtttattccataaaagatattattctaatcaagagttaccatgaatttcaaaatatattacaaagaagaatatacttatttgaaatcaaacctaaagaaagcaaaagcaccaaacacccacctcacagcatcatcaggaagtcagaacgagatgtatagaacttagcacctcgttgggcagagtaagctgtttgagaggataactcattctttgtattagctactgacaatttttgaaattttgatagcaacacagacacagaagatattttatttttgtcttcactgtattataagaccaaagaaagacatgttccaagaaaaatggcaaaggcccaagtcttgggattgggtgataaggactggtagggtctggggcatactgaaaaccctgggaccagccctgtaacaggaggcaagctgcacttggtcccagctgatagctatcttgagggatcgtgggcctagtgtggccaacttttcgatttttaaagaaaaaaccccaacgtgtagaatttaaaaattctagcatctaattcaaaaattttaaaagaaaacctgtgagccaaacaaagcctgtctgtggctgaatgtggcctgtagatccctggctca

SEQ ID NO: 700661 - DNA, 668 bp, Homo sapiens
actcttagactcaggatacttagagcttggttctgatgtggacgaaaatattgccttgcagtgagcatatgaccattttgccccaaaaagtgagccatagctgaaagaagtcacagtaagcacagtgccaacggtagggaccatttttatctatgtataagggtggtattagagaaacagaaggattggaaaagatgagaatcagaatttctaactaagttagggtaaacttaagatacctacacatactcaagtgaagatatccagtaagctactggccataaggatttgggatatctaagtaatgcctgagtgttgggtayctgattccttttcatctcaacttctattgacatattggaataatttaattcataacactctggtctcacattttcttgatcatgttgactttaatgatcttcacacattcatttactcattcagaaatatttactgatcacttactatgtgccacttcccacaaaacttaaaaagttgtacaggacaagatgttgcagcatctgtgcagcttaaaatcattcaactttagaacctcagaatcccatgattacaacctggaatctcaaacttccttccaaccaaatactctgttctgagagctactagagaaaatgctgcattgtgtagattaaggcaataaccaa

SEQ ID NO: 700662 - DNA, 668 bp, Homo sapiens
actcttagactcaggatacttagagcttggttctgatgtggacgaaaatattgccttgcagtgagcatatgaccattttgccccaaaaagtgagccatagctgaaagaagtcacagtaagcacagtgccaacggtagggaccatttttatctatgtataagggtggtattagagaaacagaaggattggaaaagatgagaatcagaatttctaactaagttagggtaaacttaagatacctacacatactcaagtgaagatatccagtaagctactggccataaggatttgggatatctaagtaatgcctgagtgttgggtatctgattccttttcatctcaacttctattgacatattggaataatttaattcataacactctggtctcacattttcttgatcatgttgactttaatgatcttcacacattcatttactcattcagaaatatttactgatcacttactatgtgccacttcccacaaaacttaaaaagttgtacaggacaagatgttgcagcatctgtgcagcttaaaatcattcaactttagaacctcagaatcccatgattacamcctggaatctcaaacttccttccaaccaaatactctgttctgagagctactagagaaaatgctgcattgtgtagattaaggcaataaccaa

SEQ ID NO: 700663 - DNA, 491 bp, Homo sapiens
tcggctcactgcaacctccgcgtcccaggttcaagcaattctcctgcctcagcctcaccagtagctgggattacagccacagtgcccaccaccatgcctggctaatttttgtatttttagtagagacggggtttccccatgttggccaggatggtctcgaacttgtgacctcagttgatctgcctgcctcggcttcccaaaatgctgagattacaggcrtgagccactgtgcctagcccagagttgttaactattgatgttattattcactaaatggaagctaccattaattttcacattttattgatccagactcacaccatgtagatctcctgaagccagcatcagccccaacatacttctcatatcatggctagtgtacaagtttacctaggcttggcatctggcaagcatctaatatgcaccagtaaccaatagcatacccctgcctcctttgatagaatctctttttttttttttttttttttttt

SEQ ID NO: 700664 - DNA, 1415 bp, Homo sapiens
tatgcaacatgccatgccaagttctattgcacgtattaaaatgagaagcttcttcaaataatttattgtaagatacatgaaaagaaatacctatactgcaagttaaaaatgtgataattttacacatgatagagagaaaagagccacagagaaaggtctattttgtgccaggcactttataaacactattttgtataattgtcctcataacatcaaatttcccacacattaccaaaatgagaactgaggctcggggagtttaagtgacttgcataaggtcatgcagcaagctatgcacagcaaagttttgaagctggatccctctggctccacacctgtgctcttcccattgcagctttgctgcctcctgagggagcacagatgagggcaagatgattccagcagcagacaaataaaaagcctcttagaagaggtggcatttgagcagcrtatttagaatgagtcaggccaatatggggtattctttctttgtgctagaaggagtgaacaacacattcaaataacaatgaatcttcctgtatgtttgcaggaaaatgtgaaggattctgaagctgttcttttttatttttatttttatttcattttattttttttttgagacagagttttgctcttgttgcccaggctgaggctggagtgcaatggcccaatctcagcttactgcaacctccacctcccaggatcaagcaattctcctgcctcagcctcctgaatagctgggattgcaggcatgtgccaccacacccggataattttgtattttcagtagagatggggtttctccatagtggtcaggcaggtctcaaacccctgacctgaggtgatctgcccacctcggcttcccaaagtgctagcattgcaggtgtgagccaccacgcctggccataaagccactcttatgtcttggttttatactcaccggtagggagattttggaattttttaactgaagagtgacataatctaaactgggaggactcggggaggcatccactgaagtgtttacaccatgcacatttgcaggtagagacatggaaggaaatcccatgtcttacctcatgcaaaaaatagctacctggaaaagtggacatatcttgccaccaacaccctaccaccagtaccattgcatacatgtcatacatttatcatatgagagtggatataaagtcatattagggccttgtttagtttcattttctttggctgctttcaattgtttcaagactgattgtgttccctgattatctacaaaaccaatcaagtagtaattattaaatagtaacatggaaattaaccaaattatcctgccatctcatccacaccatatagatgccattttgacctgaaaaagctggtatcttagccttaaatgaaaaatgtttgatatgtattaa

SEQ ID NO: 700665 - DNA, 348 bp, Homo sapiens
gggcacggtggctcactttgggaggccgaggtgggcagatcacgaggtccggagatgaagaccatcctggttaacatggtgaaacactgtctttactaaaaatacaaaaaaaatcagctgggcgtggtggcacgcacccataatcccagctactggggaggcagaagtaggagaatagcttgaacccrggaggtggaggttgcagtgagccaaggtcgcattgcgctgctgcactccagcctgggtaacagagtgagactctgtctcaaaataaataaataaaaagaaagttggatgtcttgtaagataatgctgagtaatgcagaaatacacgtagacatttatgca

SEQ ID NO: 700666 - DNA, 799 bp, Homo sapiens
ctgcagctcttcatccccatgaagaagggagaactacacaggaaacaactaaaggacaaaaataacaactgttcttaagcacaaaaatgtgccctaaagatacatagtgctgcagggaatgagagtggggcaatatctatgtgagcaggaaaccttaaatacaagggagaaaaatgggacacgatcctaatggcagaggctgctattataggtttggggccagcagaattacttggtgagatgaaaagtcacagagagccacaatccgccaagaagccatccattttagctgactctccaagcagacccttggccagatccactaaacatttcagatttgactctttctctccagagctgataatcagcacagacaggatcccagatggtaggaaaaaggggtgacaagctagagaatcaagctctgagtaagtgcagatgccaccaggagcaaaacttttttccagaaatgaaacctccattgttgctagagagtttgagttctaaaagctttgcttatgatttccctggagtttcttgagggtctcccatatccaagtayctgcgatactttctgtcttcaccatgcatttggcacttagcattagctaatgccatcatttcatgtgctgcccatcaccatcgctccatgacatttactacctgtgcactgcactgtgccaggcacagaagacatttgtaagtctctgccactgggtgtgtacagcctttctgggtagacagggcacatcttaatgcctattaacagcccttacagttcactgtgatctcagtagac

SEQ ID NO: 700667 - DNA, 799 bp, Homo sapiens
ctgcagctcttcatccccatgaagaagggagaactacacaggaaacaactaaaggacaaaaataacaactgttcttaagcacaaaaatgtgccctaaagatacatagtgctgcagggaatgagagtggggcaatatctatgtgagcaggaaaccttaaatacaagggagaaaaatgggacacgatcctaatggcagaggctgctattataggtttggggccagcagaattacttggtgagatgaaaagtcacagagagccacaatccgccaagaagccatccattttagctgactctccaagcagacccttggccagatccactaaacatttcagatttgactctttctctccagagctgataatcagcacagacaggatcccagatggtaggaaaaaggggtgacaagctagagaatcaagctctgagtaagtgcagatgccaccaggagcaaaacttttttccagaaatgaaacctccattgttgctagagagtttgagttctaaaagctttgcttatgatttccctggagtttcttgagggtctcccatatccaagtacctgcgatactttctgtcttcaccatgcatttggcacttagcattagctaatgccatcatttcaygtgctgcccatcaccatcgctccatgacatttactacctgtgcactgcactgtgccaggcacagaagacatttgtaagtctctgccactgggtgtgtacagcctttctgggtagacagggcacatcttaatgcctattaacagcccttacagttcactgtgatctcagtagac

SEQ ID NO: 700668 - DNA, 847 bp, Homo sapiens
tagtctttggataagtatgcaaataagcctaattttaaaaacaaacaacaacgaaacccattttattccaaagttctagatctctgcccatcttacagtttgtatgctgggtataacagtaaccatatcttctatggycaataattaagacaactggcttagaaatagaccaaaatgtcttaaaatcagatattttccccaagtccaaggaatacaataattacttttgtgtttaaaacaataaatataatgcttaaaatcataatagtggtatataaatcattaaagtgtcagttataaatccatttggtaaacagagattttaaaaaaatgtctctgatgacgcttacctcttcccctataattgtgagtttggggaatttccgggccaatgaagaacatatgctcatctgtgccaatcggtcagctttggtctgcaggtctgttgcacaggtctgtaataaagaatgcaaattttagcagagctaatgaaaaataagttgtcctctgattccttgtgcatgagtgcctacataatttagattacactgtcagtttttagagtcatagaacttaacaccaaatgagttaactggtttcttgccttggtttttctcaaaggattaatagtgggtaaagtttggaaaggagcttttaaataatccagaacattttcttccctagtttagaaattccttatctctagacatcaaccttttgcttaaataggttaagagataggaaatgtataacttttcaaggcaaagttaatagttattagaaaagtgttccgtggatctttctataacttccacactaatcctaatcataataattcaacaggtcc

SEQ ID NO: 700669 - DNA, 1401 bp, Homo sapiens
aacaagactgacatggcccctgtttttaatgagataatagtctagctagtttatcttctagtaatattagggaggctttgagtgttgttgctgtttttcacagatgtggagaggggaatgttaattcttccttttaggaacacattccagattttcattttctttgagcaatttcttttaatttggtgaatggaattttttctaaattatgctattaagaagtttaaacttttaagtagacttgaggagtaagagtatgttttaggaaaagaaagtagaggctagagactggaaagtcattggaaagctatttcaatattattataagttggatctgaggtaagactttaggaataatctaaatattgttgctgtggtgttcttacagagcttggtcagatgtaaactactaatatcttaatacttacattaagaattaatgtaaattctgtccagttcagattattttattttatttttgatacagtctcactctgtcacccaggctggagtgcagtgatgtgatcttggctcactacaacctccacctcccaggttcaagtgattctccctcctcagcctcctgagtagctgggactacaggcacgcgccactgacttggctaattcttgtatttttagtagagatgggctcttgccacgttgacgaggctggtctcgaactcctggccacaaaggatccatccacctctgcctcccagagtgctgagattacaggcatgagctaccatgcccagcctcagacttagtttaaaagaaaaagaattaaagtgattatacctgagacgagtttccacaaacatttgtttaaaatttcacactggaaagttttttttttttttggaaagttttataagccatgtcattgtctcctcttcttttttttttttttttttttttttgagatggagtttcactcttgtttcctaggctggagtgtagtggcacgatctcagctcactgcaatctccgcctcccaggttcaagtgattctcctgcctcagcctcctgagtagttgggattagaggcatgtgccaccacgcccggctaattttatatatatatattttttagtagagacggggtttctccatgttggtcaggctggtctcaaactcccgacctcaagtgatccgcccgcctcagcctcccaaagtgctgggattacaggcgtgagccactgtgcccggctactcttcttttcactatttagagagcaagatgtctagggaatttcactgaagtgattgargtgggtggggattccttggtggaataaccctctggactctgaggtggatcatatgtatgtattagtaaatatagcaaactggtttaattgatacatcctgataattaaatggtacataggttgactgg

SEQ ID NO: 700670 - DNA, 1401 bp, Homo sapiens
aacaagactgacatggcccctgtttttaatgagataatagtctagctagtttatcttctagtaatattagggaggctttgagtgttgttgctgtttttcacagatgtggagaggggaatgttaattcttccttttaggaacacattccagattttcattttctttgagcaatttcttttaatttggtgaatggaattttttctaaattatgctattaagaagtttaaacttttaagtagacttgaggagtaagagtatgttttaggaaaagaaagtagaggctagagactggaaagtcattggaaagctatttcaatattattataagttggatctgaggtaagactttaggaataatctaaatattgttgctgtggtgttcttacagagcttggtcagatgtaaactactaatatcttaatacttacattaagaattaatgtaaattctgtccagttcagattattttattttatttttgatacagtctcactctgtcacccaggctggagtgcagtgatgtgatcttggctcactacaacctccacctcccaggttcaagtgattctccctcctcagcctcctgagtagctgggactacaggcacgcgccactgacttggctaattcttgtatttttagtagagatgggctcttgccacgttgacgaggctggtctcgaactcctggccacaaaggatccatccacctctgcctcccagagtgctgagattacaggcatgagctaccatgcccagcctcagacttagtttaaaagaaaaagaattaaagtgattatacctgagacgagtttccacaaacatttgtttaaaatttcacactggaaagttttttttttttttggaaagttttataagccatgtcattgtctcctcttcttttttttttttttttttttttttgagatggagtttcactcttgtttcctaggctggagtgtagtggcacgatctcagctcactgcaatctccgcctcccaggttcaagtgattctcctgcctcagcctcctgagtagttgggattagaggcatgtgccaccacgcccggctaattttatatatatatattttttagtagagacggggtttctccatgttggtcaggctggtctcaaactcccgacctcaagtgatccgcccgcctcagcctcccaaagtgctgggattacaggcgtgagccactgtgcccggctactcttcttttcactatttagagagcaagatgtctagggaatttcactgaagtgattgaagtgggtggggattccttggtggaatarccctctggactctgaggtggatcatatgtatgtattagtaaatatagcaaactggtttaattgatacatcctgataattaaatggtacataggttgactgg

SEQ ID NO: 700671 - DNA, 594 bp, Homo sapiens
tgggtgtccacacgggaaagccccctttatggtctcattgggataaatgataccttccttctgctattataaggactagagagagagcagttctcattccaaaactgattttgacaggtgaaggttcaaaygcttcaccaaactcttggaacaataaaaagatggcgacttgcccaaagacctccaggttcccatccacatgaaataggagactccccaagcctcgaaaatgaaatgttacacagcatcacagggtcaacaacgtctgaccatcacgtagatgagacacttttcagatctgaacgtgctctgcaatgtttacgccgagggtaaaacatggagcagaaccttaagaggaggaaaaggccagatgagccggaagcctttcagcaggattccatgtgaagacttgctccagggcctttttcgggaataaaataaaccaacgcctaccaggtccgcctaaccacctagaatctgcttagatttcagtgggttggaattgggccatgggtttctcctccccaaatccagccaataacaattcccacataactggtcttggctctggacaaccctgaccctcaaaccaca

SEQ ID NO: 700672 - DNA, 951 bp, Homo sapiens
gaagaaactggtagcctttttttttttttttttttttttaaawaaaaaaaaaaacagagtctcactctgttgcccaggctggtctcaaactcctagtcctggcctcccaaagtgctgggattacaggtgtgtgccactgtgcctggcctacatttcaagttcaggagaacagttttgtcccataaggtagttaaaaacgatggctatgtgtagtcatttactgtactcattcttttaccaaacaaacctatagtttttcctattgaagtgtctgagaaactaacaagaaactctttgcctcctctccagttacaacattctggtttccatgttttaaaaggaaatactctttaattgagtggaatcaagttttttaaaaaaattactaggtccttaattgtttcaacatagaatcctcatggactggacttgtttgattttctggttttcatttgtgttttaaaaaattattattggaaattattgatgaaatccttatctttatttccctttgatatgtcagattacaaaagatagaattttgacctgacattcatgaatgtggtagaaattttctagaaacattcatttttgtaattttgtggctaaaagttatactcgtggttgaaacagtacagactgaaaatctgtttaagttattaggatgtaatactttataaatatatatagaatttaaaaattatttgtactttgtaggtaacttcttgttttcattaaattgtttacactttgtcacaggttgtgctgatacagtttgatgttctgttttgcatagagtattctgtttcttctttgaccattaataatgttctactgtgttaacagcagtttgtaataatttgaaataataaatactctcttaatcttgtgatctaatatccattggttatagcttggtctttgatagaactagaattgccgatactttca

SEQ ID NO: 700673 - DNA, 951 bp, Homo sapiens
gaagaaactggtagcctttttttttttttttttttttttaaaaaaaaaaaaaaacagagtctcactctgttgcccaggctggtctcaaactcctagtcctggcctcccaaagtgctgggattacaggtgtgtgccactgtgcctggcctacatttcaagttcaggagaacagttttgtcccataaggtagttaaaaacgatggctatgtgtagtcatttactgtactcattcttttaccaaacaaacctatagtttttcctattgaagtgtctgagaaactaacaagaaactctttgcctcctctccagttacaacattctggtttccatgttttaaaaggaaatactctttaattgagtggaatcaagttttttaaaaaaattactaggtccttaattgtttcaacatagaatcctcatggactggacttgtttgattttctggttttcatttgtgttttaaaaaattattattggaaattattgatgaaatccttatctttatttccctttgatatgtcagattacaaaagatagaattttgacctgacattcatgaatgtggtagaaattttctagaaacattcatttttgtaattttgtggctaaaagttatactcgtggttgaaacagtacagactgaaaatctgtttaagttattaggatgtaatactttataaatatatatagaatttaaaaattatttgtactttgtaggtaacttcttgttttcattaaattgtttacactttgtcacaggttgtgctgatacagtttgatgttctgttttgcatagagtattctgtttcttctttgacmattaataatgttctactgtgttaacagcagtttgtaataatttgaaataataaatactctcttaatcttgtgatctaatatccattggttatagcttggtctttgatagaactagaattgccgatactttca

SEQ ID NO: 700674 - DNA, 1507 bp, Homo sapiens
atcaagttaataaattttacaaatttctggtaaactttaaaaatttgcttaaaattagaattttttatttgtaccacgacacgggctaccggctagctgatttcctaatcaaaaacatttttggccaggcacagtggctcatacctgtaatctcagtgctttgggaggtcaaggtgggaggatcgcttaagggcaggagttcaagaccagcctaggcaacagcaacatagagagacccagtcctagctactggggacgctgagtcaggaggactgtttgggcccggaagtttgaggctgcagtaacctaagaaggtgccaatgcactccagcttggagcaagaccatgtctcttgaataaaaaaaaaaaaaaaaaaaatcaaggccaggctcggtggcctctaatccgaacactttgggaggccgaggcaggaggatcgcttgaacctagaaatttgagaccaggcttggcactatagtgataccctgtccaggcgtggtggctcacgcctgtaatcccagtactttggaaggctgaggcagggagataacctgaggtcaggagtttaagacaagcctggccagaatggtgaaaccccatctccactaaaaatacaaaaattagccaggcgtggtagcgggtgcctctaatcccagctattcaggaggctgaggcaggagaatcgcttgaacctgggagaaggaggttgcaatgagctgagatcgtgtcactgcactacagcctaggcgacaagagcgagacttcgtctcaaaaagaaaaaaaaaaattagccggacatggtggcatgtgcctatatagtcccagttactcggaaggctgaggtgggaggactgcttgagcctgggaagtagaaagtgcagtgagccaaaaccacaccaatgcactccagcctgggaaatacagagtgagaccctgtctcaaaaaacaacaaaacaaaaaatattccacccaatttattttactgtgcttcaaaaacataaggaaaatgaaacagacaagccaaacagatcagagatgatcccttaaaaagaatttgtcaatatgcttcccaaagggatttgcttggcagaattctggaccacattcctaaaataacacttactgacattctgctacctgtaatatttcaccctgcttatcacagcttcttcaatcacaggcgtcagggttcttcaatattaagtcctaagtacgttgttgcttgtgcataaattatacacaatagcataagcatgcatctctgccaagatttgtcgcagcaggaactcctcacaataccgaaattatgccctaacactagtttatagtgtcacacaaacagcttactttgatctcgcctrttttatagaaataaatttgataaagatgattcctgaggatttctgaatgtcacttcacaatggaaaatttgggcacagcatatgatattatgtattactagcctgggcaacttaaacagatcatttctattttttgagtctcattt

SEQ ID NO: 700675 - DNA, 1177 bp, Homo sapiens
tcttgtatctaagcaatcaccaaaatatttaataactcaaagatgatttatcatcaaacataagaattaactccctgggaggaaagaaacaaaattctcagattttttttttttagtaacagggtatctgtttccaaaataaacatctcagacacgaaacagtgtgggaaagaatcattccctacgtggtggagatttccccactgaatcacactcagtgctaagcacccgctggctttgcacagcacataacggtgcttgaggaagatgcatctgctcttgacactgacatactcgaaggatttcctacccagtgatgagcaaaattttcctctctaccagccagcaagctcagcactccagcacatggcttataaggatacttgtattaaaaccttggcccaaaaaggacaaagctggcacaggaccacatcttgatgtaactacattccaccaactaggagcaatttgtgaatggcaaaaatgtagcacagacaataatagtataacaatgcatcatcaaaaggggaaaatatagatgattaagatggaacgaaacaagtagattctctctttgatgtctacgtgtaagtaaaaaaaagtggccatggcaatgcacttcaatcaagtcaaccatccctccacaaaactaacgctttgacactttggaaagctttcatttctcactggaactctacctctatacagatttcactctgtctaaaatgaccattgcaaagcaaaatcagcccrgatccatttgggactcatgaattagtaagactatggaaaaaaacaaacaaaaacctagtattttttttttcctttgacaagttaattcattaagattaaaatgttctgggaggacgcggtggctcacgcctctaatcccagcactttgggaggccaaggtgggtggatcacccaggtcaggagatcgagaccatcctggctaacacggtgacaccccgtctctactaaaaatacaaaaaattagctgggcgtggtggtgggcacctgtagtcccagctactggggaggctgaggcaggagaatggcatgaacccaggaggcggagcttgccgtgagccaagatcgcaccactgcactccagcctgggcgacagaacaagactccgtctcaaaaaaaaaaaaagatttaaatgttttgttctcaa

SEQ ID NO: 700676 - DNA, 1177 bp, Homo sapiens
tcttgtatctaagcaatcaccaaaatatttaataactcaaagatgatttatcatcaaacataagaattaactccctgggaggaaagaaacaaaattctcagattttttttttttagtaacagggtatctgtttccaaaataaacatctcagacacgaaacagtgtgggaaagaatcattccctacgtggtggagatttccccactgaatcacactcagtgctaagcacccgctggctttgcacagcacataacggtgcttgaggaagatgcatctgctcttgacactgacatactcgaaggatttcctacccagtgatgagcaaaattttcctctctaccagccagcaagctcagcactccagcacatggcttataaggatacttgtattaaaaccttggcccaaaaaggacaaagctggcacaggaccacatcttgatgtaactacattccaccaactaggagcaatttgtgaatggcaaaaatgtagcacagacaataatagtataacaatgcatcatcaaaaggggaaaatatagatgattaagatggaacgaaacaagtagattctctctttgatgtctacgtgtaagtaaaaaaaagtggccatggcaatgcacttcaatcaagtcaaccatccctccacaaaactaacgctttgacactttggaaagctttcatttctcactggaactctacctctatacagatttcactctgtctaaaatgaccattgcaaagcaaaatcagcccagatccatttgggactcatgaattagtaagactatggaaaaaaacaaacaaaaacctagtattttttttttcctttgacaagttaattcattaagattaaaatgttctgggaggacgcggtggctcacgcctctaatcccagcactttgggaggccraggtgggtggatcacccaggtcaggagatcgagaccatcctggctaacacggtgacaccccgtctctactaaaaatacaaaaaattagctgggcgtggtggtgggcacctgtagtcccagctactggggaggctgaggcaggagaatggcatgaacccaggaggcggagcttgccgtgagccaagatcgcaccactgcactccagcctgggcgacagaacaagactccgtctcaaaaaaaaaaaaagatttaaatgttttgttctcaa

SEQ ID NO: 700677 - DNA, 1237 bp, Homo sapiens
gaccaatatggtgagaataaaagtacaaaaattagccaggygtggtggcacatgcctgtaatcccagctactcaggaggctgaggcaggaaaatcgcttgaactggggaagtggagcttgctgtgacctgagatggtgccactgcactgcagcctggacgacagagcgagactccatctcaaaaaaagacattcagttggtaatctgaaggattaccaactctccctattggaaacaaccagaaaataaacataaaagtgtctgcaacataaggtagataggtgggatgcatcatattgagatgatactaagtaccatttctactgtagaggaaaatatatgacaattatcactgtcactgcctgacatacaaaaatggaacagaacagtggggtaatgaagggaggggagggaaagggaagagcaggagagagaggagttggaggagagaggaaacaaagggaaaagggtctattaaacagaggcctagagaagctaaaatttggaaatggcaaatctgagaagagcctgaataaaaagtggggctgaggccatgcacagtggctcacgcctataatctcagcactttgggaggccgaggcaggacctcaggatcacctgaggtcaggacttcaagaccagcctggccaacatgatgaaaccccatctcaactaaaagatacaaaaattagctggacgtggtggtgcatgcctgtagtcccagctacttgggaagctgaggtgggagaatcgcttgaacctgagaggcagacgttgcagtgaggcaatatcgtgacactgcactccagcctgagcgacagagcgagactccgtctctcaaaaaaaaaaaaaaaagagggcctgaaaatagagattaattgaaagtctgtatactcaacattttccctcacctatatccaaaattttaactttcccaaaataataatatataaactttatataaatatactgaagaatactataattagaaccgctaggctgggtgtggtggctcacatctgtaatctcagcactttgggaggcagaggcaggtggatcacctgaggtcaagagtttaagaccagactggccaacatggtgaaaccccatctctactaaaaatacaaaaaatttagccaggcatggtggcacgtgcctataatccctgttactcaggaggctgaggtgagagaatcacttgaactcgggaggcaaaggttgcagtgagccgagatca

SEQ ID NO: 700678 - DNA, 632 bp, Homo sapiens
ttaattggagttaatcgtgaaataattggaaaccaccagatgatttcactttcaagtcaatgaatgagtctaggattcattatgaaactatatttttaaagtacagatttacttgaagactgaaaactatcaatccggataaaatttatcagttacaataaatacaatttggaaattagaacagatattttcatcacattttaggattattttgctttttcaacaatagattttgagactgygcaaataagccctttataaaagaacttgctgacctaccagagttgcttaatcaaatcacaaacaactattaaataaatccctgctgtgacttatcaccctggagagcactagataaactagttatttgagtgcttgaccatgtatcatatctgtttgagatgtccacttcccaactgcaggcccttcctcccaaaatgagttctaagtatactaactcagctcatattttaaggcaggccattcaaacatatcctcaaattgaatgttagaaatccatccagttctttttgtatgaagttataatatacagagatttagaggactgttaacttatagtttttatctctgaaagtaaaaaaaatataaataacactaattgtatgttattc

SEQ ID NO: 700679 - DNA, 3747 bp, Homo sapiens
  misc_feature 1429, 1481: n = A,T,C or G
ttatacackgtaccatggtgaaaatgaatgaattactcttaaatgtatcaccatagagaaatctgaaaaacaaccttgagaaagaaaagagaaagcaagttaaataagaatataaataatttatgtaaaatataaaaaacaggcaaaactaaatgacatattgtttagtgatacatacatatgctaatactatgataaaaaataagggaacaaggaacacaaaattctggttggggttacacctgtgagggcggaaggggtgtgggcatataaggggtttctaaggcactggctatgctttattttataagctgaatggttgttcattttattctttttttttttttttttttttttgacacagggtcctgctctgttgcccaggtggtacaatcacagctcactgcagccttgacctcctaggctcaagcaatccttccaccttagcctccaagtagctgggactacaggcacatgccaccacatccagctaatttttgaaattttttgtagaggcggggtctcattatgttacccaggctggtcttaaactcttgggctcaagcaatccaccagcctcagactcctaaagtcctgggattacaggcatgagccaccacacctggccttgttttatcctttacactactcatttacactgtattttctcttctgtagatatgaaatatttcacaacaaaatatcttttgaaagcaaaaaaacaacagagattgttaattattgagatactttagctgatatgattgagataagagctcagttctataaaagaattcactccccaatgaactgggtggccccagtgctctttatttctgaataattaaaatctttggattttttgaacctgtgatagggcttgggtgcaggtagtgaacttctgggctgatcacagggagcaggattgtgagacagtaaagcagactgatatagggaaggagaaaagtcgataacttatgtattatttaggtcatttctgtagacagtaggggctcaattccaccaaaacctcggagaagcacaaagaatgtctcctgaattcatgttgaagaacaggagactgtgcactgactgactttagccccgactggtcgagagttgctcccaggggtattaactcactgacacttctgggctgcgcttgcacttggactaggtacaaggcttccaaagaaacctagaggcagaaaaggcattatgcatacaatggtacaggaaatagatcctaccagcatacatgaactgtccaccacgctcgagctgcagctgcaaccagaggtaggccaagggtgcaccaaaggatctgcgacaaccagcatgacagagccaggcatcacatttgaaaagcatactcacaacgcacaggttgcttgctttccatctcaaatttgctagatgtgtaatttcnaatgtctcacacaaaaaaaaagttaaatatttgaggtgatggatatgtaacnaccttgatttattatttcacattgtataataaatcataacatcactttgacctcatatgtcatacaattatagaatgtcatttacaataaaaaaattttaaaaatcatttgtgcaaattcaccccctttgagataaaagtggcaatgaaaaaatgtttattattcatcagaactatcagaacttatttttcccactcttttttttttttttttttttttttggtgacagagtctcgctcttgtctcccaggctagagtgcagtggcacaatctaggctcactgcaacctctgcctcccaggttcaagtgattctcctgcctcagcctccccagtagctggaattacaggtgcatgtcaccatgcccggctaatttttgtatttttagtacagttggggtttcaccatgttggccaggctggtctcgaactcctgaccccagatgatctgcccaccttggcctccaaaagtgctgggattacaggcatgagccaccatgcccggcctcccactcatcttttaagatgctgctcaggttctacatcttccagaaaccttctctggctccccctggctagattagatgtcgcatttcaatgcctccataactctttgtgcacttctttgccactgtacttatctgattgcattttaactagcaatatatttatctatctcttccaccagactgttttagtcgtcttggaatgctatgttctcatttggcacataggagttaactaaatgtttgttaaatggatgaatgaaggagtagtgagtgaacaactgattaaggaaataagaatgtaacgcaagccaggaaatagtaggaggagacaaaaatagggagaaatgaaggaataaagcacaggaaattcagtctgaaattagattttcctcattttaatatatttttctgaattaccaatatgctttcaatgcatcttacttgaatattttttttcctgttttttttttcagagcaccactgaagaaaggcatagcaggtgatatccactgggacaaatacatactacctccatttttccttgaggtttgaagagataggcttggggtaagacaggtggagatcaacatatcattttgattacttgtaaagcagctattggaaaatgccacttatgtctgggaaaaatactacatcccagaattagactgacattcccactcaggtgtggaccactgctggcgatctgtgtgaggtctggtcctataacactggcttagagacaagggtgcttcctgtgggtaactggtcccaagaggaggagaggaggaagcatggggctcccaaattcagcaggtaggtcactcccttccctagggtagagtgtgtggatgcagagggtcaggagagttatactaactgatgtcccttcacacagaagaaaaccccagaagtagggaataaatattactgtgaaagatactcattttatgattaagacaaaacaagttactcccaccaggatgtacttatttttacagaaaggggaagccagcatgtagagtaatttttacagtaagcaggttcaagttcaacagcaggagaaagagaccagaagttaaagaaacaatatatgttcactttcacactagagaaacgatctaaatctataatttaacacttttaacattttttaaataaaataaacttttttggaggaataattatcacatggtacaaatttcgaaaggtaaaaagtgtgaacagtgaaaagtctctcttctatcctgacaactactttcagaagttatttttctaattatatgtcatcagagatatgttttatttcatttgccttttcctcttgatttgaagagttcaaggtcctcaatttacaaatgaatttttagagtataatctgcttgcaagtcatttggaattcagattgcatcgcaaatttctgtttcgggtttcttaaggtagttcactaacagtacccctaggcattggaggacacagcactcatgggtcctacagctctagctttgttctgaactactagattagagggggcaatgactattgtgcacataagtatctttaacttatagagacaatctattaaaaagttgaaaatctgtttaattacatacaatggtaccttctctcctcttggttgcaaatgatacaacttgaaaaggaaatatttttcacagtcattttttacttcaaagaagtatgaatatttcttttatagtatgtttcaaaactaattcaccatcatgatatgtgacaaata

SEQ ID NO: 700680 - DNA, 3747 bp, Homo sapiens
  misc_feature 1429, 1481: n = A,T,C or G
ttatacacggtaccatggtgaaaatgaatgaattactcttaaatgtatcaccatagagaaatctgaaaaacaaccttgagaaagaaaagagaaagcaagttaaataagaatataaataatttatgtaaaatataaaaaacaggcaaaactaaatgacatattgtttagtgatacatacatatgctaatactatgataaaaaataagggaacaaggaacacaaaattctggttggggttacacctgtgagggcggaaggggtgtgggcatataaggggtttctaaggcactggctatgctttattttataagctgaatggttgttcattttattctttttttttttttttttttttttgacacagggtcctgctctgttgcccaggtggtacaatcacagctcactgcagccttgacctcctaggctcaagcaatccttccaccttagcctccaagtagctgggactacaggcacatgccaccacatccagctaatttttgaaattttttgtagaggcggggtctcattatgttacccaggctggtcttaaactcttgggctcaagcaatccaccagcctcagactcctaaagtcctgggattacaggcatgagccaccacacctggccttgttttatcctttacactactcatttacactgtattttctcttctgtagatatgaaatatttcacaacaaaatatcttttgaaagcaaaaaaacaacagagattgttaattattgagatactttagctgatatgattgagataagagctcagttctataaaagaattcactccccaatgaactgggtggccccagtgctctttatttctgaataattaaaatctttggattttttgaacctgtgatagggcttgggtgcaggtagtgaacttctgggctgatcacagggagcaggattgtgagacagtaaagcagactgatatagggaaggagaaaagtcgataacttatgtattatttaggtcatttctgtagacagtaggggctcaattccaccaaaacctcggagaagcacaaagaatgtctcctgaattcatgttgaagaacaggagactgtgcactgactgactttagcccckactggtcgagagttgctcccaggggtattaactcactgacacttctgggctgcgcttgcacttggactaggtacaaggcttccaaagaaacctagaggcagaaaaggcattatgcatacaatggtacaggaaatagatcctaccagcatacatgaactgtccaccacgctcgagctgcagctgcaaccagaggtaggccaagggtgcaccaaaggatctgcgacaaccagcatgacagagccaggcatcacatttgaaaagcatactcacaacgcacaggttgcttgctttccatctcaaatttgctagatgtgtaatttcnaatgtctcacacaaaaaaaaagttaaatatttgaggtgatggatatgtaacnaccttgatttattatttcacattgtataataaatcataacatcactttgacctcatatgtcatacaattatagaatgtcatttacaataaaaaaattttaaaaatcatttgtgcaaattcaccccctttgagataaaagtggcaatgaaaaaatgtttattattcatcagaactatcagaacttatttttcccactcttttttttttttttttttttttttggtgacagagtctcgctcttgtctcccaggctagagtgcagtggcacaatctaggctcactgcaacctctgcctcccaggttcaagtgattctcctgcctcagcctccccagtagctggaattacaggtgcatgtcaccatgcccggctaatttttgtatttttagtacagttggggtttcaccatgttggccaggctggtctcgaactcctgaccccagatgatctgcccaccttggcctccaaaagtgctgggattacaggcatgagccaccatgcccggcctcccactcatcttttaagatgctgctcaggttctacatcttccagaaaccttctctggctccccctggctagattagatgtcgcatttcaatgcctccataactctttgtgcacttctttgccactgtacttatctgattgcattttaactagcaatatatttatctatctcttccaccagactgttttagtcgtcttggaatgctatgttctcatttggcacataggagttaactaaatgtttgttaaatggatgaatgaaggagtagtgagtgaacaactgattaaggaaataagaatgtaacgcaagccaggaaatagtaggaggagacaaaaatagggagaaatgaaggaataaagcacaggaaattcagtctgaaattagattttcctcattttaatatatttttctgaattaccaatatgctttcaatgcatcttacttgaatattttttttcctgttttttttttcagagcaccactgaagaaaggcatagcaggtgatatccactgggacaaatacatactacctccatttttccttgaggtttgaagagataggcttggggtaagacaggtggagatcaacatatcattttgattacttgtaaagcagctattggaaaatgccacttatgtctgggaaaaatactacatcccagaattagactgacattcccactcaggtgtggaccactgctggcgatctgtgtgaggtctggtcctataacactggcttagagacaagggtgcttcctgtgggtaactggtcccaagaggaggagaggaggaagcatggggctcccaaattcagcaggtaggtcactcccttccctagggtagagtgtgtggatgcagagggtcaggagagttatactaactgatgtcccttcacacagaagaaaaccccagaagtagggaataaatattactgtgaaagatactcattttatgattaagacaaaacaagttactcccaccaggatgtacttatttttacagaaaggggaagccagcatgtagagtaatttttacagtaagcaggttcaagttcaacagcaggagaaagagaccagaagttaaagaaacaatatatgttcactttcacactagagaaacgatctaaatctataatttaacacttttaacattttttaaataaaataaacttttttggaggaataattatcacatggtacaaatttcgaaaggtaaaaagtgtgaacagtgaaaagtctctcttctatcctgacaactactttcagaagttatttttctaattatatgtcatcagagatatgttttatttcatttgccttttcctcttgatttgaagagttcaaggtcctcaatttacaaatgaatttttagagtataatctgcttgcaagtcatttggaattcagattgcatcgcaaatttctgtttcgggtttcttaaggtagttcactaacagtacccctaggcattggaggacacagcactcatgggtcctacagctctagctttgttctgaactactagattagagggggcaatgactattgtgcacataagtatctttaacttatagagacaatctattaaaaagttgaaaatctgtttaattacatacaatggtaccttctctcctcttggttgcaaatgatacaacttgaaaaggaaatatttttcacagtcattttttacttcaaagaagtatgaatatttcttttatagtatgtttcaaaactaattcaccatcatgatatgtgacaaata

SEQ ID NO: 700681 - DNA, 3747 bp, Homo sapiens
  misc_feature 1429, 1481: n = A,T,C or G
ttatacacggtaccatggtgaaaatgaatgaattactcttaaatgtatcaccatagagaaatctgaaaaacaaccttgagaaagaaaagagaaagcaagttaaataagaatataaataatttatgtaaaatataaaaaacaggcaaaactaaatgacatattgtttagtgatacatacatatgctaatactatgataaaaaataagggaacaaggaacacaaaattctggttggggttacacctgtgagggcggaaggggtgtgggcatataaggggtttctaaggcactggctatgctttattttataagctgaatggttgttcattttattctttttttttttttttttttttttgacacagggtcctgctctgttgcccaggtggtacaatcacagctcactgcagccttgacctcctaggctcaagcaatccttccaccttagcctccaagtagctgggactacaggcacatgccaccacatccagctaatttttgaaattttttgtagaggcggggtctcattatgttacccaggctggtcttaaactcttgggctcaagcaatccaccagcctcagactcctaaagtcctgggattacaggcatgagccaccacacctggccttgttttatcctttacactactcatttacactgtattttctcttctgtagatatgaaatatttcacaacaaaatatcttttgaaagcaaaaaaacaacagagattgttaattattgagatactttagctgatatgattgagataagagctcagttctataaaagaattcactccccaatgaactgggtggccccagtgctctttatttctgaataattaaaatctttggattttttgaacctgtgatagggcttgggtgcaggtagtgaacttctgggctgatcacagggagcaggattgtgagacagtaaagcagactgatatagggaaggagaaaagtcgataacttatgtattatttaggtcatttctgtagacagtaggggctcaattccaccaaaacctcggagaagcacaaagaatgtctcctgaattcatgttgaagaacaggagactgtgcactgactgactttagccccgactggtcgagagttgctcccaggggtattaactcactgacacttctgggctgcgcytgcacttggactaggtacaaggcttccaaagaaacctagaggcagaaaaggcattatgcatacaatggtacaggaaatagatcctaccagcatacatgaactgtccaccacgctcgagctgcagctgcaaccagaggtaggccaagggtgcaccaaaggatctgcgacaaccagcatgacagagccaggcatcacatttgaaaagcatactcacaacgcacaggttgcttgctttccatctcaaatttgctagatgtgtaatttcnaatgtctcacacaaaaaaaaagttaaatatttgaggtgatggatatgtaacnaccttgatttattatttcacattgtataataaatcataacatcactttgacctcatatgtcatacaattatagaatgtcatttacaataaaaaaattttaaaaatcatttgtgcaaattcaccccctttgagataaaagtggcaatgaaaaaatgtttattattcatcagaactatcagaacttatttttcccactcttttttttttttttttttttttttggtgacagagtctcgctcttgtctcccaggctagagtgcagtggcacaatctaggctcactgcaacctctgcctcccaggttcaagtgattctcctgcctcagcctccccagtagctggaattacaggtgcatgtcaccatgcccggctaatttttgtatttttagtacagttggggtttcaccatgttggccaggctggtctcgaactcctgaccccagatgatctgcccaccttggcctccaaaagtgctgggattacaggcatgagccaccatgcccggcctcccactcatcttttaagatgctgctcaggttctacatcttccagaaaccttctctggctccccctggctagattagatgtcgcatttcaatgcctccataactctttgtgcacttctttgccactgtacttatctgattgcattttaactagcaatatatttatctatctcttccaccagactgttttagtcgtcttggaatgctatgttctcatttggcacataggagttaactaaatgtttgttaaatggatgaatgaaggagtagtgagtgaacaactgattaaggaaataagaatgtaacgcaagccaggaaatagtaggaggagacaaaaatagggagaaatgaaggaataaagcacaggaaattcagtctgaaattagattttcctcattttaatatatttttctgaattaccaatatgctttcaatgcatcttacttgaatattttttttcctgttttttttttcagagcaccactgaagaaaggcatagcaggtgatatccactgggacaaatacatactacctccatttttccttgaggtttgaagagataggcttggggtaagacaggtggagatcaacatatcattttgattacttgtaaagcagctattggaaaatgccacttatgtctgggaaaaatactacatcccagaattagactgacattcccactcaggtgtggaccactgctggcgatctgtgtgaggtctggtcctataacactggcttagagacaagggtgcttcctgtgggtaactggtcccaagaggaggagaggaggaagcatggggctcccaaattcagcaggtaggtcactcccttccctagggtagagtgtgtggatgcagagggtcaggagagttatactaactgatgtcccttcacacagaagaaaaccccagaagtagggaataaatattactgtgaaagatactcattttatgattaagacaaaacaagttactcccaccaggatgtacttatttttacagaaaggggaagccagcatgtagagtaatttttacagtaagcaggttcaagttcaacagcaggagaaagagaccagaagttaaagaaacaatatatgttcactttcacactagagaaacgatctaaatctataatttaacacttttaacattttttaaataaaataaacttttttggaggaataattatcacatggtacaaatttcgaaaggtaaaaagtgtgaacagtgaaaagtctctcttctatcctgacaactactttcagaagttatttttctaattatatgtcatcagagatatgttttatttcatttgccttttcctcttgatttgaagagttcaaggtcctcaatttacaaatgaatttttagagtataatctgcttgcaagtcatttggaattcagattgcatcgcaaatttctgtttcgggtttcttaaggtagttcactaacagtacccctaggcattggaggacacagcactcatgggtcctacagctctagctttgttctgaactactagattagagggggcaatgactattgtgcacataagtatctttaacttatagagacaatctattaaaaagttgaaaatctgtttaattacatacaatggtaccttctctcctcttggttgcaaatgatacaacttgaaaaggaaatatttttcacagtcattttttacttcaaagaagtatgaatatttcttttatagtatgtttcaaaactaattcaccatcatgatatgtgacaaata

SEQ ID NO: 700682 - DNA, 608 bp, Homo sapiens
tcatgttaattcagcatgccagctgttcaatttaatgtctataccaatggggaatgggagagaggtagataatgaggaaagagaagaaataatgaggtaatatgtcatctcctaaaagctcattttgtaacagaaattgtccagactgttactgcattacattttaggtttttctcaatcccctcagaaaacaaagaagctcatacagaacattgcccctaccactagcaagaggcaaatctttcagccctcccaaggctggctttcaggctcctgaagctgtgccttctgaatgtgacaccttgtcctggcsacatctctggagagacgccacacacatcagtgttaagtggtacacatggtccttttcaccacaaatgtcctgaaatcgagggactatttagaaaacaggcggctgcttcattctattgtgggagtgatgtgacaggaagggaggctcaggaatgaccatgacaggaaagcatgtggagcactcacagtaaagcttcacagaagccctcacggccaggcgcagcagagcacagcgactgcccaaggagctgctgtcctagccaccctcccagtcatcttcaagaagaacaaaagtt

SEQ ID NO: 700683 - DNA, 3796 bp, Homo sapiens
  misc_feature 2518, 2519, 2520, 2521, 2522, 2523, 2524, 2525, 2526, 2527,2528, 2529, 2530, 2531, 2532, 2533, 2534, 2535, 2536, 2537,2538, 2539, 2540, 2541, 2542, 2543, 2544, 2545, 2546, 2547,2548, 2549, 2550, 2551, 2552, 2553, 2554, 2555, 2556: n = A,T,C or G
  misc_feature 2557, 2558, 2559, 2560, 2561, 2562, 2563, 2564, 2565, 2566,2567, 2568, 2569, 2570, 2571, 2572, 2573, 2574, 2575, 2576,2577, 2578, 2579, 2580, 2581, 2582, 2583, 2584, 2585, 2586,2587, 2588, 2589, 2590, 2591, 2592, 2593, 2594, 2595: n = A,T,C or G
  misc_feature 2596, 2597, 2598, 2599, 2600, 2601, 2602, 2603, 2604, 2605,2606, 2607, 2608, 2609, 2610, 2611, 2612, 2613, 2614, 2615,2616, 2617: n = A,T,C or G
tttaaaaagtgtaaggcctcccaacatgaagacctgataaatgttggaggcaatggatatcctaattaccctgatttgcttattagacattgtatgcatccatcaaaatatcacatgcaccccataaatatgtacaattatgtatcaattaaaaagaaaattttttaagtgtaaagccaacagaagtatgctttttagcaaggttaatcaagaaaccaaaaagaatgtcagccatttttctcattttcaaaaacaggtttttatctcaatttgttaatctctgaaagaaaatagaaggaccctgttacagtagaaaaacgtttctctcttttaaatgttataggcagaacaagctactgtaacctctgaattcgagagctacaaagtccgagttcataatgttctaaaacaacagaaaaataaatctatgtctcaggctgaaactgagggcgctaaacaagaaaggtaaagtctgaattaaatatgcagagttttcctcccacaatgcaggttcttcaccaagtagattgaaaatcctattatgatttttttttttttttttttttttgagacagactttcgctcttgttgcccaggctggagtgcagtggtgcaatctcagctcactgccacttcgcttcccgggttcaagggattctcctgcttcaacctcctgagtagctgggattacaggcgtgtaccatcatacccagctaatttttgtattttttattagagacggggtttcaccatgttggccaggctggtctcaaactcctgacctcagatgatccacccgcctcagcctctcagagtgctgggattacagacrtgagccacagcacccggcctaaaattctattatgatttttaactgtgaaattatgtatattgttaccaaagagaacagaatttcttggcttcactgtgtctgcagacagtaacagggaaacttcattacaaagaacactgttgcaacctctaaaattagatgttaaagtgcacagtgaagccaggatatgagataataggctaacagttcaatcttaataagatcttgtcgtggtagaaatacaggcattaaaattacattatgatttgtttttccaattttgaaaatttagaagtaaaaattaaaatgctaagcatacttatttgccattaatttagctaaacagaagttgctttaaaatgtttcacttatttcaaaaattttaaatttagtactgaattttggtctagaattaaacttttcttatttatgaccatttcagttctatttgaatggtatattgtttatgctgctttaaaactagcatacagatcctgtttgtactgggagtaagagagagagagggcattccatggcatctgtgttgagcagttcagtattcaaagcagttttacatctggctcttactgttctaaacaagactaattattctgaaatttttgtatgtttatgtttctgttactttcatttaggaatctattaaatatagagactgtagattgaaacatggtattttctttccagtagctcattatataaaggggaaattagatactgatacatttcaaaaatataaatgtcaccattttcaagagccatttttgaccatgcctaaattttgagttcacattacatgaatgtaaatgttttgtgttccttctactttcttataatataaatacgttttttaaaaaaagaaactaatagtgtattgtactcattgtggcagaatcaggattttaactatctccacctagtgttttttccaagtctaaaaagacctgctcttcttcagggattatctttcactgtaacttggtctgacataccattcttataacaacaatttaagaactgtgtgagtgcgccaggcatggcggttcacacctgtaatcccagcactttgggagtccaaggctggcggatcacctgaggtcaggagatcaagaccaacctgaccaacatggtgaaacactgtctctactaaaaataaaaaattagctgagcgtggtggtgggtgcctgtagtcctagctacttgggaggctgaggcaggaggatcacttgaacctgggaggcggaagctgcagtgagccaagattgcgccactgcactccagcctgggcaacagagccagactccatctcaaaaaaaaaaaaatagtgtgaggtttttttctttaactgacatagtcctgtaacataaataggctattttgatgcccctttttgaatatgaaattctaaattttagagaaattttttgtaaatctgtagtgcctaagattttaaatctggctataatatctttttattatgtttaatcctagtcttgaattcttctattatatttcctttagaatcatccaagagtatggcattgaaaggttaaatggttaaactatatttaaaaccacgaaaatcaaattcacctttttcaaaaaattttaaaactgtgtatttctgttttagggaacatctggaaatgctgattgaccagctaaaannnnnnnnnnnnnnnnnnnnnnnnnnnnnnnnnnnnnnnnnnnnnnnnnnnnnnnnnnnnnnnnnnnnnnnnnnnnnnnnnnnnnnnnnnnnnnnnnnnncctaagaggataggaactcagtctatttggttgacctccaacctgccccagaactcagaagtcagtctgccacataacatttgctgaatgaatacctgaagaaatgtagtgatgtttatcttgcattcagtgattttgttgtactttaatttttaattcttatctttttaataatacattttcatgttactaaggtaaacatactttaatttttaattcttatctttttaataatacattttcatgttactaaggtgaataagcatattgcctccaaataacaatgcttcaccttgtttaagcttcaggtttattcacttggccagaacaatattaaataatcacagtaggaataggttatctttttgttactgattttattaggaaatcccaaaacaaaattttacttttataaacaacaatttaaaggcactatttaggccaggtgtggtggcgcatgcctgtaatcccagcactttgggaggccgaggtaggtggatcacgaggtcaggagttcaagaccagcctggccagcatggtgaaaccccgtctctactaaaaatacaaaaactggccgggcatggtggcgcgcacctgtagtcccagctactcgggagcctgtggcaggagaattgctggaacctgggggcagagggtgcagtgagccaagattgagccactgcactccagcctgggcgagagagagagacttcatcaaaaaaaaaaaaaaaaaaaaaaaaaagcaagccactatttaaagcttaaccactttagaatcttgatattaggattctattacattgcaccccaaaacagaataaagatttactaaaaaatacaaggtgattgttttgttgacaatagttttacatttccactacatttcttaacttagaagttattattacaacttttataacttgttattaaaatgactattttttaccttatagctttctgctccttgaatgagatctctcatggaagcagataactggtccttttctgatcgaagagattcaagttcttccttcacagtctgggtctgttttaaacacaagtaaaattaaagaggtttttgtttttttttaatggatagaaaaactcttgatttttaaaaatgtgagattccggaatcttacatttttaaagtcagctcacctcttttctgctggaatc

SEQ ID NO: 700684 - DNA, 781 bp, Homo sapiens
cattttcctgaataccaataaggtcaagtagaaagaggctgctgtatttagagtcagtaaaaatgatttcatccaaactccctatccaactaaccatgatctcttaagcaaaccatctaacctttctgtaccttaggtttctcatctaccaaatagatagaatgattttttaaaagtaaattataatgatgaacagatgagacagttctttgtcaagttaaaagtactattagattgagttattattaataacataagatttgtgaaaatatagggaacagcttctgctttctcagctggatacatgcagaggtggcttgtataaatgtgtggtcacaaatcatttttagagtactcgtaaccagcgcccaccatcttcctgaaaacccaaatgagtccttgtgccatcctctgtaaaggcagaatttctccaattaataatctaggtctggcctgtcccagttgtctgcagtttcctcactctgctgctgagtagttacktgccatattagaaaggtggcattttgaactgtcttatcctgcctactgcaatgggcttcctacatcagcggattcactggtctcctagagcccttaatttgtcatacgagaagcccttagtaagagggagaagctggatcagcctgcttttcttcacagttctcttcaaccagtgtcatactgagtcactcaaatacatgcttcaagatgggcctggaaaagataaccagttcaggttctggacagagagcatcgtgttcagggcattgagttcaggctt

SEQ ID NO: 700685 - DNA, 1461 bp, Homo sapiens
gatcaggccactgcactccagcctgggggataaaagaagactcccccccgcaaaaaaaaaataaggacagaaaaacttgtggaccacatcttcaatgaaattaagtgacaaaatatcccagaagtcatgaaatatggataagtcagccaaaccatctgacaacaattagaccttctaagacccatgtgagatctgcagctctgggcaggggagagttgggcccaatagcggaccccaacttgtgtggaaacctctgcaagtagatctgagaaccactggcagcatagggacatctccacaggttcctttgtgagtatgaatgcagaaagatcacaggacccactgaggggcagcagggagatcagatgggggccaaccctttaacacaacctcccttgcagaagaagtaagatgcaccrtgaggaaaacctgctacttgtaaacccaaatggagctgagtaagaactggggcatcagttctgaaacatgggaggatcagaggagcccaactgcagagagaggccattttctattacctcctggtaacaacagagtaagaagcctttgagttgtacagcgaggaaaactaccctggcccatccacaccctgaactttggaatttgttcctaaatgcacaggaaaatgcttatttaaacatgaacaacaggaataattatttaattatatataaagatttgtgaataaaaatagaacctaaaacaatatgacagaactaaaatttaaaaacgtatactttaaaatacatgtctaattaaaatacatgacaacaggctgggcatgttggctcacacctgtgatcccagcaccttgggaggccaaagcaggtgtatcacctgaggtcaggaatttgagaccagcctgtccaggagtttgagaccagcctggctaacatggtgaaactgcatctctactaaaaatacaaaaattagctgggtgtggtggcacacgcctgtgatcccagctactcgggaggctgtgacaagagaatcacttgaatccaggaggtggaggttgcagtgagctgagatcatgccactgcactccagcatgggtgacaagagtgaaagttcatctcaaaaaaaataaataaaccatgacaacaataatataaaaggagggagagtagtaaataaaactaaaatagcataacattgtttcattgtgtgggaagggattaaaattggaactgaaaatatactacctccttgcagtccagacaagatggtgtggattcatctctctctgctcctacccactaaggacaactggataaaccctggatatgtatatatttttttggttgccaactggctatctcctttggagatgtcaaatgtggtagaaagatgacacactggcttggaaacctaagactggagaaatggcactgtggcaggtgccctgtgtgttccctgtccccttccccctccccatcagaa

SEQ ID NO: 700686 - DNA, 1461 bp, Homo sapiens
gatcaggccactgcactccagcctgggggataaaagaagactcccccccgcaaaaaaaaaataaggacagaaaaacttgtggaccacatcttcaatgaaattaagtgacaaaatatcccagaagtcatgaaatatggataagtcagccaaaccatctgacaacaattagaccttctaagacccatgtgagatctgcagctctgggcaggggagagttgggcccaatagcggaccccaacttgtgtggaaacctctgcaagtagatctgagaaccactggcagcatagggacatctccacaggttcctttgtgagtatgaatgcagaaagatcacaggacccactgaggggcagcagggagatcagatgggggccaaccctttaacacaacctcccttgcagaagaagtaagatgcaccatgaggaaaacctgctacttgtaaacccaaatggagctgagtaagaactggggcatcagttctgaaacatgggaggatcagaggagcccaactgcagagagaggccattttctattacctcctggtaacaacagagtaagaagcctttgagttgtacagcgaggaaaactaccctggcccatccacaccctgaactttggaatttgttcctaaatgcacaggaaaatgcttatttaaacatgaacaacaggaataattatttaattatatataaagatttgtgaataaaaatagaacctaaaacaatatgacagaactaaaatttaaaaacgtatactttaaaatacatgtctaattaaaatacatgacaacaggctgggcatgttggctcacacctgtgatcccagcaccttgggaggccaaagcaggtgtatcacctgaggtcaggaatttgagaccagcctgtccaggagtttgagaccagcctggctaacatggtgaaactgcatctctactaaaaatacaaaaattagctgggtgtggtggcacacgcctgtgatcccagctactcgggaggctgtgacaagagaatcacttgaayccaggaggtggaggttgcagtgagctgagatcatgccactgcactccagcatgggtgacaagagtgaaagttcatctcaaaaaaaataaataaaccatgacaacaataatataaaaggagggagagtagtaaataaaactaaaatagcataacattgtttcattgtgtgggaagggattaaaattggaactgaaaatatactacctccttgcagtccagacaagatggtgtggattcatctctctctgctcctacccactaaggacaactggataaaccctggatatgtatatatttttttggttgccaactggctatctcctttggagatgtcaaatgtggtagaaagatgacacactggcttggaaacctaagactggagaaatggcactgtggcaggtgccctgtgtgttccctgtccccttccccctccccatcagaa

SEQ ID NO: 700687 - DNA, 1461 bp, Homo sapiens
gatcaggccactgcactccagcctgggggataaaagaagactcccccccgcaaaaaaaaaataaggacagaaaaacttgtggaccacatcttcaatgaaattaagtgacaaaatatcccagaagtcatgaaatatggataagtcagccaaaccatctgacaacaattagaccttctaagacccatgtgagatctgcagctctgggcaggggagagttgggcccaatagcggaccccaacttgtgtggaaacctctgcaagtagatctgagaaccactggcagcatagggacatctccacaggttcctttgtgagtatgaatgcagaaagatcacaggacccactgaggggcagcagggagatcagatgggggccaaccctttaacacaacctcccttgcagaagaagtaagatgcaccatgaggaaaacctgctacttgtaaacccaaatggagctgagtaagaactggggcatcagttctgaaacatgggaggatcagaggagcccaactgcagagagaggccattttctattacctcctggtaacaacagagtaagaagcctttgagttgtacagcgaggaaaactaccctggcccatccacaccctgaactttggaatttgttcctaaatgcacaggaaaatgcttatttaaacatgaacaacaggaataattatttaattatatataaagatttgtgaataaaaatagaacctaaaacaatatgacagaactaaaatttaaaaacgtatactttaaaatacatgtctaattaaaatacatgacaacaggctgggcatgttggctcacacctgtgatcccagcaccttgggaggccaaagcaggtgtatcacctgaggtcaggaatttgagaccagcctgtccaggagtttgagaccagcctggctaacatggtgaaactgcatctctactaaaaatacaaaaattagctgggtgtggtggcacacgcctgtgatcccagctactcgggaggctgtgacaagagaatcacttgaatccaggaggtggrggttgcagtgagctgagatcatgccactgcactccagcatgggtgacaagagtgaaagttcatctcaaaaaaaataaataaaccatgacaacaataatataaaaggagggagagtagtaaataaaactaaaatagcataacattgtttcattgtgtgggaagggattaaaattggaactgaaaatatactacctccttgcagtccagacaagatggtgtggattcatctctctctgctcctacccactaaggacaactggataaaccctggatatgtatatatttttttggttgccaactggctatctcctttggagatgtcaaatgtggtagaaagatgacacactggcttggaaacctaagactggagaaatggcactgtggcaggtgccctgtgtgttccctgtccccttccccctccccatcagaa

SEQ ID NO: 700688 - DNA, 619 bp, Homo sapiens
ctagataggtacccagtagatttcaggaaagtctgataacagtaagagcaattagctcattctagactgagaatgaacaagggaatggcctagttttatagaaaatgaaggtaagaacctagaaaggcaatgactaagctcactcaatccagaatgaatttgaccactagcacytttcgagaacaatggaacacacccctaaagtgtgtaattgctaaataatcgaaatgtttaaatttaaaataatatatttgctaaaaaaaaaaaagggtccaatcattttttaaagcccaagcatgagaataatagaggtcactatttatttaaattatggtctggatttggaattcagatcatttttaatttgttatttcacatgtaaccatgagtaaaattttcttagtcttttttatgcagtgtaatacaggtttgacattttaaaaaagtgatgatgtgtgacagcagcaagagtacttttgaatgtgactatatgacctgtcaaagaatttacatcaggtctttctgaagtgctgtcattctcattcacaatacaggccctcaagcccctcactgccccacagtaaaggctgtcacccagtcagcaccaatttcattcttg

SEQ ID NO: 700689 - DNA, 631 bp, Homo sapiens
tttcattttttaaattatactttaagttctgggatacacgtgcagaacgtgcaggtttgttacacaggtaaacatgtgccatggtggtttgctgcacccatcaagccatcatctacaataggtatttctcctaattctatacctccccttgccctccacccaccaacaggccctgatgtgtggtcccccttcctgtgcccatatgttctcattgttcaactcccagttataagtgaraacatgcagtgtttggttttctgttcctgtgtttgtttgctgaaaatgatgttcccgctcgatctatgtccctgcaaggacatgaatcttttttatggccacatagtattccatgctgtacatgtgccacatctctttatccagtctaatattgatgggattttgggttgattccattttacctctgtatcactttgatgaactcttgttgagaactgagattactaccccttccccccaattatctcctgtgggcaactattttattctagatgactatacctgaggtttctgaacttattctgagcattggctcccatggcagtcaggtacattaacaccttccaaaaataattttttctcttgcttatttcaaggttttctccttgacttt

SEQ ID NO: 700690 - DNA, 1029 bp, Homo sapiens
tattttagggaattaaaaataaaggacatctctgattcatatggaagagaaactgggtcaaatattggcaagtgatatctttctcttttcacatgcaaatttgcactkcgaactttaaattcagttaatgctcatgattataggaaggtcatgagtagaccttgaatttaggatatgtctaaattactgtggtttcaagaccatttattaattgtagatgtcctggatatattctattctcctaggatccagcactggtgacttggtttttggccacagatttctatattaattacattttgaaagattttacatttatatgtatgtgcctttttcctgcttttctgaagcatcttataagaaacatctttgcacttctgatattccatcacagaccgactctacctccaaatccaggaattcaggtcacagtcaccaatagatgccatggacctcaagaggagccacagaaagactcgttatgagttcttcatcaatcccatgagattactaataaaataattctaagtgcttgctcagaggataggggctcctcttcctttttaaaactcaggaataaaacatggtcctcccaatttaagagtaatgccaatgatgatagtgtatgaaatcagacagatcttacatgagaggcgaacttctagctatgtgtctttgctgcatatatatccaatgatcccctactaatacattaaaagaagaaaaattgactttaaacaaacatttagaatctacctaacataaaaaatgaatcaataaaacatgaatttcatggtatcttcttgcaactcaggccagagagcctccctggaaggaaatacctgtaactcattcatgtatgagaattcaaggaatctatttaacctacctttctgaaatttgggggcttatctgtagcctgtttgccttccatttctaagaggttttaaagatttagtacattatagaggtagatttcaaatcagtggataaagggtgacataaataaatgtttaacttctttacaaa

SEQ ID NO: 700691 - DNA, 667 bp, Homo sapiens
cttgtaaatttactgtggaccacaactaccaagtcagtccttccttcctttcttccttccttccttcctttcttccttcctttctttcttcctttctttccttattttctttctttcctctgtcacccaggctggagtgcaggggagtgatctcagctcactgcatcctccrccagttcaagcatttctccggcttcagccttccaagtagctgggattgcaggcttgtgccaccatgcctggcaaatttttttggatttttagtagataaggggtttcaccatgttagccaggctggccttgaagtcctgacctcaaataatctgcccacctcagcctcccaaggtgctgggattacaagtgtaagccaccgtgcccggccctgtagtattatttctatattatgtaatatactataaatatattaaaatacgataagcaggccattcattttattcatttagataagaccactagcgttttgacattattatgcccaaactacctaatcaccatatccccagttttaccctaaaacaatttatacaaaacccttctcttttcaactgtctttttcacccttccaattatactttactgtcaagacttcactcaattttctctttatttgaaaccactctagcctacaatgaccttaccactctga

SEQ ID NO: 700692 - DNA, 592 bp, Homo sapiens
ttaattggtgcatagttctgcaggctgtacaggaagcatcgctctgacatctgcttctgaggaggcctcaggaatctgaatcatgtcagaaggtaaagcaggagcaggcatgttatatggcgagacaggagcaggagaaagataaagggtcagggggtgtaggtgctgcacacttctaatccaccagatctcatgagaactcactatcaccaagacagcaccaagccaggagggagccaccctcatgaaccaaatacttctcactaggccccacttccagcattggggattacaattcgacatgagatttgggcagggacaaatatccaaagcatgtcaatatcattttcataatttttttacccaatcacgtgggttaaaagttgatatggtttggctctatgtccccacccaaatctcatcttgaattgtactcccrtaattctcatgtgttgtgactgggaccctgtggaagataatttgaatcatgggggcagtttcccctatactattctcatggcagtgaataagtctcacgaaatctgatggttttaacaggtgtttccacttttgtatccttctcattctctct

SEQ ID NO: 700693 - DNA, 1676 bp, Homo sapiens
ttggtatattatttccttctatcatccacaaagtggagaatcaatttaattcttaaaagatcacttacaaaatgatctgaatgaggcaaattgaggaaaactaagaaaaatttttgtccaatttaggtaggaacccatgattcaggtaagatttctctatttatttagaattgacttggaaaactatttttaacaatttctaatatgatacaagaatacagtgttctgtagctgagaactcaatgttttaatcatggtagagattatataatactgaagtatgtagttatttttaaatggtcagcaattgttacctctttgcagaaaaggaatggaatcttaagttaacaaaatcggttataatcattttaagtatggtaaaataaagccatgacagatagaatgcaaacattgagggatatcctcttccaacagcttaagagcaaacattcgtaagggaggggtagaaatgaaaagaggtcttggagttggatcaatgttctctgaataaggactagtagtgagtgaaatagcataaaatcagattataatttttctcctaattttaggattatgatttggctttgagtagcaaagactcagaaaaaaaaaaggagcgcttaacccagttagatgtctgtgtctctttctcttaagtctggtggtggcagtccacagccggtgaggtgaaaacttaatttgttaagctcctgctcagccatttctgagatatggcccttcttctcaaggttcaagataacaatatctggagctccagattttacttccgtgttctccatagcagaaggaaagagcaaggagaatgaggcagaggatgtgtactgctgccacacatgttgattccatgtacacatcttagccacgactcagtcacacagcatactcagttgcaagactgttggagaaaatgcctgctttgtcttggtccacagctaaaagttgagagttctattgttattaaacaagaggagaatggatattggagggcaagcagcagtctgtaccctggctgcttctacagaagggatgtgttaagtaagcaggtctaggatgtatgcagtatgcaaggcccagcagcccgagggatagattctaggctatcaactttcctaccacttggtactctggaccccacttggccacaggggtcaccttgaccccagagagagtgtgggtatagcaagggttgaggttatgccccaatatctagggagagagtcatagtgggatctgtcccaactctggtctggccacactacagaagtctcttacccacccccaatccaggcacccaacatggaggttgcaatgcccctggcaagaggatatgcctagctcaacttttctgccctggtcagggcaaagtacgtggatccagtggctgacaggaaatggaacccagctgtagtcaggttccagagccctgtaatgtggggagggccctcascagccctgtggttcggcacatgccctctgagtattccaagctgaccttggaagatactctcttcctcattcccaccatcctgaatctggctatgtttttctcttctggccagctccttgcaccctcaggagataagccacaaaatacataatctcaatttttcagtgattcctaataagatctgaaaattgcatttaaaactggcatt

SEQ ID NO: 700694 - DNA, 2810 bp, Homo sapiens
tttttccttatatctcttattgtagtttttaaagtttattgctgtataatttattactcttattttattgtaaataaaaccttcccttccattatatcttgctaagtctattgatttggagatgttaattatatttctagccagtttactaaactcttattgtttgcagtagacttttattgatttttttttggttttccagttataatatctctgcatatgaagataatcttcttttcaaattcttatgctatatatatatgaatatgacatatataaatatacaggttgactatcccttttatgaaatgcttgggaccagaggtgtttcagatttcatttttttctggttttagaataatgatgtatagataatgagatatcttgggaatgggacctgaatctaaacataaaatccatttatgttttatgtgcaccttatacacatagcctgaaggtaattttataaaatatttctaattattttgggcacaaaataatgtttttgatgtgttttgactgtgacccatcacatgaggtcaggtgtggaatttcccacttgtggtgtcacattggtgctcaaaaatttcagattttagagcattttgcatttcagatttttggattctggattagagatgttcaacctgtgtgtgtgtgtgtgtgtgtgtgtgtggtgtgtattaatcaccacttaggttaggtaagacctccaatttattgtgaaatacaattgaagatgctaggtacatttgttttgttatagactttaaaggtaatggtgctagggtgtcctcattaattaactgttgacttttgaattggagtaatacaaattttatttaaaaaatttctatttgtaaatgttttcttcctagatctattaatgtgtattttagcaacaaatttccaaatttagaatcaaacatacagaataataatttcagcaattattcaagaaactcttatttcttctttaccaatttttagtgtttcacacttttgccccttttctttaccattctccctccctctcctctctctctctttctctctctctctctctctgtgtgtgtgtgtgtgtgtgtgtgtgtgtgtgtgtgtgtgtgtgtggtgtaggcatgtgggtgcgtctgtggggaggcatataaatattatttttttctgaaccatttgtgagtaaattggaggtattatgcycatttactaaaaaaatagtccagtgtgtactgaaggcctgtgcttttttcctaatagttactttaagatacacttagttcgtttttttatcagtactatcaaccatccttataatgtaacaataataaaattagctagtaacattttcattcttttatccctttcctccaggattttatttgatagtgacaatcacttacaccaaatcacaccctatcgaggagtgaacttgtataattcatacactgtgtctgtcttctttattatttttggctgtaatagacgtcttttgtcaaaaaacaccatgtgtattctctatttggttatgtcatctccattaattggtgttagctttaaatttacataaattcaatttactatagtcatagttttacagcaaagttgctaaaacttaccttgaattcttggtgggcttcctctctaataaattctcagaaaatggaccttgtgttcaatattcttgcaaatttataacagtaattgaaagttattttggttcaattcaaaatcctgagttcatactttttaagtatttgtctctgtcattttatcttatgaagtgtcgctgtgatgtttgttgccaatgcaattatcctttcctttcctttacacaaatttagtttttttgcctagtgctaaataattctttctttaagtccagtagttttactagaaattgttttggtgtggctattctgatacttttctcagttgcgtgatgtacctttgcaaatatgtaggttcaagcccttttaaaaatgtattgtatgaattattactatttatgctgatcatattttttgtcttcttaggattacctattatatctatgtgttccttctttttttgttgtccaaactgtttttatctatgtatctatttgtgtaatctctgtttattttttctccttgatatcctttgtttttcttaccttaccttccataatatctcttcaagtttattcaagttgagctctccttattgaattttgttttcccttaaaaaaattctgtccttagttctgaaagttctattttccagtatttctcttattttataatctcattttgaggtttttctttggttagcacttttaattattcgctttagttttcttaatttgcatttgctgttttcttatgtttatgcactatattacggtttacttctaatttatcatcagattttttagtggatcttcagatttttgtgttattttcttcccatatatttatatgaggtttggtcacaattcatttcttttgtacatattgagtgatatggattttcttatactgtgaggggaacagttctgctgtgtggagcgggtccgggtagtttcactactcgagagcttcctgttttgttgtaattataaagtattaataatataacttctttgtttagccaggtccaaagttctaagatctgttcccttggtacctcccctcatctactacccagaatatgaaaattctttctccttcactcttagggttttttttttcctattaagcttaccatttattcatagaagttttcctcccccaattcagaggagatctccatctttccaaaaaatgagtttt

SEQ ID NO: 700695 - DNA, 2810 bp, Homo sapiens
tttttccttatatctcttattgtagtttttaaagtttattgctgtataatttattactcttattttattgtaaataaaaccttcccttccattatatcttgctaagtctattgatttggagatgttaattatatttctagccagtttactaaactcttattgtttgcagtagacttttattgatttttttttggttttccagttataatatctctgcatatgaagataatcttcttttcaaattcttatgctatatatatatgaatatgacatatataaatatacaggttgactatcccttttatgaaatgcttgggaccagaggtgtttcagatttcatttttttctggttttagaataatgatgtatagataatgagatatcttgggaatgggacctgaatctaaacataaaatccatttatgttttatgtgcaccttatacacatagcctgaaggtaattttataaaatatttctaattattttgggcacaaaataatgtttttgatgtgttttgactgtgacccatcacatgaggtcaggtgtggaatttcccacttgtggtgtcacattggtgctcaaaaatttcagattttagagcattttgcatttcagatttttggattctggattagagatgttcaacctgtgtgtgtgtgtgtgtgtgtgtgtgtggtgtgtattaatcaccacttaggttaggtaagacctccaatttattgtgaaatacaattgaagatgctaggtacatttgttttgttatagactttaaaggtaatggtgctagggtgtcctcattaattaactgttgacttttgaattggagtaatacaaattttatttaaaaaatttctatttgtaaatgttttcttcctagatctattaatgtgtattttagcaacaaatttccaaatttagaatcaaacatacagaataataatttcagcaattattcaagaaactcttatttcttctttaccaatttttagtgtttcacacttttgccccttttctttaccattctccctccctctcctctctctctctttctctctctctctctctctgtgtgtgtgtgtgtgtgtgtgtgtgtgtgtgtgtgtgtgtgtgtggtgtaggcatgtgggtgcgtctgtggggaggcatataaatattatttttttctgaaccatttgtgagtaaattggaggtattatgctcatttactaaaaaaatagtccagtgtgtactgaaggcctgtgcttttttcctaatagttactttaagatacacttagttcrtttttttatcagtactatcaaccatccttataatgtaacaataataaaattagctagtaacattttcattcttttatccctttcctccaggattttatttgatagtgacaatcacttacaccaaatcacaccctatcgaggagtgaacttgtataattcatacactgtgtctgtcttctttattatttttggctgtaatagacgtcttttgtcaaaaaacaccatgtgtattctctatttggttatgtcatctccattaattggtgttagctttaaatttacataaattcaatttactatagtcatagttttacagcaaagttgctaaaacttaccttgaattcttggtgggcttcctctctaataaattctcagaaaatggaccttgtgttcaatattcttgcaaatttataacagtaattgaaagttattttggttcaattcaaaatcctgagttcatactttttaagtatttgtctctgtcattttatcttatgaagtgtcgctgtgatgtttgttgccaatgcaattatcctttcctttcctttacacaaatttagtttttttgcctagtgctaaataattctttctttaagtccagtagttttactagaaattgttttggtgtggctattctgatacttttctcagttgcgtgatgtacctttgcaaatatgtaggttcaagcccttttaaaaatgtattgtatgaattattactatttatgctgatcatattttttgtcttcttaggattacctattatatctatgtgttccttctttttttgttgtccaaactgtttttatctatgtatctatttgtgtaatctctgtttattttttctccttgatatcctttgtttttcttaccttaccttccataatatctcttcaagtttattcaagttgagctctccttattgaattttgttttcccttaaaaaaattctgtccttagttctgaaagttctattttccagtatttctcttattttataatctcattttgaggtttttctttggttagcacttttaattattcgctttagttttcttaatttgcatttgctgttttcttatgtttatgcactatattacggtttacttctaatttatcatcagattttttagtggatcttcagatttttgtgttattttcttcccatatatttatatgaggtttggtcacaattcatttcttttgtacatattgagtgatatggattttcttatactgtgaggggaacagttctgctgtgtggagcgggtccgggtagtttcactactcgagagcttcctgttttgttgtaattataaagtattaataatataacttctttgtttagccaggtccaaagttctaagatctgttcccttggtacctcccctcatctactacccagaatatgaaaattctttctccttcactcttagggttttttttttcctattaagcttaccatttattcatagaagttttcctcccccaattcagaggagatctccatctttccaaaaaatgagtttt

SEQ ID NO: 700696 - DNA, 2810 bp, Homo sapiens
tttttccttatatctcttattgtagtttttaaagtttattgctgtataatttattactcttattttattgtaaataaaaccttcccttccattatatcttgctaagtctattgatttggagatgttaattatatttctagccagtttactaaactcttattgtttgcagtagacttttattgatttttttttggttttccagttataatatctctgcatatgaagataatcttcttttcaaattcttatgctatatatatatgaatatgacatatataaatatacaggttgactatcccttttatgaaatgcttgggaccagaggtgtttcagatttcatttttttctggttttagaataatgatgtatagataatgagatatcttgggaatgggacctgaatctaaacataaaatccatttatgttttatgtgcaccttatacacatagcctgaaggtaattttataaaatatttctaattattttgggcacaaaataatgtttttgatgtgttttgactgtgacccatcacatgaggtcaggtgtggaatttcccacttgtggtgtcacattggtgctcaaaaatttcagattttagagcattttgcatttcagatttttggattctggattagagatgttcaacctgtgtgtgtgtgtgtgtgtgtgtgtgtggtgtgtattaatcaccacttaggttaggtaagacctccaatttattgtgaaatacaattgaagatgctaggtacatttgttttgttatagactttaaaggtaatggtgctagggtgtcctcattaattaactgttgacttttgaattggagtaatacaaattttatttaaaaaatttctatttgtaaatgttttcttcctagatctattaatgtgtattttagcaacaaatttccaaatttagaatcaaacatacagaataataatttcagcaattattcaagaaactcttatttcttctttaccaatttttagtgtttcacacttttgccccttttctttaccattctccctccctctcctctctctctctttctctctctctctctctctgtgtgtgtgtgtgtgtgtgtgtgtgtgtgtgtgtgtgtgtgtgtggtgtaggcatgtgggtgcgtctgtggggaggcatataaatattatttttttctgaaccatttgtgagtaaattggaggtattatgctcatttactaaaaaaatagtccagtgtgtactgaaggcctgtgcttttttcctaatagttactttaagatacacttagttcgtttttttatcagtactatcaaccatccttataatgtaacaataataaaattagctagtaamattttcattcttttatccctttcctccaggattttatttgatagtgacaatcacttacaccaaatcacaccctatcgaggagtgaacttgtataattcatacactgtgtctgtcttctttattatttttggctgtaatagacgtcttttgtcaaaaaacaccatgtgtattctctatttggttatgtcatctccattaattggtgttagctttaaatttacataaattcaatttactatagtcatagttttacagcaaagttgctaaaacttaccttgaattcttggtgggcttcctctctaataaattctcagaaaatggaccttgtgttcaatattcttgcaaatttataacagtaattgaaagttattttggttcaattcaaaatcctgagttcatactttttaagtatttgtctctgtcattttatcttatgaagtgtcgctgtgatgtttgttgccaatgcaattatcctttcctttcctttacacaaatttagtttttttgcctagtgctaaataattctttctttaagtccagtagttttactagaaattgttttggtgtggctattctgatacttttctcagttgcgtgatgtacctttgcaaatatgtaggttcaagcccttttaaaaatgtattgtatgaattattactatttatgctgatcatattttttgtcttcttaggattacctattatatctatgtgttccttctttttttgttgtccaaactgtttttatctatgtatctatttgtgtaatctctgtttattttttctccttgatatcctttgtttttcttaccttaccttccataatatctcttcaagtttattcaagttgagctctccttattgaattttgttttcccttaaaaaaattctgtccttagttctgaaagttctattttccagtatttctcttattttataatctcattttgaggtttttctttggttagcacttttaattattcgctttagttttcttaatttgcatttgctgttttcttatgtttatgcactatattacggtttacttctaatttatcatcagattttttagtggatcttcagatttttgtgttattttcttcccatatatttatatgaggtttggtcacaattcatttcttttgtacatattgagtgatatggattttcttatactgtgaggggaacagttctgctgtgtggagcgggtccgggtagtttcactactcgagagcttcctgttttgttgtaattataaagtattaataatataacttctttgtttagccaggtccaaagttctaagatctgttcccttggtacctcccctcatctactacccagaatatgaaaattctttctccttcactcttagggttttttttttcctattaagcttaccatttattcatagaagttttcctcccccaattcagaggagatctccatctttccaaaaaatgagtttt

SEQ ID NO: 700697 - DNA, 2810 bp, Homo sapiens
tttttccttatatctcttattgtagtttttaaagtttattgctgtataatttattactcttattttattgtaaataaaaccttcccttccattatatcttgctaagtctattgatttggagatgttaattatatttctagccagtttactaaactcttattgtttgcagtagacttttattgatttttttttggttttccagttataatatctctgcatatgaagataatcttcttttcaaattcttatgctatatatatatgaatatgacatatataaatatacaggttgactatcccttttatgaaatgcttgggaccagaggtgtttcagatttcatttttttctggttttagaataatgatgtatagataatgagatatcttgggaatgggacctgaatctaaacataaaatccatttatgttttatgtgcaccttatacacatagcctgaaggtaattttataaaatatttctaattattttgggcacaaaataatgtttttgatgtgttttgactgtgacccatcacatgaggtcaggtgtggaatttcccacttgtggtgtcacattggtgctcaaaaatttcagattttagagcattttgcatttcagatttttggattctggattagagatgttcaacctgtgtgtgtgtgtgtgtgtgtgtgtgtggtgtgtattaatcaccacttaggttaggtaagacctccaatttattgtgaaatacaattgaagatgctaggtacatttgttttgttatagactttaaaggtaatggtgctagggtgtcctcattaattaactgttgacttttgaattggagtaatacaaattttatttaaaaaatttctatttgtaaatgttttcttcctagatctattaatgtgtattttagcaacaaatttccaaatttagaatcaaacatacagaataataatttcagcaattattcaagaaactcttatttcttctttaccaatttttagtgtttcacacttttgccccttttctttaccattctccctccctctcctctctctctctttctctctctctctctctctgtgtgtgtgtgtgtgtgtgtgtgtgtgtgtgtgtgtgtgtgtgtggtgtaggcatgtgggtgcgtctgtggggaggcatataaatattatttttttctgaaccatttgtgagtaaattggaggtattatgctcatttactaaaaaaatagtccagtgtgtactgaaggcctgtgcttttttcctaatagttactttaagatacacttagttcgtttttttatcagtactatcaaccatccttataatgtaacaataataaaattagctagtaacattttcattcttttatccctttcctccaggattttatttgatagtgacaatcacttacaccaaatcacaccctatcgaggagtgaacttgtataattcatacactgtgtctgtcttctttattatttttggctgtaatagacgtcttttgtcaaaaaacaccatgtgtattctctatttggttatgtcatmtccattaattggtgttagctttaaatttacataaattcaatttactatagtcatagttttacagcaaagttgctaaaacttaccttgaattcttggtgggcttcctctctaataaattctcagaaaatggaccttgtgttcaatattcttgcaaatttataacagtaattgaaagttattttggttcaattcaaaatcctgagttcatactttttaagtatttgtctctgtcattttatcttatgaagtgtcgctgtgatgtttgttgccaatgcaattatcctttcctttcctttacacaaatttagtttttttgcctagtgctaaataattctttctttaagtccagtagttttactagaaattgttttggtgtggctattctgatacttttctcagttgcgtgatgtacctttgcaaatatgtaggttcaagcccttttaaaaatgtattgtatgaattattactatttatgctgatcatattttttgtcttcttaggattacctattatatctatgtgttccttctttttttgttgtccaaactgtttttatctatgtatctatttgtgtaatctctgtttattttttctccttgatatcctttgtttttcttaccttaccttccataatatctcttcaagtttattcaagttgagctctccttattgaattttgttttcccttaaaaaaattctgtccttagttctgaaagttctattttccagtatttctcttattttataatctcattttgaggtttttctttggttagcacttttaattattcgctttagttttcttaatttgcatttgctgttttcttatgtttatgcactatattacggtttacttctaatttatcatcagattttttagtggatcttcagatttttgtgttattttcttcccatatatttatatgaggtttggtcacaattcatttcttttgtacatattgagtgatatggattttcttatactgtgaggggaacagttctgctgtgtggagcgggtccgggtagtttcactactcgagagcttcctgttttgttgtaattataaagtattaataatataacttctttgtttagccaggtccaaagttctaagatctgttcccttggtacctcccctcatctactacccagaatatgaaaattctttctccttcactcttagggttttttttttcctattaagcttaccatttattcatagaagttttcctcccccaattcagaggagatctccatctttccaaaaaatgagtttt

SEQ ID NO: 700698 - DNA, 642 bp, Homo sapiens
ttctttttgaggtgatgatataaatgttctaaaattgtggtgatggctgcacaacactgtggatctactataaaccattgaattttacttttaattgtgtgaactatttggtatgtgaattctatctcaataaagctgcaacaaagtaataatgaccacaaagattttcagccattaaatattaaaatatttaataaaagagacaagttttaggagggagcttaagaacagtacaattctgaaatctgagggaaaaactgtgaagtcagttcatttgtattctccttggttataatacatttaaaaagctaatacaaaagataagaatgaaattaaagagaagcgctctccactgctgttctcttcagctcaacatggtggtctaccsggcgattggcagcctcagccacttctctgccttcaggatcctccgctcccaaggttatatacgccgcaattttacagggtcctttgctttgctgaccagaacccatattaactatggagtcaaaggggatgtgatagttatttaaattaactctccccattcaaagataaatacgctgaataaacaaacagctgcattcagagttcacggaagttatgaatgaaatctgggctagtgatcaaatcagaagtgcc

SEQ ID NO: 700699 - DNA, 642 bp, Homo sapiens
ttctttttgaggtgatgatataaatgttctaaaattgtggtgatggctgcacaacactgtggatctactataaaccattgaattttacttttaattgtgtgaactatttggtatgtgaattctatctcaataaagctgcaacaaagtaataatgaccacaaagattttcagccattaaatattaaaatatttaataaaagagacaagttttaggagggagcttaagaacagtacaattctgaaatctgagggaaaaactgtgaagtcagttcatttgtattctccttggttataatacatttaaaaagctaatacaaaagataagaatgaaattaaagagaagcgctctccactgctgttctcttcagctcaacatggtggtctaccgggcgattggcagcctcagccacttctctgccttcaggatcctccgctcccaaggttatatacgccgcaattttacagggtcctttgctttgctgaccagaacccatattaactatggagtcaaaggggatgtgatagttatttaaattaactctcyccattcaaagataaatacgctgaataaacaaacagctgcattcagagttcacggaagttatgaatgaaatctgggctagtgatcaaatcagaagtgcc

SEQ ID NO: 700700 - DNA, 597 bp, Homo sapiens
ctggatgaccaaaactatttatgacaggacatcttctatcataaaacaaactgtcttaacttccatacctagatacaactgtgtaatgagcaattaatgctgagttatgagagaaaatattctggacttacaaggaaatatcaagagatagaccctaaccaaagatgataaaaaccaaaaattttcaaccaatcaamtgatggaaacattttatcctcaaaggaaaaaaaaaaaaaaaaaagagttccggtgatttctaactcattatttagaatctggcaaagtttcttacttgtgcatataaaagaagatgtagccactccgatctcgatcactctgcacggcagcctcttggatttttgatacctccaggtcattgtaagtaaaccacgcttgcttcttaatgtcatatacatcactaatgtaatgacctgaaacaaataacatcttaaaatcaaggtttttaaaaacacaccgaagctgggcgcgatggctcacgcctgtaatctcagcactttgggaggctgaggcaggcggatcacgaggtcaggagtttgagaccagcctcaccaacatggtgaagccccgtctctacta

SEQ ID NO: 700701 - DNA, 966 bp, Homo sapiens
gttcctgaaataggaggtagaccagaaagttgaggactgctgcagaagccttgaatgtcaggctgaagtgttcagacacttcagcaggaagccataaaatgctttgatctgggtcttgacatgtatagacctgggtcaaaccaagacaaacttgacagagggctgtggaacagacagggaaaaagagaccagagacagggtcacaggctattgtagtagtcaaagccaaaagcaagatatccatgagccaaactgccaaaggaaaggaaaagacagggattccggtgactaatcctatgaatttgagagtgaaaaatacctagaagttgacaatttaaaaatattttctgtccacaccctgtatgatgctgaaattttaggcatctgtgtgcccagaaaaagagagagccctgaccaaattgatagcgtatttctgcctcttcccagyggtcacattctcccgggaaaatgaagttttttacaaaagaagtaactccacccagtgcacgtgcattctttttcactctagcagaataacgggtatctgctcagttctatcttattgctaatgtttatctcaaacctagagctcttcatccacttcctatgggagccggagtgggaggtggggcaaagagacaaagctgacttccccttgatcttattgcatcagtcagagtcccagcaggagagagatggcaattcaaagttacagctcagtcactggagagaatacagtgagcagacatgggcaagatggaaaaaaatgaacaaggatggtgcagcacctctgggatagtaacagtggggagccatcaccaccctaagcgtgaaggaccaaggcgggaacgtggcatcaagaatgcagagagatagcactttgggaggccgaggtgggtgggttgaagtcaggagtttaagaccagcctggtcaacatggcgaaatcccatctctactaaaaatac

SEQ ID NO: 700702 - DNA, 966 bp, Homo sapiens
gttcctgaaataggaggtagaccagaaagttgaggactgctgcagaagccttgaatgtcaggctgaagtgttcagacacttcagcaggaagccataaaatgctttgatctgggtcttgacatgtatagacctgggtcaaaccaagacaaacttgacagagggctgtggaacagacagggaaaaagagaccagagacagggtcacaggctattgtagtagtcaaagccaaaagcaagatatccatgagccaaactgccaaaggaaaggaaaagacagggattccggtgactaatcctatgaatttgagagtgaaaaatacctagaagttgacaatttaaaaatattttctgtccacaccctgtatgatgctgaaattttaggcatctgtgtgcccagaaaaagagagagccctgaccaaattgatagcgtatttctgcctcttcccagtggtcacattctcccgggaaaatgaagttttttacaaaagaagtaactccacccagtgcacgtgcattctttttcactctagcagaataacgggtatctgctcagttctatcttattgctaatgtttatctcaaacctagagctcttcatccacttcctatgggagccggagtgggaggtggggcaaagagacaaagctgacttccccttgatcttattgcatcagtcagagtcccagcaggagagagatggcaattcaaagttacagytcagtcactggagagaatacagtgagcagacatgggcaagatggaaaaaaatgaacaaggatggtgcagcacctctgggatagtaacagtggggagccatcaccaccctaagcgtgaaggaccaaggcgggaacgtggcatcaagaatgcagagagatagcactttgggaggccgaggtgggtgggttgaagtcaggagtttaagaccagcctggtcaacatggcgaaatcccatctctactaaaaatac

SEQ ID NO: 700703 - DNA, 611 bp, Homo sapiens
ttggccaggctggtcttgaactcctgacctcatgatctgcgcgcctctgctttccaaagtgttgggattacaggcattagccaaccacacctggcccttatttctttttaaactgctacatagttggtattcctgagtatgacagtgtgtctactagtttcccattggtggacatttttggttgtttccagtctcctcctattgcaaacagtgctgcatactatcacctttacacacgacactttgtatgtgtttaggttcaccttagggtaagtttatacagaagtactaggtcaaagggtacctgcattcattattgtgatggctattgttaaactgactttcataaagkttaggccaatttattttcccaccaacaatgtgtgaattcaaatataaaatccaaagttatgaccatttacctccttccctttagcagtaagtctttcttccaacattaatgtttattttcctactaaatgtcatttcaagtaagatggaccaaggtaaatgtgaggaatttactttagaaaagtaatcacaattgtccatacttactgtttaatctatgttttaagtatttatataaaaaataaactaacatttaccga

SEQ ID NO: 700704 - DNA, 530 bp, Homo sapiens
gcttctgaaatacattctttcttcacaagtctggtgcttccactcctaattataaattacatatctcacttcagtgcacacaagttcctgatcctcatcccaacttcggttggcttttgactattttgttaatttttttccctgtgaatttgttgggccttttggaggacacgtttattgctttaggcatcatgcaatttactaaatggtgttctggttatggaaatgcttacaaagagccctaggggggaaaagaattaagtaaacacatattgatcatcctgtagctggtgctttcttatttgattagtcaaggactcagtctgaactggtccttctaatctgtgatacataaagctggagacatttttctggctccctggtggttttaaaggctaaacaaagtctcatttttgaaaaagcctgaatrcagaatggaattcaaagaatttggagagaggggaggtgaaagtggtagcaaacagctttaaaaaggccctgggaattttaagagagtaaggcatataagg

SEQ ID NO: 700705 - DNA, 614 bp, Homo sapiens
actgggggaaaagaaggagaaaaatataaaaggaaagcaagaaaattcaagtaagccataaggaagatataagtatagatgtgagggtggaatggagagggatggaaaaaaaaaaaaaaaaaaaaaacagaagtaggagggaaaaggagaattygggcttgtgtacatatctttgttttcttgattatttgtttggtgattttttattcaaaagaaaagacttgctcaaatttaaaataatttgcattctgttttaccatttttacatttgagaattaagtttactgtgaaaataacaattattggccaaaattctctttcttaagcttggcatattgttttttctatattcttggtggtagaaatattgggttaagagtttgcttggtaaactgagaagacttcttttctgggaagtggttgcagaatgaagagttggatgttgaggactggagagaggttacatgcactggtgacttgaagctttaatactagatgacgtttttggaagccagcatgtgatattcaacaataagtttatagaagcctgcttggttttcaggttcgatacagttttcctttttcttataaagtattgttgttattgttcttat

SEQ ID NO: 700706 - DNA, 614 bp, Homo sapiens
actgggggaaaagaaggagaaaaatataaaaggaaagcaagaaaattcaagtaagccataaggaagatataagtatagatgtgagggtggaatggagagggatggaaaaaaaaaaaaaaaaaaaaaacagaagtaggagggaaaaggagaatttgggcttgtgtacatatctttgttttcttgattatttgtttggtgattttttattcaaaagaaaagacttgctcaaatttaaaataatttgcattctgttttaccatttttacatttgagaattargtttactgtgaaaataacaattattggccaaaattctctttcttaagcttggcatattgttttttctatattcttggtggtagaaatattgggttaagagtttgcttggtaaactgagaagacttcttttctgggaagtggttgcagaatgaagagttggatgttgaggactggagagaggttacatgcactggtgacttgaagctttaatactagatgacgtttttggaagccagcatgtgatattcaacaataagtttatagaagcctgcttggttttcaggttcgatacagttttcctttttcttataaagtattgttgttattgttcttat

SEQ ID NO: 700707 - DNA, 1496 bp, Homo sapiens
ggatcctcagtgctggatttccatttccgtttctaggtgaagagaactgaattgtgtaagggccattcacagaacttaatcactgcttaaaatgttgtatcaaagttataaataactgagtagatcctgtatgaaattgggaacttccttttccataagataataaatgcctgcatcagggacatggtccttattctctttttgttccttttacttaaacttctcccttactggctgctattctatcctcccttctctaattacacatagacacatctatgcttccaccctctttctcctttcagaatgtgcttaaacacacttagtaaaaacagtccattttgggatatcattttctccttgcgcgggagtcttttaaggttttaggatgaagcattattgacaggtaacttgtgtcctttctaatcactgttgaatcatccctgcagtttctgtgtttattcttatgcctgatcacattcgataacaaagcttgtgcaaaatcaaaaacaaaaaggtcttgaactgcaatcaaataaaggggagctacctggttaacaaattttacaaaacatttattggaaaatatatctatcccatgagataggacacagtcaaaggaccacccactttctccattaacatgtggatagctgtctgcttcttactgcactttcattctctaaaaataaccaccaaggtcttttagtgaaaataagtaagttggaaccaaaaacaaaggcacaacattcttctccaaataagttgctcagaaatgctttttcgtgaaacatagtttctagcatcttccattttcttgctatttatccatgcttggaattacttcattcattagttctgacaasggattgtatttgtatcattgcttgacaaatgtgttacatgtttcagtcttaaaatattccactctgagctcagtgctgcatacttgggagataatgttaaatcagcctcgcgacacactgctgtcatcatgccaaataactcagggaaaaatgataagggtataaagagatcaataaggcaagaaaatctgtgctttcaaaagtaaggcaaaatatgagaaagactatcagtcaagcatcggggcataaataaagcaagaatatgccacgtttagggcaccgtgatgctacagtgagcaattatcccatgagtagtaaatttctcttacgtttgcctaacacctttattgtaggtcattctaaaatgtagccatgagattcaccggcacattgatcagcctagcattgctcttttttctcccataatagaataaaatgaggatatggctgataaatgctgagaaggacaattcccagaccatttagatgtgagtggccacactggagtgttctccctgtgtaagaaagatttatataacgcacattttttaaaatatgaattatgcaaatacatttctgcccattgagatgatattactcaacagggccctcgtaagtgcccagttctgt

SEQ ID NO: 700708 - DNA, 459 bp, Homo sapiens
gaataataataattttgttagttacttgatgtccattcaacaatggtataggctattgaaagttgaagatgcacatgtcttcaatgtccaagcaggtatacaaatgagtgaagcgggctggttttaagaaaataaaggatagtttaggtyccgctaaaaggcattctaatttaaatacttttaacagtattgtagccaaacaaaattccttccctagacaaatttgcccttctgatgaattacaggaatgttctaagagacttctagactcagtatgctcatggggctgagctgcagagtatgttagtataaatatatctctgacaccataactaccgcgaaccatttttctgaggactacacagctcttcgtttactcattttctgctcactgttaagtagggcgtctctcctgggcaagcaagccaaagacaccattcatgatccctccccttagga

SEQ ID NO: 700709 - DNA, 459 bp, Homo sapiens
gaataataataattttgttagttacttgatgtccattcaacaatggtataggctattgaaagttgaagatgcacatgtcttcaatgtccaagcaggtatacaaatgagtgaagcgggctggttttaagaaaataaaggatagtttaggtcccrctaaaaggcattctaatttaaatacttttaacagtattgtagccaaacaaaattccttccctagacaaatttgcccttctgatgaattacaggaatgttctaagagacttctagactcagtatgctcatggggctgagctgcagagtatgttagtataaatatatctctgacaccataactaccgcgaaccatttttctgaggactacacagctcttcgtttactcattttctgctcactgttaagtagggcgtctctcctgggcaagcaagccaaagacaccattcatgatccctccccttagga

SEQ ID NO: 700710 - DNA, 459 bp, Homo sapiens
gaataataataattttgttagttacttgatgtccattcaacaatggtataggctattgaaagttgaagatgcacatgtcttcaatgtccaagcaggtatacaaatgagtgaagcgggctggttttaagaaaataaaggatagtttaggtcccgctaaaaggcattctaatttaaatacttttaacagtattgtagccaaacaaaattccttccctagacaaatttgcccttctgatgaattacaggaatgttctaagagacttctagactcagtatgctcatggggctgagctgcagagtatgttagtataaatatatctctgacaccataactaccgckaaccatttttctgaggactacacagctcttcgtttactcattttctgctcactgttaagtagggcgtctctcctgggcaagcaagccaaagacaccattcatgatccctccccttagga

SEQ ID NO: 700711 - DNA, 647 bp, Homo sapiens
acttatgttggcaaatgtctagctttctatctaggttaactttaaagtgagctgcagttaaataaattttaagtgggaaaatagcctcagaattattgtggtagaaagacaaggtgcagctgatactttctcttactctcaggactcagaatgagccatgtgcttctttaaagggcctatgtggtcgtttcagagcaaatgctctctttcatcttatttaagttctgtttggcttgcctcccatatttgctcagtggggataaggttaagacctctgaggaggccactctatcccaattacttacccagyctcttttcttttcttcaaatagcttgcgtgtagttgtggagaatgtttgggggtcattatcttcttgatggatgaatccagagataaacaaacattttctatttgaattctaaaggtatgataaagtttaatccaaagacttttatgttttgaattcatccaggcaccaattcttgcagcaaaacatccaaacgcctgctaaggccaattatttcttttgaaatctggtttttctcagaaagttcttcccccatccacgtagtttcctattgtctcaagttgccctccagcctctaattcttaccgagatttaccttgtcattcattcccttctgtc

SEQ ID NO: 700712 - DNA, 647 bp, Homo sapiens
acttatgttggcaaatgtctagctttctatctaggttaactttaaagtgagctgcagttaaataaattttaagtgggaaaatagcctcagaattattgtggtagaaagacaaggtgcagctgatactttctcttactctcaggactcagaatgagccatgtgcttctttaaagggcctatgtggtcgtttcagagcaaatgctctctttcatcttatttaagttctgtttggcttgcctcccatatttgctcagtggggataaggttaagacctctgaggaggccactctatcccaattacttacccagtctcttttcttttcttcaaatagcttgcgtgtagttgtggagaatgtttgggggtcattatcttcttgatggatgaatccagagataaacaawcattttctatttgaattctaaaggtatgataaagtttaatccaaagacttttatgttttgaattcatccaggcaccaattcttgcagcaaaacatccaaacgcctgctaaggccaattatttcttttgaaatctggtttttctcagaaagttcttcccccatccacgtagtttcctattgtctcaagttgccctccagcctctaattcttaccgagatttaccttgtcattcattcccttctgtc

SEQ ID NO: 700713 - DNA, 1368 bp, Homo sapiens
atttcatcagcacatagtatgggagattatatgttgtagctataagaatgatatatattagcattgtccagtagaactttctgtgatgatgagaatgttctgtgtctacctgtcagatacagcagtcagtacccacgtatgtttttcagcatttgaaatgtaactagcgcaactgaagaaatacatttttaaatttaagttaattttaattaattacctgtgaatttaaatagctgcatgctgctaatgactgtcagattggactgtacatatttatatttaaacctggagttaacggaggtgaagactgcttagcttcaggtcctgggtatgatgctgagcagctgaacaaccttgaaaagtcgtttaacctccctaagtctcagtattctcttcttcaacatagagataataatagttcttacctctaagagttctgagatcaggaaataaatcaatgagcataaagctcttagaattgtgcctggaatataatgtatgctcaataaactttagccattgctattcttattttataatcttttgtagatattgatgaagtagaaactgaaaaagtatggaaatgaaatagctctaaagtaataaaaggaaaatgtcctgaatgggtataattttaggtgatccttgaggaatatgtgggatttggataaatagaaagtaattacagggtgaccatacaccctgatttgcttcagacaatctcaattattccttgtgtcctggtttaattactaacatccccctcttttgctctcaaattttcccggtttgtaagataaatattaagtcactgtagaattagatataggagtacagcccaggcgtttcagatgcagggaagataacataytaaggtatagatgcagatgtgactatggtgtggtttgaatggtgagtactgggaagtagaaggaaacagggatacgtgtaggctggacacattatggagttgggatgagaactggtataaggaaattagattggattgtatatgctatttgcactattgttgaattgctcctgtgtcaacatagattcactttcagaaaagcaaagttcccatttaattggacaaaaatatttggtgtatcaaaaaaacctgatactattttgtgttctgattgtatttccattactgacagtaattttcgttatacgtaattgggaacaaagtgtgttatttctatcatccctttgctacaagtaaccaaatcagtaatatgattggttaatatggaaactagtcaattaaaatggaaaatgcctcattattatctgaagccatgactttcacaactggaggaaactttgcaagagttcatttagttgcaataaagtattatcact

SEQ ID NO: 700714 - DNA, 1368 bp, Homo sapiens
atttcatcagcacatagtatgggagattatatgttgtagctataagaatgatatatattagcattgtccagtagaactttctgtgatgatgagaatgttctgtgtctacctgtcagatacagcagtcagtacccacgtatgtttttcagcatttgaaatgtaactagcgcaactgaagaaatacatttttaaatttaagttaattttaattaattacctgtgaatttaaatagctgcatgctgctaatgactgtcagattggactgtacatatttatatttaaacctggagttaacggaggtgaagactgcttagcttcaggtcctgggtatgatgctgagcagctgaacaaccttgaaaagtcgtttaacctccctaagtctcagtattctcttcttcaacatagagataataatagttcttacctctaagagttctgagatcaggaaataaatcaatgagcataaagctcttagaattgtgcctggaatataatgtatgctcaataaactttagccattgctattcttattttataatcttttgtagatattgatgaagtagaaactgaaaaagtatggaaatgaaatagctctaaagtaataaaaggaaaatgtcctgaatgggtataattttaggtgatccttgaggaatatgtgggatttggataaatagaaagtaattacagggtgaccatacaccctgatttgcttcagacaatctcaattattccttgtgtcctggtttaattactaacatccccctcttttgctctcaaattttcccggtttgtaagataaatattaagtcactgtagaattagatataggagtacagcccaggcgtttcagatgcagggaagataacatattaaggtatagatgcagatgtgactatggtgtggtttgaatggtgagtactgggaagtagaaggaaacagggatacgtgtaggctggacacattatggagttgggatgagaactggyataaggaaattagattggattgtatatgctatttgcactattgttgaattgctcctgtgtcaacatagattcactttcagaaaagcaaagttcccatttaattggacaaaaatatttggtgtatcaaaaaaacctgatactattttgtgttctgattgtatttccattactgacagtaattttcgttatacgtaattgggaacaaagtgtgttatttctatcatccctttgctacaagtaaccaaatcagtaatatgattggttaatatggaaactagtcaattaaaatggaaaatgcctcattattatctgaagccatgactttcacaactggaggaaactttgcaagagttcatttagttgcaataaagtattatcact

SEQ ID NO: 700715 - DNA, 591 bp, Homo sapiens
aggcttcttttttaataagaaggtttaaaaaagaaggcttctttttaaatatctcattatctaatgagataactcattagataattcgttagacaacggcatagatagcaacaaactcccaaccagattgctatggaatagtcccttctatttagaatttctagcaccgctatagtttaagtcattcctcaaagtgaaattgagaggttagaaacagacaatgggrcaagaaaagcagtttcccacagcagcttacatgacttatgagcaaaaactggttcacaaaatggacaacagagtgtgttgaaaagaaactagatatttacaatgaagaacttaggcaagggatacttttactgtaagatatttcaggacagttgtgatgtaatcatgagcttacatgaaaataagtaaaggatgataattgtcaattatgtgataaataaaattttctaaatcttacacttgcttaaatgccattacaaatgtaatatgtggaaaaacctaactccactaattaagagaattcacatcaatgttatatacatgaaaatatgtacagcaaaataacatcaatattcattgtcatcc

SEQ ID NO: 700716 - DNA, 614 bp, Homo sapiens
ggctcagcactgataccgtgagatgctggggcttcgaaaatgatactccagagtatggcagtttggcatmctttggcatcctttgtttccttttcttcaaacccaggatctcctgtttgtgcggaatatgttgaattcaaagactgaaagggcctcaaagattgaaagattgaaagggcctcagagcagtctctttgtgaccttctcctgctctcctttctctactaaggtaggtcatagatactggaatttctcttccccatggtgagtcatagaaactagaaattatactctaacctacccctatctttctgtgtaggagctgaccataaagaaattctctgacccaccttgtctgacagtagatcctaagacctcattcccagaggggctgtgctccatgctggagagtgaggaatactgtgcagagaggtcaagatgaatctgaacagatgggcttgctgggtcctttcagtctattaccactagaacattccatttttgtctaatcacatttctacctgggtgtcctttatacactgaacttaagcataaaaatagatggttttcactgagtcttggggtttttaagacatgccatgtaaaaactttgg

SEQ ID NO: 700717 - DNA, 614 bp, Homo sapiens
ggctcagcactgataccgtgagatgctggggcttcgaaaatgatactccagagtatggcagtttggcatcctttggcatcctttgtttccttttcttcaaacccaggatctcctgtttgtgcggaatatgttgaaytcaaagactgaaagggcctcaaagattgaaagattgaaagggcctcagagcagtctctttgtgaccttctcctgctctcctttctctactaaggtaggtcatagatactggaatttctcttccccatggtgagtcatagaaactagaaattatactctaacctacccctatctttctgtgtaggagctgaccataaagaaattctctgacccaccttgtctgacagtagatcctaagacctcattcccagaggggctgtgctccatgctggagagtgaggaatactgtgcagagaggtcaagatgaatctgaacagatgggcttgctgggtcctttcagtctattaccactagaacattccatttttgtctaatcacatttctacctgggtgtcctttatacactgaacttaagcataaaaatagatggttttcactgagtcttggggtttttaagacatgccatgtaaaaactttgg

SEQ ID NO: 700718 - DNA, 614 bp, Homo sapiens
ggctcagcactgataccgtgagatgctggggcttcgaaaatgatactccagagtatggcagtttggcatcctttggcatcctttgtttccttttcttcaaacccaggatctcctgtttgtgcggaatatgttgaattcaaagactgaaagggcctcaaagattgaaagattgaaagggcctcagagcagtctctttgtgaccttctcctgctctcctttctctactaaggtaggtcatagatactggaatttctcttccccatggtgagtcatagaaactagaaattataytctaacctacccctatctttctgtgtaggagctgaccataaagaaattctctgacccaccttgtctgacagtagatcctaagacctcattcccagaggggctgtgctccatgctggagagtgaggaatactgtgcagagaggtcaagatgaatctgaacagatgggcttgctgggtcctttcagtctattaccactagaacattccatttttgtctaatcacatttctacctgggtgtcctttatacactgaacttaagcataaaaatagatggttttcactgagtcttggggtttttaagacatgccatgtaaaaactttgg

SEQ ID NO: 700719 - DNA, 630 bp, Homo sapiens
aggctgggtaaagaagggtatctaccaaagaaagagaaggaataatcagagaagtaggaagaaaaccaggcgacaccgtgttgggtgaggcatgggaagaaaatgtttcaaagaggaattgatctgtaacactgaatgctgccacgaggtcaagatgaggactggaaaatatctacccgatttagcggcatggaggtcattgctggcctttgcacagagctgttgtagtggcataccaggggcaaaagacagacatgagtgaggtgaggagcaaatgggaggtgaggaatggaaacaagtttagtaaagagataaggaggaagatgtggaartgtttggtttttgttgatttggttttgccttaaatctttttcttaatttactcttaaaaaaaaacttgcaaaaatagtacacagagtttctatatgctcttcacccactttcccctagtgttaacatcgtttatgaccatggtacaattataaaaatcaagaagttaatattggtataatgccattaaccatgccatagacttcatcggtttttccactaatatcctttttctgttccaagatcctacatggaatttagttgtcaaatctccttagtcttctccaatttgtgacagtt

SEQ ID NO: 700720 - DNA, 630 bp, Homo sapiens
aggctgggtaaagaagggtatctaccaaagaaagagaaggaataatcagagaagtaggaagaaaaccaggcgacaccgtgttgggtgaggcatgggaagaaaatgtttcaaagaggaattgatctgtaacactgaatgctgccacgaggtcaagatgaggactggaaaatatctacccgatttagcggcatggaggtcattgctggcctttgcacagagctgttgtagtggcataccaggggcaaaagacagacatgagtgaggtgaggagcaaatgggaggtgaggaatggaaacaagtttagtaaagagataaggaggaagatgtggaaatgtttggtttttgttgatttggttttgccttaaatctttttcttaatttactcttaaaaaaaaacttgcaaaaatagtacacagagttyctatatgctcttcacccactttcccctagtgttaacatcgtttatgaccatggtacaattataaaaatcaagaagttaatattggtataatgccattaaccatgccatagacttcatcggtttttccactaatatcctttttctgttccaagatcctacatggaatttagttgtcaaatctccttagtcttctccaatttgtgacagtt

SEQ ID NO: 700721 - DNA, 812 bp, Homo sapiens
tcttttttttttttttaatgcactcagtaaacatttattgagggcttgactgttccaggtactgtgctgagccctgggtgggagagagggtgatgactaaggcttgggaagtcagggctagggaagccgacagaagccaagtcgtgcagacggggccctgtgaactcagctaaggagactggactccacttggactccctggaaagctaccagagttttaaaccactggggaatgatatgttttgataccaccgttctgggtcccctggggtaataaatactatgccattaccaccattaacaccttcgtgtgaattaggtaatcagataagtgtcaccttgcaaaagactgagatgtaggactgataagttttgatgccagagagtgaagccaggaagagccagtgctcagtggctaccacgygggtaacggagagcaggggacagaccccaaaggaagctgtgtgtggggccatcacagcataagtgtcctccacatatgatgtacgcctgtaaatagttactgagctcctttgatctgggtcctgagcatagcagagaacaaaagaaatggcccctgacctcaagaggaagacagacagtgcataatcacagatttagaactacaagctggagtagggtctcagaaggaaaagaacagtctctgtgagagagtgtattggggatagagttaagatgaaggggaggaattagaaagggctctcttagatgacatttaaggggagacctgactcacattcgccagctgaaaactatggggacaagcattccaggaagaaggaacagcatgt

SEQ ID NO: 700722 - DNA, 2072 bp, Homo sapiens
aatacatttgattttaatatatattaaaatcaatttatatgtttatcacaatatattgatatatttatcacaatatatcacagtatatcacaatatattaatattgtaattaatacatttattaatacattaatatattaatacatgcagcaaaaatctaccatgttagccattttaatgtgtataatttggtggcattgagttcattcacaatattgtacaaccaccgcaactattttgttccagaacatccctcaaggaaaccctgtatccatgaagcagtcactccccattcccctctcctccatccctggcaactactaatctgctttctgtctctgtgaatttgcctatggggatactgcatgggaatggaatcatgtgatatgtggcttttgatgtctgaattcttcaactcagcacaatgttttcaagattcacccatgttgtggcacatacttcattccttttttttttttttttttttagatggagtttcgctcttgttgcccaggctggagtgcaagggtgcgatctcggctcactgcaacctctgcctcctgggttcaagcaattctcctgcctcagcctcccaagtagctgggattacaggcatgtggcaccatgcccggctaattttgtatttttagtagagatggggtttcaccatgttggtcaggatggtcttgaactcctgacctcaaatgacccacccaccttggtctcccaaagtgctgggattacaggcgcaagccactgcgcccggccacgtacttcatttcttggctcaaaaaatattccattgtagagtggaatatgcttttgaattaattgctaagtaaatcattcacagactgtagtactattattagcaacaattaaataagataatctatgtaaggtatggggcacgtggtgtgcaatcagttagcattcacttttcatcatcaacaaaaattcctcatagcacacctcgctggtggtggtgtcatcacaccttacttgggaatcaataggctggaggtgtcatccagatcccatcttctgagtacatgaatcaaaacatttctgcacaagtattacatattcccccagttctccaatgtrtgcggacctctggcgagtaaaccttccttatgcagtaaccattataagctagcaaaacactggaacccttcttcaagtaatcttgccacatgaaatttaccaaaacagaaaatccttggggaggtggtgtaattctccatttttcaaaatgacttacaacaggattcctttaaatggttttcccagtagtcttaaaacacaattcaatttgcataatcaacatttcaacaacacaccttctctataaaatactatgcagctgtctgagctgggctccaactttggaggacagtgatgcttacaagacatgaggaattgatgtctgcttttccccataatcagcatgctgaatccagagacagaagtccttagtccttatcccactttccagccctgtgactgtgaacaagagcggctacttcttctcatgtcagtgtattcccaggaatgcagaagtcacagccactttctctaaggctgacacatgaatcaacagggcggcaaccacagaaaggagaattatcatgggtactcacagagttgatcctcgctcaggacatacgctctgtccacagtttggggcaaaagtccacatttgtgaagcatttcagaacactgtcccatctccatgggctgcctgaccctcctccacactggccccctcaggaacggagtccaccctcccatccatgtatgccctcccaccgtccccaaatcccccagctgagcaacagtgggccctcagacccccgctggggatgcgtaggaccctccatgcccacttccacctgccttccgggggctgtggaggcctccacaaccaaagcaagcctccccaagtgtcctgtggacagttctctcccaactcccgaagcttgttttctttaattagctcactgtggcaggagaaaaacgcggccccaccctcgaaataagcagatctgggcctcaaatgtactctgtgg

SEQ ID NO: 700723 - DNA, 2072 bp, Homo sapiens
aatacatttgattttaatatatattaaaatcaatttatatgtttatcacaatatattgatatatttatcacaatatatcacagtatatcacaatatattaatattgtaattaatacatttattaatacattaatatattaatacatgcagcaaaaatctaccatgttagccattttaatgtgtataatttggtggcattgagttcattcacaatattgtacaaccaccgcaactattttgttccagaacatccctcaaggaaaccctgtatccatgaagcagtcactccccattcccctctcctccatccctggcaactactaatctgctttctgtctctgtgaatttgcctatggggatactgcatgggaatggaatcatgtgatatgtggcttttgatgtctgaattcttcaactcagcacaatgttttcaagattcacccatgttgtggcacatacttcattccttttttttttttttttttttagatggagtttcgctcttgttgcccaggctggagtgcaagggtgcgatctcggctcactgcaacctctgcctcctgggttcaagcaattctcctgcctcagcctcccaagtagctgggattacaggcatgtggcaccatgcccggctaattttgtatttttagtagagatggggtttcaccatgttggtcaggatggtcttgaactcctgacctcaaatgacccacccaccttggtctcccaaagtgctgggattacaggcgcaagccactgcgcccggccacgtacttcatttcttggctcaaaaaatattccattgtagagtggaatatgcttttgaattaattgctaagtaaatcattcacagactgtagtactattattagcaacaattaaataagataatctatgtaaggtatggggcacgtggtgtgcaatcagttagcattcacttttcatcatcaacaaaaattcctcatagcacacctcgctggtggtggtgtcatcacaccttacttgggaatcaataggctggaggtgtcatccagatcccatcttctgagtacatgaatcaaaacatttctgcacaagtattacatattcccccagttctccaatgtatgcggacctctggcgagtaaaccttccttatgcagtaaccattataagctagcaaaacactggaacccttcttcaagtaatcttgccacatgaaatttaccaaaacagaaaatccttggggaggtggtgtaattctccatttttcaaaatgacttacaayaggattcctttaaatggttttcccagtagtcttaaaacacaattcaatttgcataatcaacatttcaacaacacaccttctctataaaatactatgcagctgtctgagctgggctccaactttggaggacagtgatgcttacaagacatgaggaattgatgtctgcttttccccataatcagcatgctgaatccagagacagaagtccttagtccttatcccactttccagccctgtgactgtgaacaagagcggctacttcttctcatgtcagtgtattcccaggaatgcagaagtcacagccactttctctaaggctgacacatgaatcaacagggcggcaaccacagaaaggagaattatcatgggtactcacagagttgatcctcgctcaggacatacgctctgtccacagtttggggcaaaagtccacatttgtgaagcatttcagaacactgtcccatctccatgggctgcctgaccctcctccacactggccccctcaggaacggagtccaccctcccatccatgtatgccctcccaccgtccccaaatcccccagctgagcaacagtgggccctcagacccccgctggggatgcgtaggaccctccatgcccacttccacctgccttccgggggctgtggaggcctccacaaccaaagcaagcctccccaagtgtcctgtggacagttctctcccaactcccgaagcttgttttctttaattagctcactgtggcaggagaaaaacgcggccccaccctcgaaataagcagatctgggcctcaaatgtactctgtgg

SEQ ID NO: 700724 - DNA, 2072 bp, Homo sapiens
aatacatttgattttaatatatattaaaatcaatttatatgtttatcacaatatattgatatatttatcacaatatatcacagtatatcacaatatattaatattgtaattaatacatttattaatacattaatatattaatacatgcagcaaaaatctaccatgttagccattttaatgtgtataatttggtggcattgagttcattcacaatattgtacaaccaccgcaactattttgttccagaacatccctcaaggaaaccctgtatccatgaagcagtcactccccattcccctctcctccatccctggcaactactaatctgctttctgtctctgtgaatttgcctatggggatactgcatgggaatggaatcatgtgatatgtggcttttgatgtctgaattcttcaactcagcacaatgttttcaagattcacccatgttgtggcacatacttcattccttttttttttttttttttttagatggagtttcgctcttgttgcccaggctggagtgcaagggtgcgatctcggctcactgcaacctctgcctcctgggttcaagcaattctcctgcctcagcctcccaagtagctgggattacaggcatgtggcaccatgcccggctaattttgtatttttagtagagatggggtttcaccatgttggtcaggatggtcttgaactcctgacctcaaatgacccacccaccttggtctcccaaagtgctgggattacaggcgcaagccactgcgcccggccacgtacttcatttcttggctcaaaaaatattccattgtagagtggaatatgcttttgaattaattgctaagtaaatcattcacagactgtagtactattattagcaacaattaaataagataatctatgtaaggtatggggcacgtggtgtgcaatcagttagcattcacttttcatcatcaacaaaaattcctcatagcacacctcgctggtggtggtgtcatcacaccttacttgggaatcaataggctggaggtgtcatccagatcccatcttctgagtacatgaatcaaaacatttctgcacaagtattacatattcccccagttctccaatgtatgcggacctctggcgagtaaaccttccttatgcagtaaccattataagctagcaaaacactggaacccttcttcaagtaatcttgccacatgaaatttaccaaaacagaaaatccttggggaggtggtgtaattctccatttttcaaaatgacttacaacaggattcctttaaatggttttcccagtagtcttaaaacacaattcaatttgcayaatcaacatttcaacaacacaccttctctataaaatactatgcagctgtctgagctgggctccaactttggaggacagtgatgcttacaagacatgaggaattgatgtctgcttttccccataatcagcatgctgaatccagagacagaagtccttagtccttatcccactttccagccctgtgactgtgaacaagagcggctacttcttctcatgtcagtgtattcccaggaatgcagaagtcacagccactttctctaaggctgacacatgaatcaacagggcggcaaccacagaaaggagaattatcatgggtactcacagagttgatcctcgctcaggacatacgctctgtccacagtttggggcaaaagtccacatttgtgaagcatttcagaacactgtcccatctccatgggctgcctgaccctcctccacactggccccctcaggaacggagtccaccctcccatccatgtatgccctcccaccgtccccaaatcccccagctgagcaacagtgggccctcagacccccgctggggatgcgtaggaccctccatgcccacttccacctgccttccgggggctgtggaggcctccacaaccaaagcaagcctccccaagtgtcctgtggacagttctctcccaactcccgaagcttgttttctttaattagctcactgtggcaggagaaaaacgcggccccaccctcgaaataagcagatctgggcctcaaatgtactctgtgg

SEQ ID NO: 700725 - DNA, 2072 bp, Homo sapiens
aatacatttgattttaatatatattaaaatcaatttatatgtttatcacaatatattgatatatttatcacaatatatcacagtatatcacaatatattaatattgtaattaatacatttattaatacattaatatattaatacatgcagcaaaaatctaccatgttagccattttaatgtgtataatttggtggcattgagttcattcacaatattgtacaaccaccgcaactattttgttccagaacatccctcaaggaaaccctgtatccatgaagcagtcactccccattcccctctcctccatccctggcaactactaatctgctttctgtctctgtgaatttgcctatggggatactgcatgggaatggaatcatgtgatatgtggcttttgatgtctgaattcttcaactcagcacaatgttttcaagattcacccatgttgtggcacatacttcattccttttttttttttttttttttagatggagtttcgctcttgttgcccaggctggagtgcaagggtgcgatctcggctcactgcaacctctgcctcctgggttcaagcaattctcctgcctcagcctcccaagtagctgggattacaggcatgtggcaccatgcccggctaattttgtatttttagtagagatggggtttcaccatgttggtcaggatggtcttgaactcctgacctcaaatgacccacccaccttggtctcccaaagtgctgggattacaggcgcaagccactgcgcccggccacgtacttcatttcttggctcaaaaaatattccattgtagagtggaatatgcttttgaattaattgctaagtaaatcattcacagactgtagtactattattagcaacaattaaataagataatctatgtaaggtatggggcacgtggtgtgcaatcagttagcattcacttttcatcatcaacaaaaattcctcatagcacacctcgctggtggtggtgtcatcacaccttacttgggaatcaataggctggaggtgtcatccagatcccatcttctgagtacatgaatcaaaacatttctgcacaagtattacatattcccccagttctccaatgtatgcggacctctggcgagtaaaccttccttatgcagtaaccattataagctagcaaaacactggaacccttcttcaagtaatcttgccacatgaaatttaccaaaacagaaaatccttggggaggtggtgtaattctccatttttcaaaatgacttacaacaggattcctttaaatggttttcccagtagtcttaaaacacaattcaatttgcataatcaacatttcaacaacacaccttctctataaaatactatgcagctgtctgagctgggctccaactttggaggacagtgatgcttacaagacatgaggaattgatgtctgcttttccccataatcagcatgctgaatccagagacagaagtccttagtccttatcccactttccagccctgtgactktgaacaagagcggctacttcttctcatgtcagtgtattcccaggaatgcagaagtcacagccactttctctaaggctgacacatgaatcaacagggcggcaaccacagaaaggagaattatcatgggtactcacagagttgatcctcgctcaggacatacgctctgtccacagtttggggcaaaagtccacatttgtgaagcatttcagaacactgtcccatctccatgggctgcctgaccctcctccacactggccccctcaggaacggagtccaccctcccatccatgtatgccctcccaccgtccccaaatcccccagctgagcaacagtgggccctcagacccccgctggggatgcgtaggaccctccatgcccacttccacctgccttccgggggctgtggaggcctccacaaccaaagcaagcctccccaagtgtcctgtggacagttctctcccaactcccgaagcttgttttctttaattagctcactgtggcaggagaaaaacgcggccccaccctcgaaataagcagatctgggcctcaaatgtactctgtgg

SEQ ID NO: 700726 - DNA, 916 bp, Homo sapiens
tgtcctgtagttcaccccattttccccatcctcagactaatccccattctggggaggactaagctttactctggtttatgtaataaccatctgtattagtccgtcttcacactcctaataaagccatacctgagactgggcagtttataaagaaaaagaggtttaatggcctcacagttccacatggctggggaagcctcacaatcatggcagaaggcaaaaggtacgtcttacatagtggcacaagggagaatgagagcaaagcaaaaggggaaacctcttataaaaccactygatctcatgagacttatttagtaccacaagaaatgtatgggggaaactgccctcatgattcaattattttccagcaggtccctcccacaacacatgggaattatgggagctacagttcaagatgaaatttgggcggggacacagccaaaccatatcagcatcctagcttacagcttttaccctcagtttctaaaacctagatatttctttactttcttctgtaacaatcctttcctgaagtaatgagtgttatatgatctggctgaccaaatgggcaaagaaatagagctgctggaacagagtaaaggaatgaaaggtatgggggtgggagggaaactttggtgactatttcaaaatattgtcctgctgtgtgctacccagtgaaaagacataggggggtagaagtcagaaaaatctgagttcaagttctacctctgtaatgtattagctgtttgtgacttgcacaaggaacttaatttatataatcctcagtttcctcacctataacatgaagacctatcttatacaattgttggaagaattaaataaaacagagtaagtaaagctcttagcggagtaagagcacatagtcagctcttaatacatttgaattatcattgtc

SEQ ID NO: 700727 - DNA, 609 bp, Homo sapiens
ttagttaatatatggcgatgtctgcctctaagtacctactttttcctccatctctcttgttggattttggtggtaaaaggtcagttgtctactgcaaagttttagacaagaggaatgcttctgaatccatcagtttatcttaagctatccacaatatatttttgtgatgtatctcaatttgatttttaataacagtaaaagaargagtgatagctattttattgaatttatatatccaatctcaaaaaaatatataaaagaataattaagtctcttgacagctataagagcataaaaaccaacttaaacaaaaaagcaggagaaaaacaacctttggactgtgtggacagataaacacagtagaaaaagacgcaggggccagaaatccaccctgacattctatgactcaccagttatatggcagctgaaggtgaggtagaggtccattgacaagaggagactattttagaactctttttttttgtcccaaactaagaggacaagcagagtcatcacacataattttaaaaagaaaaaggaaaagtaacaaaaagaaaagggaagaagaaggtggctattctgaatgtagttttggtaccaaaaagaatg

SEQ ID NO: 700728 - DNA, 1451 bp, Homo sapiens
cttcacccttagttaatctggtcatacagttgatttccccagagagaatggactggacgatctatgtggccaggaagaaaatgtacccacaggaatcctcaggtgtcatcttgtcttaatctcctcaacctacagtctgtaatagacccgaggagactctacaaatccgaagtaacccagagagaactacttttcccaagccccaaattatgcaaggctgactcagagatttgtcttttttgttcgtacattgttttcacctacggcaacacctgctacacggttgatgcttagctggaggtaggtggatgtggccctcccaacctcctacttggtcctgaagctgcatctgcaccaacagtgactcttagcaatacccaatgtacattgtgaggctttgaactcaagttaaaaatgcagtcttccttccgtgcctgtcaacattgatgctagagtattttatgaaatggccctgcttcagtgagtatactttcacaagaatttattaaacacctattacataatgaggtaatagttttactgtatataatcctggattccaataaataattctgcagaatatattgagcataattagtaatacagctgacatttattgagtgactactatatttgcctactcttttcarcactttatgtaaattaactcacttaatcctcataacgactctatgtgcttggtgccattcttatccgcattttgcagcttcagtaagggagccatggggaggataagtaatttgccctgcaaaaatgcagctaataatggagaacctggaaatcaggcccctgcagcatggctcctgagtcttaattcactctgtttttcctgtgcaagcagaaagcttgttttgatgggaaatctaataactttaaaaagtgatcagtttaaggatagcacctacttaaagaatgcagaggactctgtgtcttcatgcaggtctatatgctgaatgtgtgttgctgttttcttctatcatgtgctttacctctgctcacctaatccaggttcagcttagttctgcggttgaatgtgaacacggttggcatatgcttagttgtttaatggttagatatttttaactagtgtagaagaagctaacgcttgtaacagaagccagatactagtgagaagcagagttcacacacacagattcagcacgttatgttctgactatatttatacagagttggaatagatccagcagtcccaggcaatcactttaatcagttaaaagtggcaatagatggtcttgaagccgaaggagtcatgcctcctggaaatatttaccgtaacagcttctgttccaaaaaggaaaagaagaaaataaaaactctaaataaccaactactgaaattaaagcaaaattaagttattattttaaatgagctttttgaaaaatcgctagtgtggcagcccaataggaaag

SEQ ID NO: 700729 - DNA, 1451 bp, Homo sapiens
cttcacccttagttaatctggtcatacagttgatttccccagagagaatggactggacgatctatgtggccaggaagaaaatgtacccacaggaatcctcaggtgtcatcttgtcttaatctcctcaacctacagtctgtaatagacccgaggagactctacaaatccgaagtaacccagagagaactacttttcccaagccccaaattatgcaaggctgactcagagatttgtcttttttgttcgtacattgttttcacctacggcaacacctgctacacggttgatgcttagctggaggtaggtggatgtggccctcccaacctcctacttggtcctgaagctgcatctgcaccaacagtgactcttagcaatacccaatgtacattgtgaggctttgaactcaagttaaaaatgcagtcttccttccgtgcctgtcaacattgatgctagagtattttatgaaatggccctgcttcagtgagtatactttcacaagaatttattaaacacctattacataatgaggtaatagttttactgtatataatcctggattccaataaataattctgcagaatatattgagcataattagtaatacagctgacatttattgagtgactactatatttgcctactcttttcagcactttatgtaaattaactcacttaatcctyataacgactctatgtgcttggtgccattcttatccgcattttgcagcttcagtaagggagccatggggaggataagtaatttgccctgcaaaaatgcagctaataatggagaacctggaaatcaggcccctgcagcatggctcctgagtcttaattcactctgtttttcctgtgcaagcagaaagcttgttttgatgggaaatctaataactttaaaaagtgatcagtttaaggatagcacctacttaaagaatgcagaggactctgtgtcttcatgcaggtctatatgctgaatgtgtgttgctgttttcttctatcatgtgctttacctctgctcacctaatccaggttcagcttagttctgcggttgaatgtgaacacggttggcatatgcttagttgtttaatggttagatatttttaactagtgtagaagaagctaacgcttgtaacagaagccagatactagtgagaagcagagttcacacacacagattcagcacgttatgttctgactatatttatacagagttggaatagatccagcagtcccaggcaatcactttaatcagttaaaagtggcaatagatggtcttgaagccgaaggagtcatgcctcctggaaatatttaccgtaacagcttctgttccaaaaaggaaaagaagaaaataaaaactctaaataaccaactactgaaattaaagcaaaattaagttattattttaaatgagctttttgaaaaatcgctagtgtggcagcccaataggaaag

SEQ ID NO: 700730 - DNA, 1451 bp, Homo sapiens
cttcacccttagttaatctggtcatacagttgatttccccagagagaatggactggacgatctatgtggccaggaagaaaatgtacccacaggaatcctcaggtgtcatcttgtcttaatctcctcaacctacagtctgtaatagacccgaggagactctacaaatccgaagtaacccagagagaactacttttcccaagccccaaattatgcaaggctgactcagagatttgtcttttttgttcgtacattgttttcacctacggcaacacctgctacacggttgatgcttagctggaggtaggtggatgtggccctcccaacctcctacttggtcctgaagctgcatctgcaccaacagtgactcttagcaatacccaatgtacattgtgaggctttgaactcaagttaaaaatgcagtcttccttccgtgcctgtcaacattgatgctagagtattttatgaaatggccctgcttcagtgagtatactttcacaagaatttattaaacacctattacataatgaggtaatagttttactgtatataatcctggattccaataaataattctgcagaatatattgagcataattagtaatacagctgacatttattgagtgactactatatttgcctactcttttcagcactttatgtaaattaactcacttaatcctcataacgactctatgtgcttggtgccattcttatcygcattttgcagcttcagtaagggagccatggggaggataagtaatttgccctgcaaaaatgcagctaataatggagaacctggaaatcaggcccctgcagcatggctcctgagtcttaattcactctgtttttcctgtgcaagcagaaagcttgttttgatgggaaatctaataactttaaaaagtgatcagtttaaggatagcacctacttaaagaatgcagaggactctgtgtcttcatgcaggtctatatgctgaatgtgtgttgctgttttcttctatcatgtgctttacctctgctcacctaatccaggttcagcttagttctgcggttgaatgtgaacacggttggcatatgcttagttgtttaatggttagatatttttaactagtgtagaagaagctaacgcttgtaacagaagccagatactagtgagaagcagagttcacacacacagattcagcacgttatgttctgactatatttatacagagttggaatagatccagcagtcccaggcaatcactttaatcagttaaaagtggcaatagatggtcttgaagccgaaggagtcatgcctcctggaaatatttaccgtaacagcttctgttccaaaaaggaaaagaagaaaataaaaactctaaataaccaactactgaaattaaagcaaaattaagttattattttaaatgagctttttgaaaaatcgctagtgtggcagcccaataggaaag

SEQ ID NO: 700731 - DNA, 1451 bp, Homo sapiens
cttcacccttagttaatctggtcatacagttgatttccccagagagaatggactggacgatctatgtggccaggaagaaaatgtacccacaggaatcctcaggtgtcatcttgtcttaatctcctcaacctacagtctgtaatagacccgaggagactctacaaatccgaagtaacccagagagaactacttttcccaagccccaaattatgcaaggctgactcagagatttgtcttttttgttcgtacattgttttcacctacggcaacacctgctacacggttgatgcttagctggaggtaggtggatgtggccctcccaacctcctacttggtcctgaagctgcatctgcaccaacagtgactcttagcaatacccaatgtacattgtgaggctttgaactcaagttaaaaatgcagtcttccttccgtgcctgtcaacattgatgctagagtattttatgaaatggccctgcttcagtgagtatactttcacaagaatttattaaacacctattacataatgaggtaatagttttactgtatataatcctggattccaataaataattctgcagaatatattgagcataattagtaatacagctgacatttattgagtgactactatatttgcctactcttttcagcactttatgtaaattaactcacttaatcctcataacgactctatgtgcttggtgccattcttatccgcattttgcarcttcagtaagggagccatggggaggataagtaatttgccctgcaaaaatgcagctaataatggagaacctggaaatcaggcccctgcagcatggctcctgagtcttaattcactctgtttttcctgtgcaagcagaaagcttgttttgatgggaaatctaataactttaaaaagtgatcagtttaaggatagcacctacttaaagaatgcagaggactctgtgtcttcatgcaggtctatatgctgaatgtgtgttgctgttttcttctatcatgtgctttacctctgctcacctaatccaggttcagcttagttctgcggttgaatgtgaacacggttggcatatgcttagttgtttaatggttagatatttttaactagtgtagaagaagctaacgcttgtaacagaagccagatactagtgagaagcagagttcacacacacagattcagcacgttatgttctgactatatttatacagagttggaatagatccagcagtcccaggcaatcactttaatcagttaaaagtggcaatagatggtcttgaagccgaaggagtcatgcctcctggaaatatttaccgtaacagcttctgttccaaaaaggaaaagaagaaaataaaaactctaaataaccaactactgaaattaaagcaaaattaagttattattttaaatgagctttttgaaaaatcgctagtgtggcagcccaataggaaag

SEQ ID NO: 700732 - DNA, 1235 bp, Homo sapiens
aatgagagtagaataaatacacaaagggccaggacagatagtaagtcagtgtgggtcttcattttaatcttgtttgtatgtttattcttggttttacctataccttctctgaagagcaatgtgaagtgaatttataaatcaagggtattatataggcttttaaaacatatcagtatgtcataaagacgaattagtaaatacctgacatgcaatgctacatcatttagggtgatgcttagggttaaatccttgcacgatgaagttacagtttaggactaamgaggtaacaactcacaaaaatcaaaagccaaatgacacactggtctcaaggaagatctcctctaaccataatgaaaaacacactacaaaatgcatcattcgctcaatgaaaagtgggagtgtctttggtaaaaacatactaaatcaaaatatcttccactgctgacatgtagggctgggcaaaatggcacacatggaagaaacaccctgcgaggagtcttcaaaatcagcccattaaatgctttttagttttaatacttgcttgctaatcagaactacaatattcataaccaaatcctcattaaaaggaatttgttagactatttctctaacattttctaaatacaatgtaacttttaaaagtcaatcaaaaattgaagtgttttagaactcagggaaaagacggaaacagagtatccattctaccaatggactgccactagaatccaggtgaaataaattatttaaaaccatagctaagtccaaaacaaagtaaccttttgatctacaacacttgggggaaaggcagagggaaaaggtaggcaaggaaaatacatgatttattcagattataaatggacatgtggactgagtgtgctggcctccaggtggttctgagtggagaataagaaaaagccatcaagcacagaacacacaaatacgactctctggccctgagggaaaagaatctgagtgatgaaacccaaatatatgagtgaaatctaaaaatagccctgtttctacagaggtattttccttttaacattcattcgaaatgtgtgggaagacaaagcagttggagttaagtgaatttccagatttcattaaaagtcaagtgatactccgaaccattttcaaccaatagtaaaaatacaatttccccttcctttagttttttttcttggaagttggggagcggaggagggagacacaatactgggcaagagtatcatttc

SEQ ID NO: 700733 - DNA, 606 bp, Homo sapiens
tcctgagaaaatgtgggatagctggaaaaaaatattactagtctaaaggaaaacctaggctctagtcccaactctgttcctcttagtagctctgtgactttagttaagatacatagcctgtttgaacctgtttatccttaaagaggcaggatgagaatcttcaargtctcttccagttttaacacctaatgaaataaaagataatccattttagaagcacattgttcctgccttgatttgagcaatttaatccttacagcatcatatccttgtataggtaacaacaaattttgaggaagagggggaaaaaaaagagagagagagagagacagtttgtgatttaagaaagccagaagaaataagccccggatctaggattagtataaaagtctacacgtaactcccaagtctagaacgaaggtcacatgatttatccctcttaaaaagagtgtcatagcccaattgtttctatccagtgctgagtaaaccaatttgatctttgataagttaaataatataattagaagacacagggaagctcttccttctgcttccgatgtttgaattgggtgcagtaaagcagaattaaggagcaaaatggcagta

SEQ ID NO: 700734 - DNA, 643 bp, Homo sapiens
tctcttacctatttgcctacttcgcatacctatgggaactagtccatctccttcaccatgtgattcagtaaagtggttaaccaaatggttctgcctctccatccagagatggacacatggcattggcttcgccaatcaagtcactccatcccctggacagtgactgatctagggatggcacacaacacaaagacgaccagagatctttatgtggctggatgccgcagatgagagggtgcctcttttttgcctggaatcatgacatataagcaccatataataccagaaatttacaatagttgctttttccaccatgtgtcagaagctaccccaaaatgaagccagcatagataaaagcagaactgagagatgggacaagggagatggggagtgaggaggttttgatgacatcatttaactactagatatactgggyctcagtcaaataccccttgaactttccattgagtgattcaatgaacttttttcccctttaagccaattccaatgggatttctgtcccataaagatttgaagaaccctgattcatggtccacttgactaaatgagatgggaactaacatttactgagcacctctccaaggtcagagactatgtgggaccttcagcaagcatcatttca

SEQ ID NO: 700735 - DNA, 627 bp, Homo sapiens
aattgaataagctatactctgttcctttcaaaaatcaagaacataagaagaggctgamctgcccctgatcacagtaagtacaagtgctatgggaacacacagaaggaggaactgatgctatccaggactgtctccagagggtgggaaacaaaagaaatcacacttagtttcagttactgtggagctgacgacctagctgaggagagactcatgaacaaggccaccgtacagagcagtaactacaaatgccacaaaagagtgttcagtaccgtaagggttcagaggacataagggcacttccaattaggatgatctcagacgttttttttgaaaagagggaaatatgaatgaggctttagaggactgctaggtcttagtggagcggaaggcaagggatttgaaaagccacaaagccaaccagccactccctatctctactgagaaacatcctgagaaattcttgagttgtctgtggatctgggacagacatttacctcggatccccttgaactttctctcatttacaaggtcatgaagacatctcatttaaaaaaaacataaaacacagaggaaaggcatccaagacactcattttaccatgacctgagccattacagtaacctgaat

SEQ ID NO: 700736 - DNA, 644 bp, Homo sapiens
attgccagtgctcagtaattgtttgtggagagaatggatgtatgaatgctcacctccaccatgcactttatgtgcattacctatttttatcctcacaataactccatgccattctgcttttttcatggtttgtcttcaaatgcggaaatatgggaagaaaagacaaacaactgataaaatgttgagttaagtgaatgtattgatatgcaaacgaacagcctttatattgccatgtaggtttaaaacagagatgtaggctgggcgcggtggatcatgcctgtaatcccaggactttgggaggccgaggtgggcagatcacaaggtcaggagatcgagactatcctggctaactcagtgaaaccccgtctctactaaaaatacaaaaattagtcgggcatggttgtgggtgactgtagtcccagctactcaggaggctgaggcaggagaatagcttgaacctgggaggtggagcttgcagtgagccaagatcgttccactgcactccagcctgggtgacggagtgagactccatctcaaaaacaaaaaacaaaacaaaacaaaamaaaaaacagagatataaataagggaatgaaattgatgagatagagaaaaggcttaatatgtacctggcactgtgctaagta

SEQ ID NO: 700737 - DNA, 593 bp, Homo sapiens
tcaaagaactcatccaaatatgtgattgaacccgggagcccgaggaaattgagcatttgtgttatggataataattttttatattttttatccccacatcattggatgtaggtccaacttaatttgagtaggtccaaggctagactacagttacgatcttcattagcaaagcaatattgtmtattctcctcatcgctgattaatggattgtttccttacatatattgtaactttctctttttttttcaagccattaatcatttaaccttaccctcaggcatgagacagggttttatttttgtgcttcttaagagtattctttagacagaataagtcataaaagctcaagtgcattcattctcttttcaatttgtggatttaatccaccataaagcattccgactatataaagaaatgaaccgtgttaaaagcaagtattattaatgtgatacttcctctgggcacatttgccaaccaaaatattaaacttcctttaaagaaattcttgagaattattagtttgtcattcaattaagggtttacatgtgtaaaaatattccagccatgataatatgccctgcaatgtaatgtca

SEQ ID NO: 700738 - DNA, 591 bp, Homo sapiens
catctacttgggaggctgaggtacgagaatcgcttgaacctgggaggcggaggttgcagtgagctgagatcacgccattgcactccagcttgggcaacaagagtgaaactctatctcaaaataaatacataaataaatgaataaattttacaaatacatttaaaaygtaaataaattaacaaaagtttactgcatgatattaaaaatattccaaaataaatgtgcagatataccattgctagtaaataggagcctctatgaattaatatataaatgtatctccaaatattttatacttttaatatattctcttaaaaatccccaagttttatgaagatttatagcctatttcaaaatatctatgaacaaacaaatatcatgaacagtcagtggctgaaatagaaggccaactggtaggatttagcttactagttattaagaattattataaatctattagaattaaaacagacaagtaagataaataagcagatctataagaaactcattaaagaagtaatcttaatttagaaagagggtatgacacataagttgaaagaatactgctggggaaatcatgtattcatagga

SEQ ID NO: 700739 - DNA, 2014 bp, Homo sapiens
acttttaactttgagattttttttttttttttttttgagatagagtctcactctgtcactctgtcacctaggacttaggctggagtgctggagtacagtggtgcaatctcagctccctgtaacctccatttccctagttcaaatgattctgctttctcagccacctaagtaactggtattacaggcatacactaccacacccacctaattgttgtatttttagtggagacagggtttcaccatgttggccaggctggtctcaatctcctgaattcaggtgatccacccaactctgcctttcaaagtgcagggattacaggtgtgagccacagcacccagcctgtttttattttcaaatttcacatataacccacattttctacaaacaaatttgtaataaacatctttgaaaatactaaagaaaaaccccggtttttgtcatctgagtcattgtagtcctaacctctttcattttcctgtgcgcgtactcagttatcacagcctcagttcgagaattttgaccagagttaatcacgtatctgtaggcttattgcaatggracaattcaattctacaaaatcaggtatttgtattttgttattataattacttttcattgaaatttaaacagaagcaaagatattttctctttgctactattttccaggatacacagatccactctttaaaggttatctgaaaatcactgggtaagatatttagatcaggccagagcagcattattaataactgccagaatgaacaaaacttaaatgttagatggttgaactttgggccatataactttttttggtcagcttatctctaggacaaaagaataaaatctccctgccaaaagtttattgatagaataaaggaaaagcaactgtcgttgatccttcatttatctgctcagaggctctcgcttgagtccaacacattctcctgagccacattattatcttattttcatgcctgaatggcagacttcagttgagagccatagggacaattcatgcctaggctagtcagaggcatgggcaaacacataggaggatcttattcctaaagaagccaagaaaagctatggcctttcccaagccaaaagtatcggtctagtgagaagctctgagcaagcctcagtaacaatcactgaagtgaatggaaaaacaaaagtggaaaattaagtaaatgtaaatacactttataaaatagtcctcataagaaaagtcagtggcaaaatacaaagataacttgagctctatttccgagttccacaaagctttaattaaaagcagggtactgaaaagttggttgggtaataacacccttccagcttccaaaagtgatagaccccagaccaacactggatcattataatatggttacatataacttacaaagatgtttacagttctccagatgtcttcttatttggttttctttgtgcaaaataatcaacatgtagcagcactggaaaattcaacaggtcttaaaaacctggcttccttgaatacaaaacaggcttcattttgactatgaagcatttcaatataagcttttccagtgattgaatattcttcttggccctctagaatagacttttcaaacaaacctgggacatagtctagaagtaagtaaagacatataacttaagttggttgcctggggtaacaaaaacaaattgatgtagattgagagtcattttcaaaaaattatttttgcaaatacgttttttatgttctgtggaggaaagcctttaggaactgagccccacatgggggttcctgttggtacccaggtctgtatcagactctgcgatatggaatttcaagagcctcctgactctttccataagttttggaatagatttcccaattatggcaggttcaagagatgtcatatctgacactacacttgtccatttccttagggacttcaatttagaagcacaaaaaaaggaaaagtacagatagagaaataaccattagtggtaataaggagtacaacttca

SEQ ID NO: 700740 - DNA, 2014 bp, Homo sapiens
acttttaactttgagattttttttttttttttttttgagatagagtctcactctgtcactctgtcacctaggacttaggctggagtgctggagtacagtggtgcaatctcagctccctgtaacctccatttccctagttcaaatgattctgctttctcagccacctaagtaactggtattacaggcatacactaccacacccacctaattgttgtatttttagtggagacagggtttcaccatgttggccaggctggtctcaatctcctgaattcaggtgatccacccaactctgcctttcaaagtgcagggattacaggtgtgagccacagcacccagcctgtttttattttcaaatttcacatataacccacattttctacaaacaaatttgtaataaacatctttgaaaatactaaagaaaaaccccggtttttgtcatctgagtcattgtagtcctaacctctttcattttcctgtgcgcgtactcagttatcacagcctcagttcgagaattttgaccagagttaatcacgtatctgtaggcttattgcaatgggacaattcaattctacaaaatcaggtatttgtattttgttattataattacttttcattgaaatttaaacagaagcaaagatattttctctttgctactattttccaggatacacagatccactctttaaaggttatctgaaaatcactgggtaagatatttagatcaggccagagcagcattattaataactgccagaatgaacaaaacttaaatgttagatggttgaactttgggccatataactttttttggtcagcttatctctaggacaaaagaataaaatctccctgccaaaagtttattgatagaataaaggaaaagcaactgtcgttgatccttcatttatctgctcagaggctctcgcttgagtccaacacattctcctgagccacattattatcttattttcatgcctgaatggcagacttcagttgagagccatagggacaattcatgcctaggctagtcagaggcatgggcaaacacataggaggatcttattcctaargaagccaagaaaagctatggcctttcccaagccaaaagtatcggtctagtgagaagctctgagcaagcctcagtaacaatcactgaagtgaatggaaaaacaaaagtggaaaattaagtaaatgtaaatacactttataaaatagtcctcataagaaaagtcagtggcaaaatacaaagataacttgagctctatttccgagttccacaaagctttaattaaaagcagggtactgaaaagttggttgggtaataacacccttccagcttccaaaagtgatagaccccagaccaacactggatcattataatatggttacatataacttacaaagatgtttacagttctccagatgtcttcttatttggttttctttgtgcaaaataatcaacatgtagcagcactggaaaattcaacaggtcttaaaaacctggcttccttgaatacaaaacaggcttcattttgactatgaagcatttcaatataagcttttccagtgattgaatattcttcttggccctctagaatagacttttcaaacaaacctgggacatagtctagaagtaagtaaagacatataacttaagttggttgcctggggtaacaaaaacaaattgatgtagattgagagtcattttcaaaaaattatttttgcaaatacgttttttatgttctgtggaggaaagcctttaggaactgagccccacatgggggttcctgttggtacccaggtctgtatcagactctgcgatatggaatttcaagagcctcctgactctttccataagttttggaatagatttcccaattatggcaggttcaagagatgtcatatctgacactacacttgtccatttccttagggacttcaatttagaagcacaaaaaaaggaaaagtacagatagagaaataaccattagtggtaataaggagtacaacttca

SEQ ID NO: 700741 - DNA, 624 bp, Homo sapiens
taaaagtaattcagtagacatgtcactgttacagaacctgaatatggaatgcattcgatgcttttgtttgattttgttgagacagggtctctctctgttgcccagattggagtgcagtggcatgatcgcacctsgctgcagccttggcctctcaggctcaagcgatcctcctgcctcaacctcccaagtagttgggactacaggcgtgtgccacagtcctggctaattttttgtagatatggggtctcaatatattgcccaggctgaatttgatgttatttcaagttgatttttgtgtgtttggaagtttgtcttgctcctcaactactatgcaggtagacagtcatcccccagagattcactagattgccatatagaggcactttatcatttccctattgttcctaatacagaattgtagagctggaaagtaacttcagttttctaaatctattcctaaacaggatatcactaacttctttagaatcatttctcagtatacatcaacttattgagaactgtctaatactcaaagaaatgaaatcttgagttcagtaagctgtgttccaagcaggaatcattttcacttaccaaaatatctcctattacctcaagctatccttg

SEQ ID NO: 700742 - DNA, 665 bp, Homo sapiens
aacagaactattgacaatttaaagcctgtcatgcaggtcatgtttcaaattgaggctaaaattttcaacagctatagaaacattgtacaatattagtgtttttttttaaagaaaatgttagttcatggagtatactaaatatctgtgatagattaaatatattagttctaatcttacttttgattttgggakcccaaaataaagagagtgttgttttcatggttatgccttgtttgtggagtcaagtgtcgatatacttgaggcatgttatgtgtcttctaattaatatttttatcaccgtgaatttgtgtctcttccaagcattaaacttttactatgtatcttaaattccttattagaaaaatgaaagtgtgaatactttgtttggcttatattttcatttattgtagttgaccacattttatggttcctgagtgccttcacccagctacactttaccttgtatctataaaagtgtaatttagagtaaatacattggctataaagtcgagatcaggtgctctccaccaaaagcaaaacaaaacttctgaaatgtggcaaggtttctcagtgcaagcttaaatatttaaactgttgaccatgtggaaaatactggacaaaggggaagaacaaaacatcatgtgcaatagctagaggttatgcaa

SEQ ID NO: 700743 - DNA, 665 bp, Homo sapiens
aacagaactattgacaatttaaagcctgtcatgcaggtcatgtttcaaattgaggctaaaattttcaacagctatagaaacattgtacaatattagtgtttttttttaaagaaaatgttagttcatggagtatactaaatatctgtgatagattaaatatattagttctaatcttacttttgattttgggagcccaaaataaasagagtgttgttttcatggttatgccttgtttgtggagtcaagtgtcgatatacttgaggcatgttatgtgtcttctaattaatatttttatcaccgtgaatttgtgtctcttccaagcattaaacttttactatgtatcttaaattccttattagaaaaatgaaagtgtgaatactttgtttggcttatattttcatttattgtagttgaccacattttatggttcctgagtgccttcacccagctacactttaccttgtatctataaaagtgtaatttagagtaaatacattggctataaagtcgagatcaggtgctctccaccaaaagcaaaacaaaacttctgaaatgtggcaaggtttctcagtgcaagcttaaatatttaaactgttgaccatgtggaaaatactggacaaaggggaagaacaaaacatcatgtgcaatagctagaggttatgcaa

SEQ ID NO: 700744 - DNA, 1264 bp, Homo sapiens
gtatgatgtggaagcacctgctatgttcagtgtaagaaatattgggaaatactagtcagcaggactccagaaatgaaaatttgtctctgtttgctcaagggtcatttgtttgaagtgaaccttgctgaatgatgaagttgcatttagaaaagtcaagcttattatcgaggatgttcagagcaaaaacgcctaacttgcatggcatggatcttagcagtgacaaaatgtgttccatggtgaaaaaagggcaatgattgcagctcatgttaatgtcaagactgccaatgtcttgcttaccaagactactactacttgctttgcctattctgtgttggtaaaaaacaacagtcggccaggcgctgtggctcacacctgtaatcccagcactttgtgaggctgagacgggcggatcacctgaggtcaggagttcgagaccagcctggctaacatggtgaaaccctgtctctactaaaaaaaaaaaaaaaraaaattagctgggtgtgctggcacataccagttatcccacctacttgggaggctgaggcaggagaattgcttgaacgcaggaggcagaggttgcagtgagccaaggttgcaccactgcactccaacctgggcaagagagcaagactccgtctcaaaaaaaaaaaaaaaaccagtcagatacagaaaacctcttacacacataccaacaagtatgccaaggagatgactgaaaacatgacctgagaggtgcagaaaagtgacttgaaaaggtggtcaataaattgattccagatagcattggaaaagacaaagaaaaggcttaccagtctatttatcctctgcctgatgtcctgattagaaaagtgaaaatgcatgcggggcgcagtggctcacacctgtaatcccagcactttgggaggctgagacgggcggattaccaggtcaggattttgagaccagcctgaccaacatggtgaaaccccatctctactaaaaatagaaaaattagctaggtgtgatggcacgcctgtaatcccagctacgcaggaggctgaagcaggagaatcgcttgaacccgggaggcggacattgcagtgagctgagatagcaccagtgcactccagcctgggcgacagggcaagactccatctcaaaagaaaagcggcccaagtttgaattgggaaaattcattgagcttcatggtcaaggcagtagttctggaaaagctcctggggacaagacaggtgctaaagttgaatgagctgatagatatgaacca

SEQ ID NO: 700745 - DNA, 1264 bp, Homo sapiens
gtatgatgtggaagcacctgctatgttcagtgtaagaaatattgggaaatactagtcagcaggactccagaaatgaaaatttgtctctgtttgctcaagggtcatttgtttgaagtgaaccttgctgaatgatgaagttgcatttagaaaagtcaagcttattatcgaggatgttcagagcaaaaacgcctaacttgcatggcatggatcttagcagtgacaaaatgtgttccatggtgaaaaaagggcaatgattgcagctcatgttaatgtcaagactgccaatgtcttgcttaccaagactactactacttgctttgcctattctgtgttggtaaaaaacaacagtcggccaggcgctgtggctcacacctgtaatcccagcactttgtgaggctgagacgggcggatcacctgaggtcaggagttcgagaccagcctggctaacatggtgaaaccctgtctctactaaaaaaaaaaaaaaagaaaattagctgggtgtgctggcacataccagttatcccacctacttgggaggctgaggcaggagaattgcttgaacgcaggaggcagaggttgcagtgagccaaggttgcaccactgcactccaacctgggcaagagagcaagactccgtctcaaaaaaaaaaaaaaaaccagtcagatacagaaaacctcttacacacataccaacaagtatgccaaggagatgactgaaaacatgacctgagaggtgcagaaaagtgacttgaaaaggtggtcaataaattgattccagatagcattggaaaagacaaagaaaaggcttaccagtctatttatcctctgcctgatgtcctgattagaaaagtgaaaatgcatgcggggcgcagtggctcacacctgtaatcccagcactttgggaggctgagacgggcggattaccaggtcaggatttygagaccagcctgaccaacatggtgaaaccccatctctactaaaaatagaaaaattagctaggtgtgatggcacgcctgtaatcccagctacgcaggaggctgaagcaggagaatcgcttgaacccgggaggcggacattgcagtgagctgagatagcaccagtgcactccagcctgggcgacagggcaagactccatctcaaaagaaaagcggcccaagtttgaattgggaaaattcattgagcttcatggtcaaggcagtagttctggaaaagctcctggggacaagacaggtgctaaagttgaatgagctgatagatatgaacca

SEQ ID NO: 700746 - DNA, 1314 bp, Homo sapiens
aattgccaaacctgccagtgccttgatattggacttctcagcctccagaactgtgaataaatttctgtttatgaattatccagtgtgtgggattctgttatagcagcacaaagagattaagacacatttaaattttaggatttactcaatgccttctgctagactaagatcctttctgcaaatgcaaacacattttttacttcctaggctttaatttaggtttcctttaaatagagtgaaattaccctatttttatgtatttccaattactcaaaagttagatgtggggcagtaaaagagttaaattcattaacagacatctgtggagcagcctttagttaacttaacttgaatgagatagcgtccactgtaacacagatgttttggtcagtagctgggtgttcaaatgcatcctttctatggtgggtcccccgaaaggttacagacttttaacaataatgcatcaagtaattaggcatatattgaagcaattaagttgatgattctggtcatcaaattgttcctggcatcctcagaggaaattcagaggcttgtgaatcaatacaaaggaggttttaagttaatagcaacacagggggattgcacaggtttatctggacattcattttttccagtggtcatgctttactgtggttatatttatgctacatggcccagtggaaagatgcagcctgtacttggggcttttcagagatacccgataaggcaatatttacacccagacttggtaagagggccttgcactttactggcccctacatatcacaaacataagtttaaaaaacaaaattttaacacataaaaaacataaytgaagatcgaattggcttttgttagagatgtatttaggcaacatctcatctaaagatttagcaaaggtgctctgttgggcatggcagaacagtttgtaaacggtagtatgaacaggaacaaggaaatagaataacacaaaaagcagaatggttaacatcaagttacttcaggttactttttttttttctgaaatggagtctcgctctgtcacccaggccaggctggagtacagtagcgtgatcttggctcactgcaacctccgcccccagggttctagcgattctacctcagcctcccaggtagctaggattacaggtgctggccaccatgcccagataatttttttgtatttttagtagagacggggttttgccctgttggccaggctggtctcaaactcctgacctcaggtgatccacctgccttggcctcccaaagtgctaggattacaggagtgagccaccgcgcctcgcccaggtt

SEQ ID NO: 700747 - DNA, 1314 bp, Homo sapiens
aattgccaaacctgccagtgccttgatattggacttctcagcctccagaactgtgaataaatttctgtttatgaattatccagtgtgtgggattctgttatagcagcacaaagagattaagacacatttaaattttaggatttactcaatgccttctgctagactaagatcctttctgcaaatgcaaacacattttttacttcctaggctttaatttaggtttcctttaaatagagtgaaattaccctatttttatgtatttccaattactcaaaagttagatgtggggcagtaaaagagttaaattcattaacagacatctgtggagcagcctttagttaacttaacttgaatgagatagcgtccactgtaacacagatgttttggtcagtagctgggtgttcaaatgcatcctttctatggtgggtcccccgaaaggttacagacttttaacaataatgcatcaagtaattaggcatatattgaagcaattaagttgatgattctggtcatcaaattgttcctggcatcctcagaggaaattcagaggcttgtgaatcaatacaaaggaggttttaagttaatagcaacacagggggattgcacaggtttatctggacattcattttttccagtggtcatgctttactgtggttatatttatgctacatggcccagtggaaagatgcagcctgtacttggggcttttcagagatacccgataaggcaatatttacacccagacttggtaagagggccttgcactttactggcccctacatatcacaaacataagtttaaaaaacaaaattttaacacataaaaaacataactgaagatcgaattggcttttgttagagatktatttaggcaacatctcatctaaagatttagcaaaggtgctctgttgggcatggcagaacagtttgtaaacggtagtatgaacaggaacaaggaaatagaataacacaaaaagcagaatggttaacatcaagttacttcaggttactttttttttttctgaaatggagtctcgctctgtcacccaggccaggctggagtacagtagcgtgatcttggctcactgcaacctccgcccccagggttctagcgattctacctcagcctcccaggtagctaggattacaggtgctggccaccatgcccagataatttttttgtatttttagtagagacggggttttgccctgttggccaggctggtctcaaactcctgacctcaggtgatccacctgccttggcctcccaaagtgctaggattacaggagtgagccaccgcgcctcgcccaggtt

SEQ ID NO: 700748 - DNA, 980 bp, Homo sapiens
ataagccataacctcttccattttgtaaaattaatactctgtacaatcaggattaagagacagccacatttgagccataagtgaatttaatactgcttttcaacacaaagaaatggtttccaaatatttgtattagttcgttgtaggtacagtatacattttatgggtggtctgactaatgccactttgtaaaccctgtataatagtcattactaaacaaacttcagttatttttaagtaaatcatatttcgaacaattattccaacaagtttaagccttaagtaaatcatcttttgaacaattcttccaacaaagcttgtcagaattttgtataaactgataaaaagtacaatattttacaaatttttttaaaaatcagtgccactaaatatttttcacctgtaattttttaacccattaaggaaagtaggaataaaatctattttagtcacttttacatagaaaatagcaggatatatatatatrgttttgaaaaattatatgccgaaagtaatatttttaaacaaatgataaatattcataatggaggtaatgtttgtatgcacatactgtaatttaatgagtaaagcagtttctgcctggtatttagtttagatgttcaaatctggggcacttatactttattctgcaagcattttccctacctggtgataggtacaacactttctaagaagaatgtttatggtgattttaaggtataggttttatatttttgcagagatggtcatggatctaagtatgaataacagttttgatatcagatctaagagtaaaatgtaatttatatttggatttactccattacataaatcccctgttccacccagcctcaatggatactggctagttctcaaatagttttttttttttttttgagaaatgcttgtttagtataagattaaatagcttctctgatcatactagaatggcaaatacgtatctgtttattaaaacaaaa

SEQ ID NO: 700749 - DNA, 579 bp, Homo sapiens
gaggtcaagagatccagaccatcctggctaacacggtgaaaccccgtctctactaaaaatacaaaaaaattagccgggcgtggtggcgggcgcctgtggtcccagctactcaggaggctgaggcaggagaatggtgtgaacccgggaggcggagcttgcagtgagccgagaatgcgccactgcactccagcctgggcgacagagtgcgacaccgtctcmaaaaaaaaaaaaaaaagagaaaagaaaacttttattagagataataagttcaaaatataaacaggtaaggtagaaatggtacacacgaataacaaacataaaagtacagatggaactgtgttaggaggcaggactcaactctggaggtggagctcagataccagacaaaattgaggactaagacaaggactgggcggaagtagctttcctgaagacatgctcactagtgtgccatgtcagtttaccattgcaatggcagcacctgcgagcgaccaccgcctttccaggcaataacccgatgacccagaagttactacccttttccgggaaatttctacctaaatcaccccttgatctgta

SEQ ID NO: 700750 - DNA, 579 bp, Homo sapiens
gaggtcaagagatccagaccatcctggctaacacggtgaaaccccgtctctactaaaaatacaaaaaaattagccgggcgtggtggcgggcgcctgtggtcccagctactcaggaggctgaggcaggagaatggtgtgaacccgggaggcggagcttgcagtgagccgagaatgcgccactgcactccagcctgggcgacagagtgcgacaccgtctcaaaaaaaaaaaaaaaaagagaaaagaaaacttttattagagataataagttcaaaatataaacaggtaaggtagaaatggtacacacgaataacaaacataaaagtacagatggaactgtgttaggaggcaggactcawctctggaggtggagctcagataccagacaaaattgaggactaagacaaggactgggcggaagtagctttcctgaagacatgctcactagtgtgccatgtcagtttaccattgcaatggcagcacctgcgagcgaccaccgcctttccaggcaataacccgatgacccagaagttactacccttttccgggaaatttctacctaaatcaccccttgatctgta

SEQ ID NO: 700751 - DNA, 1679 bp, Homo sapiens
ttttccttcttcataatttcacaaatttgttcttttcacttaacaacctatgattatttgaatataagccaggtactaattatctaagagatattcactaagtgattatttttcatcgcttaacaatctatgatcttttttcctttagtcaagaacttttatcttttcacttaaagaaagcactttaagccttctctttggcatatgtgaatggtcagcatcattactctcatgttttggggtcacgattaagtaaaataaaggtttcttgaacataaacattgagatactgtgatggttgatctgataatctagagagctaagcaagtgactaacagtttggtatgtatacagtgtggctacactggcccagggatgactgacatcctgaattggaaatttgaaacttacaaatcatttatttttggaatttttcagttagtattttcagacttcagttgacctcaggaaactgaaaccatcaaaaggggactactgcataagaaaatgtattaaaactgaaaagcatgaatttccagattgcaaaactcatttgtttctaactcagtaaatgaaaataaacaaaacaaataaaaacatcaacctcaaagtttacccttattaaatttcaacaactaggagattgacagaatatcctaaaaaacagcaaaagtgagaaagagaaatctttccaacataaatcttaccctgttaatttttatcatttgttgggtaaataaattaacagttacataaagtctcagatttttatatttattttttgcattgtctgttatttaacactatccctttcgcttcacattctcctatacatcttgtgggataaaactgtgaatgagattttctagaccctcttgccagtaaaatttcagttagatgctgccattgatgtactattaygggagcagtgggcagatgcgaggacagagagaaccaagtttgcagtggattctgtgctaattgctccaaatcactcattttggttatttaagcaacaaactccttacacttcagttctcctggaagccacaaactgattttaccttgaactttgctcttccagctttagcatgcttggaatctagattgctttcagttttcctgatgacgccctatgtaacacatatcccatgcaaacattcctaggaagattaaatgaagaagagaggaagaggaggaggaaggaaggaaagaaggaaggaaggaaagaaggaaggaaggaaagaatgaaggaaggaaagaaggaaggaaggaagaaagggagggagggagggagggagggaaaaaataaggtaattttattattttatttatttatttattggagaccgagtctcgctctgtcacccaggctggagtgcagtggcaggatctcggctcactgcaacctccgcctccagggttcaagcaattctcctgcctcgacatcctgagtagctgggattacaggcacacactgcatgcccggctaattttttgtatttttagtagagacggaatttcaccgtgttgcccaggctagtctcgaactcttgagctcaagtaatctccccgccttggccttccaaagtgctaggattacaggcgggagccaccacacccggcaaaaataaggtaattttaaatatcaaaagtagagaggttgctcaataaaggaa

SEQ ID NO: 700752 - DNA, 1185 bp, Homo sapiens
tatctatgctgttagaagtcaaagtagtatgacttaggataagtagatattaacagagagcaccagggagcttataggagaatgataaagttcagtttattaatctggatttagactcatgaatgtgcttagtttgtgaaaatttatctacctttatgaaacatacagtaatctgtacatatgttrcatttcagtaaaaatccaagcaaaacaaaattttaaaattaagtagtcacatacatacaaaacgcacatatgtacatttgtctttcttagttccggccaatgaaaatttctggaaattatgaataatcagtatgagtttccttggtatccagaatgtactctttgaatgacacttctcattgaatgtaatcagatcttgatagagaagtggctgattacaatgtggaaagcgtaagagtaattgatgactactagcatcacaatcagagtgctaaaagttcatttatagagtttctcattggctagatgtggggcaacttgagcaatccaaaggaattctaagagcaataaattacagtacataagatatataaaaaacatgagtttgaaataaatttaaaaagaaaatctatttcccccacccctgctttggagaaaacaaaggaaatcaactaatcatcttggcaactggtaaatatagggaaataaacatgcattatatttttcattcatgaattctgcattggggtaactaaataattggtgaagaaaaatttgtgtttatagaagcattccagtaataaataaagacagattcataaaattaagagtgtaaagttatcttgagattaaaaaatataacattgagagctactgaaacagacaatgtagaacaagaatgtgaattcttgtgagggaggacttaaacaggaataaagggcatgagagggttagccctgcagtactcaaaacaattattgccagagaggttaagaatggtagatgtcccgggcacttttgaattttgaaatgataaagcctgagagatgtgtgacttatttatacaacacgggttctctcttggctcactgtgaaaagctaaatcttattttgagtgtggatactctgacttcacttttataatagacttgagaactcagtgaaagccagaggttactctaaacatgatcctccttacaatttagtgacgttttatcc

SEQ ID NO: 700753 - DNA, 1440 bp, Homo sapiens
gactattatagccatgtgaattaactgtagcaaagtgccctttttcttcaaattgctccccctccccaggatgacacacttcatgtcatagctgaaccctactctactggattcaaggccagtaaatgcaatttagagaagcagttttatgtttgcagatattctgagtctcttcaggatgtgtttcgtgtctaccatatatgcaggataaattctttaacagcaaactccaaaggaatgttgaagctgttttagcaatgaggatttttttgtttgagtgttgaagtgggccatagtcctttagaaatgatgttcatttatgataggatttaacttctaaggcatagtttattttttcctctttcctttttgtttgttttaatgtattctttagcatgtttttgatataacttttatcctccagatcttaagctttcttttgctctcttcagcaatttaagagactattaagctgtcrtcttcctaaaagctattttggtatccactctttttaaaaaaattctccaactttgtgattttttaatgattaaggtaatttgttagctctgcccctcatcttctaaaacctttgtaataaaatgtattaatcatgttatttgatcctttcatttacttttgtaaacacgagccctaatatcttacttagaccaaaaaaaaaaaaaaaaaatagcaaagcaaagccataacatagattagtataaagactgtttctatgtaatcttctttggggcaggagtcagttagtaagcaaggaagagaaataaatttggtttaaaaaggtataccaacagcactacaatgttactctgcctatattctgtcttaatatgatcagaaagtttttgaatattcctttttaaagacaaatttcaccctttccagcttgaatatttctgaagtttcagaaaaacagttgccttctggttacaaaggctggtgtcaccagttctgaattgttgcctcaagcttggttgatgtgtctgaacctgtatcccttgagggcaaagtttagaaactggtcactctgcctactgtctgttcagcctcttgtacaatggcagtttggcagctttaaatccttaacctagaaatgtatttaaggtttttctttcaagaaatggggtatacatatgaaggagagagtaacaactctttttatacacctattcagatttcagccctgaatttggcaaattttagattaggtctcacataaggtaaatatgactcactaactctttttttctcatcttccccacccccccatatatatttatttattttaatggagttagggaccactagtgaaatgatgaaaggcccaattctgagtaacaattgtctactcttcacgtaaaatatactgaaaaagaattaagattccttgatccagtagacatagagaaacataaacattca

SEQ ID NO: 700754 - DNA, 1440 bp, Homo sapiens
gactattatagccatgtgaattaactgtagcaaagtgccctttttcttcaaattgctccccctccccaggatgacacacttcatgtcatagctgaaccctactctactggattcaaggccagtaaatgcaatttagagaagcagttttatgtttgcagatattctgagtctcttcaggatgtgtttcgtgtctaccatatatgcaggataaattctttaacagcaaactccaaaggaatgttgaagctgttttagcaatgaggatttttttgtttgagtgttgaagtgggccatagtcctttagaaatgatgttcatttatgataggatttaacttctaaggcatagtttattttttcctctttcctttttgtttgttttaatgtattctttagcatgtttttgatataacttttatcctccagatcttaagctttcttttgctctcttcagcaatttaagagactattaagctgtcatcttcctaaaagctattttggtatccactctttttaaaaaaattctccaactttgtgrttttttaatgattaaggtaatttgttagctctgcccctcatcttctaaaacctttgtaataaaatgtattaatcatgttatttgatcctttcatttacttttgtaaacacgagccctaatatcttacttagaccaaaaaaaaaaaaaaaaaatagcaaagcaaagccataacatagattagtataaagactgtttctatgtaatcttctttggggcaggagtcagttagtaagcaaggaagagaaataaatttggtttaaaaaggtataccaacagcactacaatgttactctgcctatattctgtcttaatatgatcagaaagtttttgaatattcctttttaaagacaaatttcaccctttccagcttgaatatttctgaagtttcagaaaaacagttgccttctggttacaaaggctggtgtcaccagttctgaattgttgcctcaagcttggttgatgtgtctgaacctgtatcccttgagggcaaagtttagaaactggtcactctgcctactgtctgttcagcctcttgtacaatggcagtttggcagctttaaatccttaacctagaaatgtatttaaggtttttctttcaagaaatggggtatacatatgaaggagagagtaacaactctttttatacacctattcagatttcagccctgaatttggcaaattttagattaggtctcacataaggtaaatatgactcactaactctttttttctcatcttccccacccccccatatatatttatttattttaatggagttagggaccactagtgaaatgatgaaaggcccaattctgagtaacaattgtctactcttcacgtaaaatatactgaaaaagaattaagattccttgatccagtagacatagagaaacataaacattca

SEQ ID NO: 700755 - DNA, 1440 bp, Homo sapiens
gactattatagccatgtgaattaactgtagcaaagtgccctttttcttcaaattgctccccctccccaggatgacacacttcatgtcatagctgaaccctactctactggattcaaggccagtaaatgcaatttagagaagcagttttatgtttgcagatattctgagtctcttcaggatgtgtttcgtgtctaccatatatgcaggataaattctttaacagcaaactccaaaggaatgttgaagctgttttagcaatgaggatttttttgtttgagtgttgaagtgggccatagtcctttagaaatgatgttcatttatgataggatttaacttctaaggcatagtttattttttcctctttcctttttgtttgttttaatgtattctttagcatgtttttgatataacttttatcctccagatcttaagctttcttttgctctcttcagcaatttaagagactattaagctgtcatcttcctaaaagctattttggtatccactctttttaaaaaaattctccaactttgtgattttttaatgattaaggtaatttgttagctctgcccctcatcttctaaaacctttgtaataaaatgtattaatcatgttatttgatcctttcatttacttttgtaaacacgagccctaatatcttacttagaccaaaaaaaaaaaaaaaaaatagcaaagcaaagccataacatagattagtataaagactgtttctaygtaatcttctttggggcaggagtcagttagtaagcaaggaagagaaataaatttggtttaaaaaggtataccaacagcactacaatgttactctgcctatattctgtcttaatatgatcagaaagtttttgaatattcctttttaaagacaaatttcaccctttccagcttgaatatttctgaagtttcagaaaaacagttgccttctggttacaaaggctggtgtcaccagttctgaattgttgcctcaagcttggttgatgtgtctgaacctgtatcccttgagggcaaagtttagaaactggtcactctgcctactgtctgttcagcctcttgtacaatggcagtttggcagctttaaatccttaacctagaaatgtatttaaggtttttctttcaagaaatggggtatacatatgaaggagagagtaacaactctttttatacacctattcagatttcagccctgaatttggcaaattttagattaggtctcacataaggtaaatatgactcactaactctttttttctcatcttccccacccccccatatatatttatttattttaatggagttagggaccactagtgaaatgatgaaaggcccaattctgagtaacaattgtctactcttcacgtaaaatatactgaaaaagaattaagattccttgatccagtagacatagagaaacataaacattca

SEQ ID NO: 700756 - DNA, 1440 bp, Homo sapiens
gactattatagccatgtgaattaactgtagcaaagtgccctttttcttcaaattgctccccctccccaggatgacacacttcatgtcatagctgaaccctactctactggattcaaggccagtaaatgcaatttagagaagcagttttatgtttgcagatattctgagtctcttcaggatgtgtttcgtgtctaccatatatgcaggataaattctttaacagcaaactccaaaggaatgttgaagctgttttagcaatgaggatttttttgtttgagtgttgaagtgggccatagtcctttagaaatgatgttcatttatgataggatttaacttctaaggcatagtttattttttcctctttcctttttgtttgttttaatgtattctttagcatgtttttgatataacttttatcctccagatcttaagctttcttttgctctcttcagcaatttaagagactattaagctgtcatcttcctaaaagctattttggtatccactctttttaaaaaaattctccaactttgtgattttttaatgattaaggtaatttgttagctctgcccctcatcttctaaaacctttgtaataaaatgtattaatcatgttatttgatcctttcatttacttttgtaaacacgagccctaatatcttacttagaccaaaaaaaaaaaaaaaaaatagcaaagcaaagccataacatagattagtataaagactgtttctatgtaatcttctttggggcaggagtcagttagtaagcaaggaagagaaataaatttggtttaaaaaggtataccaacagcactacaatgttactctgcctatattctgtcttaatatgatcagaaagtttttgaatattcctttttaaagacaaatttcaccctttccagcttgaatatttctgaagtttcagaaaaacagttgccttctggttacaaaggctggtgtcaccagttctgaattgttgcctcaagcttggttgatgtgtctgaacctgtatcccttgagggcaaagtttagaaactggtcactctgcctactgtctgttcagcctcttgtacaatggcagtttggcagctttaaatccttaacctagaaatgtatttaaggtttttctttcaagaaatggggtatacatatgaaggagagagtaacaactctttttatacacctattcagatttcagccctgaatttggcaaattttagattaggtctcacataaggtaaatatgactcactaactctttttttctcatcttccccacccccccatatatatttatttattttaatggagttagggaccactagtgaaatgatgaaaggcccaattctgagtaacaattgtctactcttcacrtaaaatatactgaaaaagaattaagattccttgatccagtagacatagagaaacataaacattca

SEQ ID NO: 700757 - DNA, 593 bp, Homo sapiens
gtgagttccaaaattattaaaagtctagttgctcaattaggataggagcagacctctgtggagagtaagtctagttaatgtttgagatacacctttctacaagtggttttaggtggaagctgggttgaccacagtggagacacatgcgacaggtgaggtccctctagggccagtcttcagagattagcatgaaggctacagggtgtcatcctgtcacaggatgacagagcacagagtctgagctctctgtgtttggagaggtggctgacgagtgtagctctgcctaagctctcctggtgtctgttaaactcttgagtgtatatgtatttttgaagtccagtagttgaggtcggtaacttggtaattygcatatggggagtctgataaggtttaatgtaacagtcccaaggggaggggggctcaccccaagttctcacatatggaatctgataaagcgtcatactcttgaagggaggggggatttcactccaaaacatcaaatggtgtaaaaagctacattacaaaagaagtcattttcccaacttgactgtgaatgtaccaatatgtttaattttttaaagcgcatttgtaag

SEQ ID NO: 700758 - DNA, 593 bp, Homo sapiens
gtgagttccaaaattattaaaagtctagttgctcaattaggataggagcagacctctgtggagagtaagtctagttaatgtttgagatacacctttctacaagtggttttaggtggaagctgggttgaccacagtggagacacatgcgacaggtgaggtccctctagggccagtcttcagagattagcatgaaggctacagggtgtcatcctgtcacaggatgacagagcacagagtctgagctctctgtgtttggagaggtggctgacgagtgtagctctgcctaagctctcctggtgtctgttaaactcttgagtgtatatgtatttttgaagtccagtagttgaggtcggtaacttggtaattcgcatatggggagtctgataaggtttaatgtaacagtcccaaggggaggggggctcacmccaagttctcacatatggaatctgataaagcgtcatactcttgaagggaggggggatttcactccaaaacatcaaatggtgtaaaaagctacattacaaaagaagtcattttcccaacttgactgtgaatgtaccaatatgtttaattttttaaagcgcatttgtaag

SEQ ID NO: 700759 - DNA, 637 bp, Homo sapiens
agacaactgggttaagggctgggagaacaaaatgcagaatatgtgattcctgtcccagaggagctcacactcgtgccagtggctgagcagtctctgcattgtagctgcaaagccctctgagaaagtgaggtaagagaccagcaggacttgttttctggtcaccaccctgctgttctattctggacaggaactggtccagatagggtaaagtttaaaaaaccagcagaaaccagcagatggtgacaaaggtgatctctagttgccctcattgctcattggcataagacactcccaccaacgccatgacagtttacaaatgccatggtaacaactcagaaattaccaccccctttctagaaatttctgaataacctgccccttaatttgcaggtaattaaaaatggatataaatacagctagccagcagcccacaagtaccaactctgggygcattgcccatgaaccctgccctgcaaggagcagtaccattcaataaatgatcactgtctaacaccactggctcacccttgagttctttcccaggtgaagcaaaatccctcctgggctaagccccaattttggggcttgcctgtcctgcaacatgtagcaaccacaaagggatgaatacagcgatcag

SEQ ID NO: 700760 - DNA, 655 bp, Homo sapiens
gagcacccacacagccttccctgagagcgccataggacccttctcctgggcctctcttccactgctgtctgcagtccaggggctggcaccaccagtcaagaggctgatgacttacctaaaaccacacaggtaatggctaattattgtacaacagagatgtgtaacaaacaactgaattaccctagcagcrtacaacaacaagcatttcattttactagccacctgtgggccagctgggcagttacggtctcaactgagcagttctactggtctgagctgggatcacggggttcacttaggtgttgtgagattttttaaataataaaatagaattccaaatacaattgcatttatggaaaatattgtatttactccaaacaaattgatgcacacatgttttggcgataaggaaagattttacatttgttgtttgtgataaaattaagaatattatttatttttttaaaggtgcataaacccatcactcttctgcaattatttccatgtttgtgtattctcttgtatacaagagaatttttgtaaaaaacaaagggttgttataatatatatcccattttatattctgctttttcatattttcaaatctccctattatcaattgtgagttgactagagattggatgtgtggctttac

SEQ ID NO: 700761 - DNA, 1365 bp, Homo sapiens
gtggaaaaagacaggcacttccctccccaccttcccaggaggtgacatggtctttttctctatggagaaactaaaagtaaccaaaaaatttcttgccttccttgtcctcatcattttattattctttatgaatatatcttctatataaattttagaatcatcttatcaatttaaataaagaacactgagaatactgatacatgaatctagggagagatcaatatattggtaaatatcctgcatatttttgctagacgttttcctggtatttgatatgatactagactattatcaatgatgatttatcttcaccttttctaattgtttgctacaaatataaaaatgcaaataattggctctctctcctttctctcctgtttgcctccttcgcatcttcaaccctcactagaaaggggccaactagtctccacctcttctataacccattgacatttctctctcccgaatcattcttcagaaacagctgtctgtctctacaagccctaatgatatctccatcatcaagttcagtggcctcatgtcagctcatgtccatgccttcctcactttctctgacttatctgatattgttgactggtctcttctcttgtcttctggtaaaccattctcaattttgccccttatctctctgattgcctttcacgagtctttactctctttcttaagcatagttcaacccaggagctcrtcctctctcctgttctggtgctcaagtcttgaatgttgattgttataaatgatttggatgagactgcaatggttttaactggtatttgtgctataacaatgtttttacattcaaccaagcatatattatagagtgtaaaagctgaatttcaaaataaggtcttcaaggagattttgcacttggagtaaacatctgcacttcatgttaccaattcacactccagttctatttagatatattttggtgggaagttttcagaagcatcctagacaatcaaattttcatttttcaagttgtaataggaaatccagactcaacactccccttctgcaattctattccttctatattcatgctactttcaatcaaactgaacttgggcatatccaacatgagcctgactggagtcatgaatgttgagaaagaacataacagtctaaactgggtggtctgaaacatgtcattcatatgtatgaatacatagatttgattcccttttagccgatttttgaaactaaatgaaatgtcaaagagcaaggtcttgctgtggactcccatgggggtgaaataagcatgagagaatcaagctaggatagaattggagagacacattcagttaatttttaaatggtttcatttgcctattatacttgtaa

SEQ ID NO: 700762 - DNA, 1365 bp, Homo sapiens
gtggaaaaagacaggcacttccctccccaccttcccaggaggtgacatggtctttttctctatggagaaactaaaagtaaccaaaaaatttcttgccttccttgtcctcatcattttattattctttatgaatatatcttctatataaattttagaatcatcttatcaatttaaataaagaacactgagaatactgatacatgaatctagggagagatcaatatattggtaaatatcctgcatatttttgctagacgttttcctggtatttgatatgatactagactattatcaatgatgatttatcttcaccttttctaattgtttgctacaaatataaaaatgcaaataattggctctctctcctttctctcctgtttgcctccttcgcatcttcaaccctcactagaaaggggccaactagtctccacctcttctataacccattgacatttctctctcccgaatcattcttcagaaacagctgtctgtctctacaagccctaatgatatctccatcatcaagttcagtggcctcatgtcagctcatgtccatgccttcctcactttctctgacttatctgatattgttgactggtctcttctcttgtcttctggtaaaccattctcaattttgccccttatctctctgattgcctttcacgagtctttactctctttcttaagcatagttcaacccaggagctcgtcctctctcctgttctggtgctcaagtcttgartgttgattgttataaatgatttggatgagactgcaatggttttaactggtatttgtgctataacaatgtttttacattcaaccaagcatatattatagagtgtaaaagctgaatttcaaaataaggtcttcaaggagattttgcacttggagtaaacatctgcacttcatgttaccaattcacactccagttctatttagatatattttggtgggaagttttcagaagcatcctagacaatcaaattttcatttttcaagttgtaataggaaatccagactcaacactccccttctgcaattctattccttctatattcatgctactttcaatcaaactgaacttgggcatatccaacatgagcctgactggagtcatgaatgttgagaaagaacataacagtctaaactgggtggtctgaaacatgtcattcatatgtatgaatacatagatttgattcccttttagccgatttttgaaactaaatgaaatgtcaaagagcaaggtcttgctgtggactcccatgggggtgaaataagcatgagagaatcaagctaggatagaattggagagacacattcagttaatttttaaatggtttcatttgcctattatacttgtaa

SEQ ID NO: 700763 - DNA, 1365 bp, Homo sapiens
gtggaaaaagacaggcacttccctccccaccttcccaggaggtgacatggtctttttctctatggagaaactaaaagtaaccaaaaaatttcttgccttccttgtcctcatcattttattattctttatgaatatatcttctatataaattttagaatcatcttatcaatttaaataaagaacactgagaatactgatacatgaatctagggagagatcaatatattggtaaatatcctgcatatttttgctagacgttttcctggtatttgatatgatactagactattatcaatgatgatttatcttcaccttttctaattgtttgctacaaatataaaaatgcaaataattggctctctctcctttctctcctgtttgcctccttcgcatcttcaaccctcactagaaaggggccaactagtctccacctcttctataacccattgacatttctctctcccgaatcattcttcagaaacagctgtctgtctctacaagccctaatgatatctccatcatcaagttcagtggcctcatgtcagctcatgtccatgccttcctcactttctctgacttatctgatattgttgactggtctcttctcttgtcttctggtaaaccattctcaattttgccccttatctctctgattgcctttcacgagtctttactctctttcttaagcatagttcaacccaggagctcgtcctctctcctgttctggtgctcaagtcttgaatgttgattgttayaaatgatttggatgagactgcaatggttttaactggtatttgtgctataacaatgtttttacattcaaccaagcatatattatagagtgtaaaagctgaatttcaaaataaggtcttcaaggagattttgcacttggagtaaacatctgcacttcatgttaccaattcacactccagttctatttagatatattttggtgggaagttttcagaagcatcctagacaatcaaattttcatttttcaagttgtaataggaaatccagactcaacactccccttctgcaattctattccttctatattcatgctactttcaatcaaactgaacttgggcatatccaacatgagcctgactggagtcatgaatgttgagaaagaacataacagtctaaactgggtggtctgaaacatgtcattcatatgtatgaatacatagatttgattcccttttagccgatttttgaaactaaatgaaatgtcaaagagcaaggtcttgctgtggactcccatgggggtgaaataagcatgagagaatcaagctaggatagaattggagagacacattcagttaatttttaaatggtttcatttgcctattatacttgtaa

SEQ ID NO: 700764 - DNA, 1365 bp, Homo sapiens
gtggaaaaagacaggcacttccctccccaccttcccaggaggtgacatggtctttttctctatggagaaactaaaagtaaccaaaaaatttcttgccttccttgtcctcatcattttattattctttatgaatatatcttctatataaattttagaatcatcttatcaatttaaataaagaacactgagaatactgatacatgaatctagggagagatcaatatattggtaaatatcctgcatatttttgctagacgttttcctggtatttgatatgatactagactattatcaatgatgatttatcttcaccttttctaattgtttgctacaaatataaaaatgcaaataattggctctctctcctttctctcctgtttgcctccttcgcatcttcaaccctcactagaaaggggccaactagtctccacctcttctataacccattgacatttctctctcccgaatcattcttcagaaacagctgtctgtctctacaagccctaatgatatctccatcatcaagttcagtggcctcatgtcagctcatgtccatgccttcctcactttctctgacttatctgatattgttgactggtctcttctcttgtcttctggtaaaccattctcaattttgccccttatctctctgattgcctttcacgagtctttactctctttcttaagcatagttcaacccaggagctcgtcctctctcctgttctggtgctcaagtcttgaatgttgattgttataaatgatttggatgagactgcaatggttttaactggtatttgtgctataacaatgtttttacattcaaccaagcatatattatagagtgtaaaagctgaatttcaaaataaggtcttcaaggagattttgcacttggagtaaacatctgcacttcatgttaccaattcacactccagttctatttagatatattttggtgggaagttttcagaagcatcctagacaatcaaattttcatttttcaagttgtaataggaaatccagactcaacactccccttctgcaattctattccttctatattcatgctactttcaatcaaactgaacttgggcatatccaacatgagcctgactggagtcatgaatgttgagaaagaacataacagtctaaactgggtggtctgaaacatgtcattcatatgtatgaatacrtagatttgattcccttttagccgatttttgaaactaaatgaaatgtcaaagagcaaggtcttgctgtggactcccatgggggtgaaataagcatgagagaatcaagctaggatagaattggagagacacattcagttaatttttaaatggtttcatttgcctattatacttgtaa

SEQ ID NO: 700765 - DNA, 1365 bp, Homo sapiens
gtggaaaaagacaggcacttccctccccaccttcccaggaggtgacatggtctttttctctatggagaaactaaaagtaaccaaaaaatttcttgccttccttgtcctcatcattttattattctttatgaatatatcttctatataaattttagaatcatcttatcaatttaaataaagaacactgagaatactgatacatgaatctagggagagatcaatatattggtaaatatcctgcatatttttgctagacgttttcctggtatttgatatgatactagactattatcaatgatgatttatcttcaccttttctaattgtttgctacaaatataaaaatgcaaataattggctctctctcctttctctcctgtttgcctccttcgcatcttcaaccctcactagaaaggggccaactagtctccacctcttctataacccattgacatttctctctcccgaatcattcttcagaaacagctgtctgtctctacaagccctaatgatatctccatcatcaagttcagtggcctcatgtcagctcatgtccatgccttcctcactttctctgacttatctgatattgttgactggtctcttctcttgtcttctggtaaaccattctcaattttgccccttatctctctgattgcctttcacgagtctttactctctttcttaagcatagttcaacccaggagctcgtcctctctcctgttctggtgctcaagtcttgaatgttgattgttataaatgatttggatgagactgcaatggttttaactggtatttgtgctataacaatgtttttacattcaaccaagcatatattatagagtgtaaaagctgaatttcaaaataaggtcttcaaggagattttgcacttggagtaaacatctgcacttcatgttaccaattcacactccagttctatttagatatattttggtgggaagttttcagaagcatcctagacaatcaaattttcatttttcaagttgtaataggaaatccagactcaacactccccttctgcaattctattccttctatattcatgctactttcaatcaaactgaacttgggcatatccaacatgagcctgactggagtcatgaatgttgagaaagaacataacagtctaaactgggtggtctgaaacatgtcattcatatgtatgaatacatagatttgattcccttttagccratttttgaaactaaatgaaatgtcaaagagcaaggtcttgctgtggactcccatgggggtgaaataagcatgagagaatcaagctaggatagaattggagagacacattcagttaatttttaaatggtttcatttgcctattatacttgtaa

SEQ ID NO: 700766 - DNA, 1365 bp, Homo sapiens
gtggaaaaagacaggcacttccctccccaccttcccaggaggtgacatggtctttttctctatggagaaactaaaagtaaccaaaaaatttcttgccttccttgtcctcatcattttattattctttatgaatatatcttctatataaattttagaatcatcttatcaatttaaataaagaacactgagaatactgatacatgaatctagggagagatcaatatattggtaaatatcctgcatatttttgctagacgttttcctggtatttgatatgatactagactattatcaatgatgatttatcttcaccttttctaattgtttgctacaaatataaaaatgcaaataattggctctctctcctttctctcctgtttgcctccttcgcatcttcaaccctcactagaaaggggccaactagtctccacctcttctataacccattgacatttctctctcccgaatcattcttcagaaacagctgtctgtctctacaagccctaatgatatctccatcatcaagttcagtggcctcatgtcagctcatgtccatgccttcctcactttctctgacttatctgatattgttgactggtctcttctcttgtcttctggtaaaccattctcaattttgccccttatctctctgattgcctttcacgagtctttactctctttcttaagcatagttcaacccaggagctcgtcctctctcctgttctggtgctcaagtcttgaatgttgattgttataaatgatttggatgagactgcaatggttttaactggtatttgtgctataacaatgtttttacattcaaccaagcatatattatagagtgtaaaagctgaatttcaaaataaggtcttcaaggagattttgcacttggagtaaacatctgcacttcatgttaccaattcacactccagttctatttagatatattttggtgggaagttttcagaagcatcctagacaatcaaattttcatttttcaagttgtaataggaaatccagactcaacactccccttctgcaattctattccttctatattcatgctactttcaatcaaactgaacttgggcatatccaacatgagcctgactggagtcatgaatgttgagaaagaacataacagtctaaactgggtggtctgaaacatgtcattcatatgtatgaatacatagatttgattcccttttagccgatttttgaaactaaatgaaatgtcaaagagcaaggtcttgctgtggactcccatgggggtgaaataagcrtgagagaatcaagctaggatagaattggagagacacattcagttaatttttaaatggtttcatttgcctattatacttgtaa

SEQ ID NO: 700767 - DNA, 912 bp, Homo sapiens
gtctgcccttttgattgtgatacagattttttctctgcactgttatattaatatgcatgttaatatcataacattgatatagtaatattaatgttatgttaatataatatttatatagtattatataatattactatatcaatactgtattaaaatatttttctattgaaatattatgacttagttaataaaggttatttctacactgtgtggtggggagaaacactctgtttcccaatgataataggtttcccaactttaaaacaccagctctgtgaaccttggtctatctacaactcttcctttcactcaccttcctccccacttctagattacacaatcggttgtccattctacctctgaataccttcaccaccatctcttccttgccattcccactgccactacctatctcatgccatagcccccactccctgtcacatcaaatgtgagctcactggcctgaaacccaagacctccataggatatcctcagcctacctaccaaaccctatttcttccaccaccctaccactccttacattctaatcaaactaactattctcccaatatgactagagtgaaaaagaaaggttatcttaygtgtagcccaccacttctacctctctgtgcctctgctcatataattccctattactaatatactctccttatgcacctggtccagtgaatatctatctagcccggaaagttcatcttaaatctgccctctgggcccagcacaatggctcatgcctataatcccagcactttgggaagccaaggcaagtggatcgcttgcacctgggagttcaagaagagcctgggcaacatggcaaaatcccatctcttcaaaaaattatccaggcatagtggcatgcacctgtagccccaactatctgggaggctgagg

SEQ ID NO: 700768 - DNA, 557 bp, Homo sapiens
acaaccaacaccaaaatatattctagtaaaattactggacttttaagagaaagaagaaatttgagggacacctaggcaaatgaacacataccttagaaagaaaattaaattggcttcagagtttttcacagtgacatttacggaaggagaaaattgacccacatatttaatgttcccaaagaaagaaactgtgagctaaggattttacatcctacagagcttattttccaagaataaagggtacagaaaagtcattaccaacaactgaggaaatattgttcccataaaccccaccccccctccacaaggactctgctaaaatcaagcttgagacaatgaaaatgacgagaaagacatcaacataaggactgctggtgagcactaagcatgtgataactcacagcaggcatactaagtgagcattagaaaggagaaaatctaatatgcaaatggctstatgaccagacaattacgatatagtacaaccagaaaaatgtgggagagtgaggactgcattactaaataacaataataataaataataataaacaataaat

SEQ ID NO: 700769 - DNA, 1096 bp, Homo sapiens
agttctttcttttctcttctgcccacatcagatgcctgataaagttgggtggaaatggctgaattagcaccgaacaccatatcatgagacaagggcagggggaagaagataaagagtctgtctcttcttttgccttttttctgaggggacaggcaaaacttttccaagaaacagtttgcagattcttcctcaagtcacgtgcttatttttaaacaaatcgccatttagggaaatgtgattcctcttagtgaattacacccactcctagagcaggagggaggggaattcaacctctattaagtcacacagctagctgcrcagggttgactaaatacctgagtaatatcaaagttctattagaatggaaaaagaagggaatggacactgaggaagccatcaaggattattattattattttgtttgtttgtttgtttgtttgagcagcagcaagatttagtgtgaagagcgaaagagaacaaagcttccacagcgtggaaggggacccgagcggtttgcccaaggccatcgaggatttaactaacaatgcaaccagcaccatacaccacatagattatagtccattaggggacttttctcctcgaaatttcaatgattgaatatagaattttgtggttttcttacatacagaaactagaagtctaaaaggaaaaagaagataggaaaatgtattagtccattttcatgctgctgataaagacatacccaagagtgggcactttacaaaagaaggaggttcaattggacttacaattccacaaggtggggaagcctcacaatcatggctgaaggcaatgaggagcaggtcacctcttacgtggatggcagcaagcaaagagagagcttgtgcaaaaaaaactcccattttttaaaaccatcagatctcatgatactcattcactatcacaagaacagtgcaggaaagacctgcccccataagtcaatcacctccgactgggatcctcccataacacgtgggagttgtgggagttacaattcaaaatgagatttgggtgaggacacagccaaaccatatcagaaagtatagtgcagcaaatgtgctgatattcttcttgt

SEQ ID NO: 700770 - DNA, 1833 bp, Homo sapiens
ccagctctgggtcttattgtgtgaagttcatcaggtttcatttttcttatttattaaatgagatagtgcttgaaaatacaatgcccagcatagctagccatcttaatttatatcaagttatccatatacawaactcatacgtagatagagagctagctgaaggatgaataggtagataaataggtagatagatagataggtaggcagatagatagatagatagatagatagatagatagatagatagatagattgattcagtttgcttgggctgctgtaacaaaaatactatagacccattgcctataaacaacagaaatttatttctcccagttctggaagctgggaagtccaagatcaaggtgttagcagacttagtgtttggcgagggtccatttcctggttcatagatgccacctctctgctgcatcatcacatggtagaagttactagctagctctctggagtcttttttgtaagggaactaatcccattcatgaggggtctgccctcatgacctaatcatgaacgaatatcttggtaccctcctcagggaacaggatcatctcaaacagcacccatgttaggatagagtgcaaagtgacccccaaggaaccacgagaagtgacagcatagaacagcctgaggacatattgtgtcctcaaactcaatatcattcttggcaagcactgaacgggcatctgaagatctgggagtgaccagttctgctgtttaccaccagctgatgaaaacggggaactcatgtgactctttttttatttttcttgaaagcgagtctcgctctattgtccaggctgacaactgcaggggtgcgatctcagctcaccacaacatccagctgctaggttcaagcgatactcctgcctcagcctcctgagcagctgggactacaggcatgcaccatcatgcctgggtaatttttgtatttttagtagagacagggttttactatgttggctagactggtctcgaactcctgacctcatgatctgcctgcctcggtctcccaaagtgctgggatcacaggcatgagccactgcgcccggctctcatgtgactcttatcagttcatctgctcagttgaaaatgaggatctaatggctgctgtactcatttttgaggatcaaatcagaaaataatcttgaaactacccgccattatgccttactcagtatttatagggattgaatgaagaagtgaatgacaagaatcaggaaatcaaatataaaaattccaagtgatacaaaaatataggtcttttgatatatttgtgtgaaagaaaactttattaatagctagtaccctttcttggctcccagttcctactgccaaagttttctccaccatctgttcttgaaaggaaaagaagccgccatgtttcctcctcaaggatgtgggtcggacgctagctacatctcaccatatcaaacatcccaaccaaagagctaaatactgctgcctttttgttccaaaaattcatatatttgacatcttatagacaaaacgcttgactatttgtctgaagttattggtttgaggtttttgcttttgtttttgttttctgttttgtttttttttttagacagggcctcgctctgttgcccaggctggagtgcagtggcacaatcttggctcactgcaccctccacctcccgagttcaagtaattctcccacatcagcctcccaggtagctgggattacagtcatgtgccactatgctcggcaaatttttgcatttataccagagacagggtttcaccatgttggccaggctggtctcgaactcctgaccgtaagttatctgcctgcct

SEQ ID NO: 700771 - DNA, 1833 bp, Homo sapiens
ccagctctgggtcttattgtgtgaagttcatcaggtttcatttttcttatttattaaatgagatagtgcttgaaaatacaatgcccagcatagctagccatcttaatttatatcaagttatccatatacataactcatacgtagatagagagctagctgaaggatgaataggtagataaataggtagatagatagataggtaggcagatagatagatagatagatagatagatagatagatagatagatagattgatycagtttgcttgggctgctgtaacaaaaatactatagacccattgcctataaacaacagaaatttatttctcccagttctggaagctgggaagtccaagatcaaggtgttagcagacttagtgtttggcgagggtccatttcctggttcatagatgccacctctctgctgcatcatcacatggtagaagttactagctagctctctggagtcttttttgtaagggaactaatcccattcatgaggggtctgccctcatgacctaatcatgaacgaatatcttggtaccctcctcagggaacaggatcatctcaaacagcacccatgttaggatagagtgcaaagtgacccccaaggaaccacgagaagtgacagcatagaacagcctgaggacatattgtgtcctcaaactcaatatcattcttggcaagcactgaacgggcatctgaagatctgggagtgaccagttctgctgtttaccaccagctgatgaaaacggggaactcatgtgactctttttttatttttcttgaaagcgagtctcgctctattgtccaggctgacaactgcaggggtgcgatctcagctcaccacaacatccagctgctaggttcaagcgatactcctgcctcagcctcctgagcagctgggactacaggcatgcaccatcatgcctgggtaatttttgtatttttagtagagacagggttttactatgttggctagactggtctcgaactcctgacctcatgatctgcctgcctcggtctcccaaagtgctgggatcacaggcatgagccactgcgcccggctctcatgtgactcttatcagttcatctgctcagttgaaaatgaggatctaatggctgctgtactcatttttgaggatcaaatcagaaaataatcttgaaactacccgccattatgccttactcagtatttatagggattgaatgaagaagtgaatgacaagaatcaggaaatcaaatataaaaattccaagtgatacaaaaatataggtcttttgatatatttgtgtgaaagaaaactttattaatagctagtaccctttcttggctcccagttcctactgccaaagttttctccaccatctgttcttgaaaggaaaagaagccgccatgtttcctcctcaaggatgtgggtcggacgctagctacatctcaccatatcaaacatcccaaccaaagagctaaatactgctgcctttttgttccaaaaattcatatatttgacatcttatagacaaaacgcttgactatttgtctgaagttattggtttgaggtttttgcttttgtttttgttttctgttttgtttttttttttagacagggcctcgctctgttgcccaggctggagtgcagtggcacaatcttggctcactgcaccctccacctcccgagttcaagtaattctcccacatcagcctcccaggtagctgggattacagtcatgtgccactatgctcggcaaatttttgcatttataccagagacagggtttcaccatgttggccaggctggtctcgaactcctgaccgtaagttatctgcctgcct

SEQ ID NO: 700772 - DNA, 1833 bp, Homo sapiens
ccagctctgggtcttattgtgtgaagttcatcaggtttcatttttcttatttattaaatgagatagtgcttgaaaatacaatgcccagcatagctagccatcttaatttatatcaagttatccatatacataactcatacgtagatagagagctagctgaaggatgaataggtagataaataggtagatagatagataggtaggcagatagatagatagatagatagatagatagatagatagatagatagattgattcagtttgcttgggctgctgtaacaaaaatactatagacccattgcctataaacaacagaaatttatttctcccagttctggaagctgggaagtccaagatcaaggtgttagcagacttartgtttggcgagggtccatttcctggttcatagatgccacctctctgctgcatcatcacatggtagaagttactagctagctctctggagtcttttttgtaagggaactaatcccattcatgaggggtctgccctcatgacctaatcatgaacgaatatcttggtaccctcctcagggaacaggatcatctcaaacagcacccatgttaggatagagtgcaaagtgacccccaaggaaccacgagaagtgacagcatagaacagcctgaggacatattgtgtcctcaaactcaatatcattcttggcaagcactgaacgggcatctgaagatctgggagtgaccagttctgctgtttaccaccagctgatgaaaacggggaactcatgtgactctttttttatttttcttgaaagcgagtctcgctctattgtccaggctgacaactgcaggggtgcgatctcagctcaccacaacatccagctgctaggttcaagcgatactcctgcctcagcctcctgagcagctgggactacaggcatgcaccatcatgcctgggtaatttttgtatttttagtagagacagggttttactatgttggctagactggtctcgaactcctgacctcatgatctgcctgcctcggtctcccaaagtgctgggatcacaggcatgagccactgcgcccggctctcatgtgactcttatcagttcatctgctcagttgaaaatgaggatctaatggctgctgtactcatttttgaggatcaaatcagaaaataatcttgaaactacccgccattatgccttactcagtatttatagggattgaatgaagaagtgaatgacaagaatcaggaaatcaaatataaaaattccaagtgatacaaaaatataggtcttttgatatatttgtgtgaaagaaaactttattaatagctagtaccctttcttggctcccagttcctactgccaaagttttctccaccatctgttcttgaaaggaaaagaagccgccatgtttcctcctcaaggatgtgggtcggacgctagctacatctcaccatatcaaacatcccaaccaaagagctaaatactgctgcctttttgttccaaaaattcatatatttgacatcttatagacaaaacgcttgactatttgtctgaagttattggtttgaggtttttgcttttgtttttgttttctgttttgtttttttttttagacagggcctcgctctgttgcccaggctggagtgcagtggcacaatcttggctcactgcaccctccacctcccgagttcaagtaattctcccacatcagcctcccaggtagctgggattacagtcatgtgccactatgctcggcaaatttttgcatttataccagagacagggtttcaccatgttggccaggctggtctcgaactcctgaccgtaagttatctgcctgcct

SEQ ID NO: 700773 - DNA, 1833 bp, Homo sapiens
ccagctctgggtcttattgtgtgaagttcatcaggtttcatttttcttatttattaaatgagatagtgcttgaaaatacaatgcccagcatagctagccatcttaatttatatcaagttatccatatacataactcatacgtagatagagagctagctgaaggatgaataggtagataaataggtagatagatagataggtaggcagatagatagatagatagatagatagatagatagatagatagatagattgattcagtttgcttgggctgctgtaacaaaaatactatagacccattgcctataaacaacagaaatttatttctcccagttctggaagctgggaagtccaagatcaaggtgttagcagacttagtgtttggcgagggtccatttcctggttcatagatgccacctctctgctgcatcatcacatggtagaagttactagctagctctctggagtcttttttgtaagggaactaatcccattcatgaggggtctgccctcatgacctaatcatgaacgaatatcttggtaccctcctcagggaacaggatcatctsaaacagcacccatgttaggatagagtgcaaagtgacccccaaggaaccacgagaagtgacagcatagaacagcctgaggacatattgtgtcctcaaactcaatatcattcttggcaagcactgaacgggcatctgaagatctgggagtgaccagttctgctgtttaccaccagctgatgaaaacggggaactcatgtgactctttttttatttttcttgaaagcgagtctcgctctattgtccaggctgacaactgcaggggtgcgatctcagctcaccacaacatccagctgctaggttcaagcgatactcctgcctcagcctcctgagcagctgggactacaggcatgcaccatcatgcctgggtaatttttgtatttttagtagagacagggttttactatgttggctagactggtctcgaactcctgacctcatgatctgcctgcctcggtctcccaaagtgctgggatcacaggcatgagccactgcgcccggctctcatgtgactcttatcagttcatctgctcagttgaaaatgaggatctaatggctgctgtactcatttttgaggatcaaatcagaaaataatcttgaaactacccgccattatgccttactcagtatttatagggattgaatgaagaagtgaatgacaagaatcaggaaatcaaatataaaaattccaagtgatacaaaaatataggtcttttgatatatttgtgtgaaagaaaactttattaatagctagtaccctttcttggctcccagttcctactgccaaagttttctccaccatctgttcttgaaaggaaaagaagccgccatgtttcctcctcaaggatgtgggtcggacgctagctacatctcaccatatcaaacatcccaaccaaagagctaaatactgctgcctttttgttccaaaaattcatatatttgacatcttatagacaaaacgcttgactatttgtctgaagttattggtttgaggtttttgcttttgtttttgttttctgttttgtttttttttttagacagggcctcgctctgttgcccaggctggagtgcagtggcacaatcttggctcactgcaccctccacctcccgagttcaagtaattctcccacatcagcctcccaggtagctgggattacagtcatgtgccactatgctcggcaaatttttgcatttataccagagacagggtttcaccatgttggccaggctggtctcgaactcctgaccgtaagttatctgcctgcct

SEQ ID NO: 700774 - DNA, 1833 bp, Homo sapiens
ccagctctgggtcttattgtgtgaagttcatcaggtttcatttttcttatttattaaatgagatagtgcttgaaaatacaatgcccagcatagctagccatcttaatttatatcaagttatccatatacataactcatacgtagatagagagctagctgaaggatgaataggtagataaataggtagatagatagataggtaggcagatagatagatagatagatagatagatagatagatagatagatagattgattcagtttgcttgggctgctgtaacaaaaatactatagacccattgcctataaacaacagaaatttatttctcccagttctggaagctgggaagtccaagatcaaggtgttagcagacttagtgtttggcgagggtccatttcctggttcatagatgccacctctctgctgcatcatcacatggtagaagttactagctagctctctggagtcttttttgtaagggaactaatcccattcatgaggggtctgccctcatgacctaatcatgaacgaatatcttggtaccctcctcagggaacaggatcatctcaaacagcacccatgttaggatagagtgcaaagtgacccccaaggaaccacgagaagtgacagcatagaacagcctgaggacatattgtgtcctcaaactcaatatcattcttggcaagcactgaacgggcatctgaagatctgggagtgaccagttctgctgtttaccaccagctgatgaaaacggggaactcatgtgactctttttttatttttcttgaaagcgagtctcgctctattgtccaggctgacaactgcaggggtgcgatctcagctcaccacaacatccagctgctaggttcaagcgatactcctgcctcagcctcctgagcagctgggactacaggcatgcaccatcatgcctgggtaatttttgtatttttagtagagacagggttttactatgttggctagactggtctcgaactcctgacctcatgatctgcctgcctcggtctcccaaagtgctgggatcacaggcrtgagccactgcgcccggctctcatgtgactcttatcagttcatctgctcagttgaaaatgaggatctaatggctgctgtactcatttttgaggatcaaatcagaaaataatcttgaaactacccgccattatgccttactcagtatttatagggattgaatgaagaagtgaatgacaagaatcaggaaatcaaatataaaaattccaagtgatacaaaaatataggtcttttgatatatttgtgtgaaagaaaactttattaatagctagtaccctttcttggctcccagttcctactgccaaagttttctccaccatctgttcttgaaaggaaaagaagccgccatgtttcctcctcaaggatgtgggtcggacgctagctacatctcaccatatcaaacatcccaaccaaagagctaaatactgctgcctttttgttccaaaaattcatatatttgacatcttatagacaaaacgcttgactatttgtctgaagttattggtttgaggtttttgcttttgtttttgttttctgttttgtttttttttttagacagggcctcgctctgttgcccaggctggagtgcagtggcacaatcttggctcactgcaccctccacctcccgagttcaagtaattctcccacatcagcctcccaggtagctgggattacagtcatgtgccactatgctcggcaaatttttgcatttataccagagacagggtttcaccatgttggccaggctggtctcgaactcctgaccgtaagttatctgcctgcct

SEQ ID NO: 700775 - DNA, 1833 bp, Homo sapiens
ccagctctgggtcttattgtgtgaagttcatcaggtttcatttttcttatttattaaatgagatagtgcttgaaaatacaatgcccagcatagctagccatcttaatttatatcaagttatccatatacataactcatacgtagatagagagctagctgaaggatgaataggtagataaataggtagatagatagataggtaggcagatagatagatagatagatagatagatagatagatagatagatagattgattcagtttgcttgggctgctgtaacaaaaatactatagacccattgcctataaacaacagaaatttatttctcccagttctggaagctgggaagtccaagatcaaggtgttagcagacttagtgtttggcgagggtccatttcctggttcatagatgccacctctctgctgcatcatcacatggtagaagttactagctagctctctggagtcttttttgtaagggaactaatcccattcatgaggggtctgccctcatgacctaatcatgaacgaatatcttggtaccctcctcagggaacaggatcatctcaaacagcacccatgttaggatagagtgcaaagtgacccccaaggaaccacgagaagtgacagcatagaacagcctgaggacatattgtgtcctcaaactcaatatcattcttggcaagcactgaacgggcatctgaagatctgggagtgaccagttctgctgtttaccaccagctgatgaaaacggggaactcatgtgactctttttttatttttcttgaaagcgagtctcgctctattgtccaggctgacaactgcaggggtgcgatctcagctcaccacaacatccagctgctaggttcaagcgatactcctgcctcagcctcctgagcagctgggactacaggcatgcaccatcatgcctgggtaatttttgtatttttagtagagacagggttttactatgttggctagactggtctcgaactcctgacctcatgatctgcctgcctcggtctcccaaagtgctgggatcacaggcatgagccactgcgcccggctctcatgtgactcttatcagttcatctgctcagttgaaaatgaggatctaatggctgctgtactcatttttgaggatcaaatcagaaaataatcttgaaactacccgccattatgccttactcagtatttatagggattgaatgaagaagtgaatgacawgaatcaggaaatcaaatataaaaattccaagtgatacaaaaatataggtcttttgatatatttgtgtgaaagaaaactttattaatagctagtaccctttcttggctcccagttcctactgccaaagttttctccaccatctgttcttgaaaggaaaagaagccgccatgtttcctcctcaaggatgtgggtcggacgctagctacatctcaccatatcaaacatcccaaccaaagagctaaatactgctgcctttttgttccaaaaattcatatatttgacatcttatagacaaaacgcttgactatttgtctgaagttattggtttgaggtttttgcttttgtttttgttttctgttttgtttttttttttagacagggcctcgctctgttgcccaggctggagtgcagtggcacaatcttggctcactgcaccctccacctcccgagttcaagtaattctcccacatcagcctcccaggtagctgggattacagtcatgtgccactatgctcggcaaatttttgcatttataccagagacagggtttcaccatgttggccaggctggtctcgaactcctgaccgtaagttatctgcctgcct

SEQ ID NO: 700776 - DNA, 651 bp, Homo sapiens
ggtttagacccactcatgcccatctaccttcagctctagctctagctcaaaaaggattccaataaaacccatgaatagagagcagggcccagggcaytctgttggcaaagacctattcaagatgtatctcatctttgttttgtttgtgaggttggtaaaagaagaaagcatcttttagtgggtttattggctctttgcataactttcttctaaagtgcatgttcaagcaatttgtccaataagaaaaaagtcaaataactctaatttttaaaaggggcaagtgatttgatcagggactttgcaaaagtgcatgcccaagtgtctaatggacaaatgaaaagataccaacacttatctttaaaaaattaactaaaataaacaacaaaattactataatataaagttttcgtgaggatgtactgcaactgaaaatcttaaatattgagaatataaattattacaaacacagttaaaggaactagttggttgtatctactaaacctaaatatagacctactgtacgaaccaccctgcccaatcatagtttcatacccaagagaaatgagtacgttttcccacaaaaagaaataaacaagattatttacagcaggcttattcataattgccaaaagctgaaaacaaccccactga

SEQ ID NO: 700777 - DNA, 651 bp, Homo sapiens
ggtttagacccactcatgcccatctaccttcagctctagctctagctcaaaaaggattccaataaaacccatgaatagagagcagggcccagggcactctgttggcaaagacctattcaagatgtatctcatctttgttttgtttgtgaggttggtaaaagaagaaagcatcttttagtgggtttattggctctttgcataactttcttctaaagtgcatgttcaagcratttgtccaataagaaaaaagtcaaataactctaatttttaaaaggggcaagtgatttgatcagggactttgcaaaagtgcatgcccaagtgtctaatggacaaatgaaaagataccaacacttatctttaaaaaattaactaaaataaacaacaaaattactataatataaagttttcgtgaggatgtactgcaactgaaaatcttaaatattgagaatataaattattacaaacacagttaaaggaactagttggttgtatctactaaacctaaatatagacctactgtacgaaccaccctgcccaatcatagtttcatacccaagagaaatgagtacgttttcccacaaaaagaaataaacaagattatttacagcaggcttattcataattgccaaaagctgaaaacaaccccactga

SEQ ID NO: 700778 - DNA, 1607 bp, Homo sapiens
tcccaataatactgaaaccttctgcctccagctgcacaagaactatttggaaagtgtgtgactctagaaggtatgcagcttagagcagagtagagggcacctcactgaggttttctaaagatctatgaatttgagacccttatgattctggagcaggagaaattccagttgtcctatcatataggcaggctatgacctctgaagccttttcctagttggagactcagttactagaaacaaaaccctcatcctcatctccagatgaatctgaagagttctatagccaataagggttagcctggcacaaaggcaatttctggctgcttttagagtgcgggcgcttcctcgtgggtgcctttctgtgtgcacctgcagtgccggcgttggtcaccgctgaggagccaccagcctggagctgggttttggcaggacagagtaaaaaaaaaaccgggtttttcagtttggatgggatatatttcaactgagcacgagaatcttcccccacccacgttctccaacatcatctactctgaacaaaacctccgtaagactgcttcgataatatgatttatctcctttttctgttcagctctgcctttaaaaagtgttaaactggttaagaaggggatttccccaggagcgtggcatgagttctttctctctttgggagatgtgcttccaattttttgcgttctttgctgagataaycagcagtttttgtgttttttttttaagatggagtcttgctgtgtcacccaggccggagtgcagtggtacaatcttggctcactgcaacctccgcctcccaggtgcaagcgattctcctgtctcaacctcccattctttctactcttccttcccatttttactgtacttgtccctgagtctagaattatgcacacaccaagcagggtgttgcctagtctggagatctgaagggatccctaaggtttttcctcagaattgcctgatattttactcttagtgactcacttctttgggttaagcatgaattctttattatatttttaaaaaatcaaaacaaaacaagaacaaacttggcaggagtgatgacttgtcatgggaacagtaattatcacaggaaaaacccaggtttcttcctgatatgtcacgaagaggttcaaagtagatggaatatagtgtagggtcaagaacaccaaagttccaggagcttctagtcaagaaagtgaacaatggcttccccttccacttcaaccaaaacccctcactcttcaccacagcccacaaggcccctcgtgatctatttcctgccaacctctctcactccaccctgggtcatgctcatttctttcatggtgcttcagccagaacatcttttatttctgcttctcaaacatatcaagctccttcctgcctcagaacctttgcagatgctattccctctgtccagaatgcccttcttccagatgcttacatggcgacttcctgtcattcaggcatcctttgacataccatttcctgaccacccaatctaaaattgcccacagatattctccattacattgcctcaaattgcctcattttactttcatagtgtttaccactctctgaaatcatcttttttt

SEQ ID NO: 700779 - DNA, 1545 bp, Homo sapiens
cattagtctgctaaatacattttacaaaataatgtgtaccaagtgttctgctataggcagagcacttacaatacactctcactacctaaatcagagtgtctcaacagtggcactattgacattttggtctggacaatctgtcgtaaggagcctctcctacatccttgtagaatgtttagcagcatccccagcctctcctgctrggtgccagtagcctccccaacttgtgacaacctaaaacatctctaagcgtcgtcacatctcttctagtgagtaaattcactaccagctgggaccactgatccaaatcaagaagttagaaaacaaaatttgccatgtatctatttatacagtgtatgtacttgtccaattttacctcttccacaaatgtttaagatttcatagcttaatacaattaattcatattgtactaagtacaccttagtatgacattaagatgtcttatgtggtcatacagttaaataaaagagcgtctctgttctaaacaaacagaactttataagttgcctctatttattaaacttaggttgcatgggctcaaaaggcctccaaatgaccatcggctctagaatccaagaaagataagttaagatagtaggataagataataagaaggaggtggaagctatgagagcaaataaaagtaaaattaagaacttgaatgaggaaaggatggtagaactgttaaatcaacaaattggatggtaatcagaggataatgttggaaaactcttcctgggatgtaaagatgcagcagatttaacataacctagaaatattgtccaagtcacttatatatgttcctctaaagatactgtgatatctgcaataaaaaatttaaaaagaaaaaaacagaaagaggtttgcaagagaatatggtacttatacacatggcttatgatgcaaagttccaagaagtctctggggcttaaggatctttctccttctgagagaactctccatagattaataatatttgatataattttagtatgagaataatttggatagtatttagagacacagtgtcagagagatgatatcaatttttatataaattatatgtaaaatttgtttctccatttgtccattagtcttacactctcaaagacaagagtatgacaaatacacaaaaacaaagagagactgtactgaatatgcatcattcccagagacagaggcaaaccgatctcttggacaccaaaagtaatggggggctgtggtaagctatatataatggagactgctaattcagaccaaatactctcttcaagcacaactgcatcccttggttgagatctactccattccccccatccccagtcattaatctttgatttgactaaactaaaccaaaccaaatgacagtaaagagagattctatttcttagatttatagaggacttttacaaatgaattttatggcagggtgccagatggatgaatttagaaataaataaaagacatctagctacagagtagatagaatctatactgagtttggagataaaacattaaacaaaa

SEQ ID NO: 700780 - DNA, 2618 bp, Homo sapiens
  misc_feature 620, 621, 622, 623, 624, 625, 626, 627, 628, 629, 630, 631,632, 633, 634, 635, 636, 637, 638, 639, 640, 641, 642, 643,644, 645, 646, 647, 648, 649, 650, 651, 652, 653, 654, 655,656, 657, 658, 659, 660, 661, 662, 663, 664, 665, 666: n = A,T,C or G
  misc_feature 667, 668, 669, 670, 671, 672, 673, 674, 675, 676, 677, 678,679, 680, 681, 682, 683, 684, 685, 686, 687, 688, 689, 690,691, 692, 693, 694, 695, 696, 697, 698, 699, 700, 701, 702,703, 704, 705, 706, 707, 708, 709, 710, 711, 712, 713: n = A,T,C or G
  misc_feature 714, 715, 716, 717, 718, 719: n = A,T,C or G
agaactaggttcttttcataatacatttttaaagcttattttatcaatgtctaacataccatgattttaaaagcatgttattacttcctcagctcaattaatttaatactaatttaaaaacctacaatcatcaatgataaggagggattcaaaaaataatgaattagataatactttatattattttttcatttgtctgtttgcatgcaaggcacacactcacacactcgtcttcatcagcaatccaatcgaaaaagggcctggtactttaagtgcctggacagaaaggggaagtttcattgataacatatcaatgcatctaatacattggcaaacttttatttagtaaaaaatctttaaagagcaaaaagcaaattttgtgaagaatattgccatgattataaacagatgaagaaacacagatgttaaaataacagtgttgatgcagatgtttcagagaaacaatatgtagtcaataattcctaaccaaaggcctgtaatggataacaggcctaatatattcacgtagggggacactaaactcaggttagacaaaaaccgctttccaggaaagggttatctaagattggatgactgacttcataaagccttctgctttnnnnnnnnnnnnnnnnnnnnnnnnnnnnnnnnnnnnnnnnnnnnnnnnnnnnnnnnnnnnnnnnnnnnnnnnnnnnnnnnnnnnnnnnnnnnnnnnnnnntattttcataaaattcaacattttgtgttgagcacttgccattctcaagaactttcctaggccaggagatatataaaagttattaagatattattttgttctttaagacacctccaatctattaggaatgactgccaaatcagtagataatatcaatattttaaatagttaggaagaggggctcccccacacacaaagaggaccgctgaggaccttggatcagggaaaggtgtttgcaaagcagtattatcgggagcaatagaattcatctggcgatgaatgccagatgtaaggaaagagctaggaaatgaatgcaaaatctatttgtaatgtttatttatttttctattagatacgactattaatatatgaataagataccctgtatataacattctaactaaacactacctttaagttaaacagcacgtttaatcgtctgttttcagcagaaaactattatatataaaccaactcaagtaaagctcactcttggagtatacattttctacatttttggctgacatttctaggtccctgagcagatcttattagcttggtgattttaatctctgcctttgaaaaatgaaggtctttcactctgaattccttcagttgatttataccttccttatccttttcatcatgctgctgcctccccaggaatattaaaaagtgattattgggcttgagcaacaccacaggcttccttttgatttaacagtcaaatatacacaggatttcgtgatcattttaaaattacttgtaaactgtatttatatgctaagctcttgaaactgaataagcagcttcttggccttgaaaggagattgatgccactgtattttttgtcactttaggcaatattacttcgagtgtttatcgactgtggcccttacccaactacagttcatttaggcttgaaaggaggctctggaaatggcactatcagttcttttctgtgttacatattcctagtttacaaataagctgacatttatattaatcagycctctagagcaactgtagctgaggaagggctaatacatcatccccaaattgctacccaagttctattccaaaatctttattgctgctgctgataaatggaataaagcaaaataaaaatttggaattttcagtgttctggtaactattgggaagacgatgttacgcaattgtagataaattttgaaatctgcatatatttaaatagttttgatgaaccaataatgatgacatgtcataaaatgcatatttatcgtgttttcccagaagattattttagatgaatatgaggttaataagccccctttttggccctggagtggcttcaggactcattgcccaagtctaagaatgtacaaaactatatagcaatgatcaaactacttactgatatttgggatgatattcattggcttacgtaggcatttttcacaaaggctttacatttcaattgtcttatacgaagtgaaatatcacagccaaaagataaaaaaccttctaacagagtctgagaaatgtaggcttgttcctacagatcataatgaaggtaaaacatacagtagactggtcttcaatcttttagagcactggaacttgggactgtctaatgatgtgaaagcaggatgcttaaatctgtccatgagcctctgaaacatcaccataattaagtttcaaggctgcattctatagatcactgaaacagatattagggttgaaaaggtctcattgatatgaatggcacaagccatgtagatgcccaagcagagatgacaacttaaatatcatcctttgattaaccctgaaaggaatacatctaccgggagggagtgagaggccacctgaaaaaaagaaagctactgaaaagtaggtggttcttctgatgaaaagcag

SEQ ID NO: 700781 - DNA, 2618 bp, Homo sapiens
  misc_feature 620, 621, 622, 623, 624, 625, 626, 627, 628, 629, 630, 631,632, 633, 634, 635, 636, 637, 638, 639, 640, 641, 642, 643,644, 645, 646, 647, 648, 649, 650, 651, 652, 653, 654, 655,656, 657, 658, 659, 660, 661, 662, 663, 664, 665, 666: n = A,T,C or G
  misc_feature 667, 668, 669, 670, 671, 672, 673, 674, 675, 676, 677, 678,679, 680, 681, 682, 683, 684, 685, 686, 687, 688, 689, 690,691, 692, 693, 694, 695, 696, 697, 698, 699, 700, 701, 702,703, 704, 705, 706, 707, 708, 709, 710, 711, 712, 713: n = A,T,C or G
  misc_feature 714, 715, 716, 717, 718, 719: n = A,T,C or G
agaactaggttcttttcataatacatttttaaagcttattttatcaatgtctaacataccatgattttaaaagcatgttattacttcctcagctcaattaatttaatactaatttaaaaacctacaatcatcaatgataaggagggattcaaaaaataatgaattagataatactttatattattttttcatttgtctgtttgcatgcaaggcacacactcacacactcgtcttcatcagcaatccaatcgaaaaagggcctggtactttaagtgcctggacagaaaggggaagtttcattgataacatatcaatgcatctaatacattggcaaacttttatttagtaaaaaatctttaaagagcaaaaagcaaattttgtgaagaatattgccatgattataaacagatgaagaaacacagatgttaaaataacagtgttgatgcagatgtttcagagaaacaatatgtagtcaataattcctaaccaaaggcctgtaatggataacaggcctaatatattcacgtagggggacactaaactcaggttagacaaaaaccgctttccaggaaagggttatctaagattggatgactgacttcataaagccttctgctttnnnnnnnnnnnnnnnnnnnnnnnnnnnnnnnnnnnnnnnnnnnnnnnnnnnnnnnnnnnnnnnnnnnnnnnnnnnnnnnnnnnnnnnnnnnnnnnnnnnntattttcataaaattcaacattttgtgttgagcacttgccattctcaagaactttcctaggccaggagatatataaaagttattaagatattattttgttctttaagacacctccaatctattaggaatgactgccaaatcagtagataatatcaatattttaaatagttaggaagaggggctcccccacacacaaagaggaccgctgaggaccttggatcagggaaaggtgtttgcaaagcagtattatcgggagcaatagaattcatctggcgatgaatgccagatgtaaggaaagagctaggaaatgaatgcaaaatctatttgtaatgtttatttatttttctattagatacgactattaatatatgaataagataccctgtatataacattctaactaaacactacctttaagttaaacagcacgtttaatcgtctgttttcagcagaaaactattatatataaaccaactcaagtaaagctcactcttggagtatacattttctacatttttggctgacatttctaggtccctgagcagatcttattagcttggtgattttaatctctgcctttgaaaaatgaaggtctttcactctgaattccttcagttgatttataccttccttatccttttcatcatgctgctgcctccccaggaatattaaaaagtgattattgggcttgagcaacaccacaggcttccttttgatttaacagtcaaatatacacaggatttcgtgatcattttaaaattacttgtaaactgtatttatatgctaagctcttgaaactgaataagcagcttcttggccttgaaaggagattgatgccactgtattttttgtcactttaggcaatattacttcgagtgtttatcgactgtggcccttacccaactacagttcatttaggcttgaaaggaggctctggaaatggcactatcagttcttttctgtgttacatattcctagtttacaaataagctgacatttatattaatcagccctctagagcaactgtagctgaggaagggctaatacatcatccccaaattgctacccaagttctattccaaaatctttattgctgctgctgataaatggaataaagcaaaataaaaatttggaattttcagtgttctgrtaactattgggaagacgatgttacgcaattgtagataaattttgaaatctgcatatatttaaatagttttgatgaaccaataatgatgacatgtcataaaatgcatatttatcgtgttttcccagaagattattttagatgaatatgaggttaataagccccctttttggccctggagtggcttcaggactcattgcccaagtctaagaatgtacaaaactatatagcaatgatcaaactacttactgatatttgggatgatattcattggcttacgtaggcatttttcacaaaggctttacatttcaattgtcttatacgaagtgaaatatcacagccaaaagataaaaaaccttctaacagagtctgagaaatgtaggcttgttcctacagatcataatgaaggtaaaacatacagtagactggtcttcaatcttttagagcactggaacttgggactgtctaatgatgtgaaagcaggatgcttaaatctgtccatgagcctctgaaacatcaccataattaagtttcaaggctgcattctatagatcactgaaacagatattagggttgaaaaggtctcattgatatgaatggcacaagccatgtagatgcccaagcagagatgacaacttaaatatcatcctttgattaaccctgaaaggaatacatctaccgggagggagtgagaggccacctgaaaaaaagaaagctactgaaaagtaggtggttcttctgatgaaaagcag

SEQ ID NO: 700782 - DNA, 2618 bp, Homo sapiens
  misc_feature 620, 621, 622, 623, 624, 625, 626, 627, 628, 629, 630, 631,632, 633, 634, 635, 636, 637, 638, 639, 640, 641, 642, 643,644, 645, 646, 647, 648, 649, 650, 651, 652, 653, 654, 655,656, 657, 658, 659, 660, 661, 662, 663, 664, 665, 666: n = A,T,C or G
  misc_feature 667, 668, 669, 670, 671, 672, 673, 674, 675, 676, 677, 678,679, 680, 681, 682, 683, 684, 685, 686, 687, 688, 689, 690,691, 692, 693, 694, 695, 696, 697, 698, 699, 700, 701, 702,703, 704, 705, 706, 707, 708, 709, 710, 711, 712, 713: n = A,T,C or G
  misc_feature 714, 715, 716, 717, 718, 719: n = A,T,C or G
agaactaggttcttttcataatacatttttaaagcttattttatcaatgtctaacataccatgattttaaaagcatgttattacttcctcagctcaattaatttaatactaatttaaaaacctacaatcatcaatgataaggagggattcaaaaaataatgaattagataatactttatattattttttcatttgtctgtttgcatgcaaggcacacactcacacactcgtcttcatcagcaatccaatcgaaaaagggcctggtactttaagtgcctggacagaaaggggaagtttcattgataacatatcaatgcatctaatacattggcaaacttttatttagtaaaaaatctttaaagagcaaaaagcaaattttgtgaagaatattgccatgattataaacagatgaagaaacacagatgttaaaataacagtgttgatgcagatgtttcagagaaacaatatgtagtcaataattcctaaccaaaggcctgtaatggataacaggcctaatatattcacgtagggggacactaaactcaggttagacaaaaaccgctttccaggaaagggttatctaagattggatgactgacttcataaagccttctgctttnnnnnnnnnnnnnnnnnnnnnnnnnnnnnnnnnnnnnnnnnnnnnnnnnnnnnnnnnnnnnnnnnnnnnnnnnnnnnnnnnnnnnnnnnnnnnnnnnnnntattttcataaaattcaacattttgtgttgagcacttgccattctcaagaactttcctaggccaggagatatataaaagttattaagatattattttgttctttaagacacctccaatctattaggaatgactgccaaatcagtagataatatcaatattttaaatagttaggaagaggggctcccccacacacaaagaggaccgctgaggaccttggatcagggaaaggtgtttgcaaagcagtattatcgggagcaatagaattcatctggcgatgaatgccagatgtaaggaaagagctaggaaatgaatgcaaaatctatttgtaatgtttatttatttttctattagatacgactattaatatatgaataagataccctgtatataacattctaactaaacactacctttaagttaaacagcacgtttaatcgtctgttttcagcagaaaactattatatataaaccaactcaagtaaagctcactcttggagtatacattttctacatttttggctgacatttctaggtccctgagcagatcttattagcttggtgattttaatctctgcctttgaaaaatgaaggtctttcactctgaattccttcagttgatttataccttccttatccttttcatcatgctgctgcctccccaggaatattaaaaagtgattattgggcttgagcaacaccacaggcttccttttgatttaacagtcaaatatacacaggatttcgtgatcattttaaaattacttgtaaactgtatttatatgctaagctcttgaaactgaataagcagcttcttggccttgaaaggagattgatgccactgtattttttgtcactttaggcaatattacttcgagtgtttatcgactgtggcccttacccaactacagttcatttaggcttgaaaggaggctctggaaatggcactatcagttcttttctgtgttacatattcctagtttacaaataagctgacatttatattaatcagccctctagagcaactgtagctgaggaagggctaatacatcatccccaaattgctacccaagttctattccaaaatctttattgctgctgctgataaatggaataaagcaaaataaaaatttggaattttcagtgttctggtaactattgggaagacgatgttacgcaattgtagataaattttgaaatctgcatatatttaaatagttttgatgaaccaataatgatgacatgtcataaaatgcatatttatygtgttttcccagaagattattttagatgaatatgaggttaataagccccctttttggccctggagtggcttcaggactcattgcccaagtctaagaatgtacaaaactatatagcaatgatcaaactacttactgatatttgggatgatattcattggcttacgtaggcatttttcacaaaggctttacatttcaattgtcttatacgaagtgaaatatcacagccaaaagataaaaaaccttctaacagagtctgagaaatgtaggcttgttcctacagatcataatgaaggtaaaacatacagtagactggtcttcaatcttttagagcactggaacttgggactgtctaatgatgtgaaagcaggatgcttaaatctgtccatgagcctctgaaacatcaccataattaagtttcaaggctgcattctatagatcactgaaacagatattagggttgaaaaggtctcattgatatgaatggcacaagccatgtagatgcccaagcagagatgacaacttaaatatcatcctttgattaaccctgaaaggaatacatctaccgggagggagtgagaggccacctgaaaaaaagaaagctactgaaaagtaggtggttcttctgatgaaaagcag

SEQ ID NO: 700783 - DNA, 970 bp, Homo sapiens
aaatataatagctgtttcaaaagttttatttaaatcccaatttaaagactcaagaaaagaatagagaatacaaggaaaaggaccagtaatacccaaatttatacattgtttgaatttggaaacatattttagtatttaattatttttgaatcatcacaacaatattgtgatttactaataagattcttattttcaagctaaataaagaaatgttcttctggcagcatgaacgttgcatacaaaactggattcaaatcctgccctatcattttctaggtgagggtttgggggaagttactaaatttctatgaacttgcaaataaacaatgtagtgtcacctttacaggacagttacagggggtaaatgagatttatgcctagcctcacacaatcctagcacatagaaggcaggtagaatgttctatcctcttgtttttttttttcctttgagaatatgagggctcacttaccatctcatagatggttaatagcagagattaaatttaaaaatgagtgttctgacttttggcctgaatttgttacctttcataccttgttgcttataattaaagataatttgtcaaatattcacacataattttgctttaatttactcattttctaatcaaacaagaaagtatggtagctgaagaataataatcyagtactaagcattatgggaataacagattagggaaatttctttccttccaaatgaatttaagaaaatttaaggaaatcagaaaaattactactatcttgccaaaagtcatggaaaataacatgtagcatctgccacaaagtcccacagaaaacaaaaatataggatgtgaaatgtgaagtaaagagggtcaaactatgtagataataacaaatttgacctttccttcttaatatctaagtcactctctagtgagttagttatttgatcgtattacccattttattcacagaaatgcacctcaggatg

SEQ ID NO: 700784 - DNA, 665 bp, Homo sapiens
caaagccaagggaggctaagagcctactctttttcttcttgttgagcctgagcctctcctcagcccagaccacttagtgaatgtacaggtgagattgggcagctcaccaccagtggtggcagggtctggtttctacaagggcatggccacagtgcagtcaccctgctccctatcccatagccagcgtctggagaggggctggctccaaatgagtgagagggaagtgtttgtggggggaacgattggtttcctgaagggcaatcagaaggcacgcacctgcagggcccctcacagaagggcaggaggagctgcgggttgccccccagggagaggccttgtgattgaggtcccagtcagaaagatggtcgtgtgtgcaagggacaaggtagaatgggaggtgggccagggtgggtagtaggagactgggggcagggctggtctggggtctgaatccctgatgaggtgatatgttatggggtgaggaaggagctcccctcatgatggggggrgttggggggcatgtgtggcaggaatagccacagctgccaaccagatagtcataatgagacctttgagttggaactggggctcagattccctctttcaaacctacccactgtgcagacttcagtaagtgacaggacctttctggaacttgggtttta

SEQ ID NO: 700785 - DNA, 1192 bp, Homo sapiens
ggcatatagataaatgggtagcattttgaccagtacacagaggatacacattttcaaagaccagacaaaattatttatttatttttttgggggagagagcagtttcattatctggggttacagtggggtcctctccctgggaggtggggtcttccactggttacccccgccagggctccagggggcgccatgcgattcagtgctgggctccgctgggggccgggccttggagaaggcgaactgtgcagggaagcagcagctgtggggtcctcaccgcccgccccgcccggctgcacccggcctcctggtgctcctcaggctcccgccgagtctgcgcctctggagggcagcgaccatcctgcccagaaccttatcctcacattccagtttgacgcaggtcaggcatttctgcttcctcctctcgggctggactttgcacttgggtttcttccagtctttcctccggccgcttctctgtctgccggagcttaaattccagcctcacaaatgttccagctgggaagggcgtgtccagggcgctgtccacactggtctcccggaaggcccgctgcacgggcgggtgcttgaagattcctccagggccacctgcaggccccggcgctggcccggtgagctcggcccctcccgcgtcccccgcgcccacccactgggccagcgagatccgcagccatctcaggcttcccctgtcaccccggccctgagaagcgggtgtgcgccccttagttctccgagcctgccgggagccacctcctcccctgcccctgggggggtgggccatgcccgcagaaccctgggcagaggcgaaggaaccgggaaatgtccctttctccacactgaccttggggtgtgctgggtcctctctactccctcccaccctgcccgcgctgttccctggggcccgcagtttcagcaaagttccctgccgcgccgggaagccgtcctgttgcccactctcacccttcctccttttctagcccattctctctccccacctccgacacgaccctctctcctcccggctgtccccggagcccctctctgcttccccagctcagccccctctctgacggcttctccctcccacccccaagcgaatctccgggttcccacggggtgctccggatcccyggggctaggtcaaccagacaaaattattttaaatgggaagatt

SEQ ID NO: 700786 - DNA, 607 bp, Homo sapiens
cgttggagtccctgaaatccccgatggacgcaccaggtaaaagcatccagggttgaaaccagatcaggatggttattgtcagcctggggctcctgtagaggtgcatccatgttgcaggtattttcccttcttgctgaggagaaacctgggtttctcagctttagcacagtcacaacatttggggtcagaccattcgtggtggtggtggtgaggctgtcctgtgtattgtaggatggttagcagcatctctggtctccatcttctaggtgccattctaccctcccagctatggctaccccagatgtctccagacggtttcaaatatcatggagcaagggagttgtacgtgagcaaaaccaccccagttgagagccattggtctacacttgtggaaatstttgagagtgagagtgttgagcttgggtccctgctgtaccctttatgagcaatgcggtcttggaaaattaatactactccaggggcctcagttttctcatctataaaatggagataaacgagatacactttcataggaagtttatatgggatttactgagataataagacagtacatggaaaatgctgggcatagaatttatttatttat

SEQ ID NO: 700787 - DNA, 3448 bp, Homo sapiens
gcttctgtaaaaattgcttcagccaaactcccccctcccctatttagaccacggtataaaaccaaaaccaaccccttcctcggggccgagagaattttgagcgttagctgcctctcggtcaccagctaatagaggattccttaatttgtctcaaagtgtggcatttctctataactcgctgggttacaacagtccacactgtggcctgaggcgcatcgcccacctgagcttcatctgttaggtatgtcagggaagataagcagggtaaggatggcctcatcagagggccccagatctctagctcccccatctggcaagtgcacctctgtgaacaaagtcttcagagccagatgacaagaacggcccaatcagtccaccagggaaacctgggcccagtgtacgtcaatgcagagcatcaagcacggcgtaacaggtgcacagttgcctattcctgttcagagataactgcatcccacacactgtaaaatgaggaaatgcagagaagcagatgtaactgaagaagacagcaggagcaacaaggagggacaaccacgacctaggaggacaccatgccagagaggcctggaccccacgctaggctcagtgcctgttatactcttgggacccagcgctttccttctccatcacgtggcatacttggcattatttgttgtttaaaatattgtccttagttttcacctttcctaggagacacaggcagaccctgtgacactacagctggcacacagtaggtgcatcacaaacatctgctgagttcacacactcttgccttctcaaaccttcttgtcaagtcttcagtgaaaaggaattgctgattgagcaagaattaaacttctagagactcctggatccactgaagtttgagacaaggtgagatttgtttactgccatattcctagctcatagcatactgtagtcacttaaaaaatgtttgttgaataagtgagtgaattgattcaattgtcatacttagctatatattttctgagtaaaactgataaatttaatagtttacttctagtataattttactttacttattcaatgaacctgacaattcaactaggtgccaggcacactgctgctgaagaaaaagaggtataagatacaacttctgtctataagaaagccacagtctaaaaagtagaaacatatgaacaaattataacaataaataggctaaattcaaaatcagagggatttgtttctattttaaacagctctagtcaggaagtgttagaaagttctaaacaggaaatgttccaacacaccatctaagtatgaagcagaagtcacccataattgagtttgctgccaccaaccccaatagcaagaattccagtcctgctgctgcaaagtgtcactctgattttattactgctgtgtaacccagttttagacactctggttgtcacttaatgttctaaaaaagtattaaagagaaaatattattatggtgatgagtccatccactgcagccatctcaacatcataccaattataaaccctatcatttaaaaagaaaactgttagtttaacttatttatccaaatatcagtaatacataagcatatttgccatcagactttggatttatgggttaaatagcatataaatatgattagagccttaaagtttacacttttctggttcgctcaaatgttttccaaaatagcatatgcctttctaaacaattgttagtatattttttaaaatgaacattaaaatgtatattttctgaaaacaaatacagctcccattggtgaatgatgatattgagatacgacaggcaacttctcttgggaaccatttaatcagtgctcacttttacacccttttccgaaatgtcaatggctttaaaatatagaagtatattatacaactaaacttaacacttattcagtattgtgcaatatttagtacttgttctagctatctcttgctgaatagtaagccattccaaaacttaaggaattatttattgtttaatattgtttattgttattatttgtttagtaattttaaataacattatttctcatggttttgtgggttgatgggcactacaaaagttctcttttggagtgtttcttgcagttgtggttggttggctgctgctgaagtcacctgaaagctcaactaggctaaagagcctagacaggtcactcacatggctggcagtgcatattggctgctgagtgtgatgcctatctgtcctctccatgttacctggagtcctcacaacgtggtagttggtcccaagacacacaggcaaataccacaaagcttcttatgacctggccttggaggtcctagaatatgacctctgctgcatcctattggtaaagcaagtcattgtgaccagcacagattcaagaaatgggacagtagactctacctgtcaaggtaaagagcagcatgtgcatgcagggaggaaagaaattgagggcatcatcttgaagactatcatatcacacyattattccagctaatgaacattatgttttagatgggtagtactagctactcatgtctcccccagaaacccaagctaggcatggacatattgaagactatcatatcacaccattattccaactaatgaacattatggtttagatgggtagtactagctattcatctcttccccagaaacccaagctaggcattgacatactgaaaagaatgtcaataccattaaaaaactctagaaaaattatatgtgatgactgaggttaattcagtctgtcaattacatcaatataattcccttcttgtaacactaaatatggtgaaacagaattgaattctacaaaagtatttcatctgttttcctatggaataattaacaaaccaaataaatgtataaatagtatgaagtccaatttatcttagatttttacctcttaatttcaaagctgatagaaatcagagaactaatcatcataatccataatgcctggaccagaagtccttattctaagactattttgtggcatgctaaaaatgtattactaactaggaaatttaaaacttttttgttagcgattttaagagagctgactaactcatcagcacaattcacacagatgaaaaatggaagttaatctgctgagtggattcatagtgatcagaaaaaaatcacaaagaggaaaggagatagagaaggaggggaaacatactgtcaatccctacaattaaagtgatttttcaaatgatttgattttgtatttgcaaaggaaaggcagcttattgtgatagaataaggatcccacttctatatcttttttttttttttttttttttgggacggaatctcactctgtcgtccacgctggagtgcagtggtgcgatcttggctcactgcaagctctgcctccccgattcacgctattctcctgcctcagcctcctgagtagctgggact

SEQ ID NO: 700788 - DNA, 626 bp, Homo sapiens
tttttttttttttttttttgagacggagttwcgctctgtcgcccaggctggagtgcagtggcgcgatcttggctcactgcaagctccgcctcccaggttcacaccattctcctgcctcagcctcccgagtagctgggactacaggcgcctgccaccgcgcccagctaattttttgtatttttagtagagacggcgtttcaccatgttagccaggatggtctcgatctcctgacctcgtgatccgcccgcctcggcctcccaaagtgctggaattacaggcgtgagccaccgcgcccggccggtaacttaattttcaaactttgaagcaaacagtcacaggcctaagttattgcattatcaccattcagcatttcttctgaataaatattacaaaaaatataataggtgtgaagagaaattcagagaggtgagggaggacgtgtagggttttcagctttatttcctgcttctcctgagttgcacgtgggaacacagatgatgccagtacatgcctgatcgggaagtgacggcacagttacagtcctgccggtatgctcacgcaagtgggtctttttctcatctcttttgaagataatttattgggaaggtgcctacattctgtccag

SEQ ID NO: 700789 - DNA, 626 bp, Homo sapiens
tttttttttttttttttttgagacggagttacgctctgtcgcccaggctggagtgcagtggcgcgatcttggctcactgcaagctccgcctcccaggttcacaccattctcctgcctcagcctcccgagtagctgggactacaggcgcctgccaccgcgcccagctaattttttgtatttttagtagagacggcgtttcaccatgttagccaggatggtctcgatctcctgacctcgtgatccgcccgcctcggcctcccaaagtgctggaattacaggcgtgagccaccgcgcccggccggtaacttaattttcaaactttgaagcaaacagtcacaggcctaagttattgcattatcaccattcagcatttcttctgaataaatattacaaaaaatataataggtgtgaagagaaattcagagaggtgagggaggaygtgtagggttttcagctttatttcctgcttctcctgagttgcacgtgggaacacagatgatgccagtacatgcctgatcgggaagtgacggcacagttacagtcctgccggtatgctcacgcaagtgggtctttttctcatctcttttgaagataatttattgggaaggtgcctacattctgtccag

SEQ ID NO: 700790 - DNA, 1936 bp, Homo sapiens
attttaaattaaaaatagcaatatgaactaattatttagaaaaaatgcaaccattggttgtaaaaacagcaataggttttagagaccagaaatgtgggcaaaggcatattttttatattcttaagagccatttggtatttttagttaaaaactgcacatattacttcaatacaaagttttaaaatcaggttattctatagtaaacttcattgtagctaaatctgcatattatgtctgtcattgttttttcagttacagttctaggaattgaatttctgtgtgaaaggcatattcaatattaaacattttcacactattaccaaaatgcttttctgaagatttaaacatctttccatgagctttcttcacagctttcccattcagctaytgttcataaagtttttgcagttatggctagatgataaactagaaatattttcattgtatatgaacaagtctaataaagataaagaactacttcatagaaaaataattcatgaatacatacatcagtttacaaaaaagatgagttcatgaataccataaaatatagcttttttgtctatttgggttattgattttgcatttacttcaatcttaactctaccttaatatctcattttttattccctggaagataattttttttaaaaagggcaatagaaattccatagaaaacaaacaaaaaatctacatgtatctattttttgctaaacctgaatgcagcaaaatagcatttttagcttataacttctttgagcaatgatcggttgggctgtaagataaaaatatttgctttttttatgctgtgttctttccatagtcaataaaaagcatcccacattttactggcatttctatgtcaacatgtctaaaataatctaattttgatcatggaagcactacacatctgattcaaatatgaatctaattctattacttctcttaccccattggttcacaaaatcacaataagagtgctcctaaatatttttttccctcaatggaaaccgccttcattcacacacttctttcataccttcactaaaaataaatccccaaactgatatacttgcttacagtatatttcctttttaatcctttctcctccttctatgtggagtcctctttcagaaataacaaatctgagtttgtttcttcctttagtggcaccctacctatgttataaagcccaaactccactggacatgctaacggtaattcctgacctggcctgtgccttgttctccagcctcttttcacatgctgtttcctcagatcaagtatttcaacatgtcaaactctttatatttccctgtccacaatatactgtttcattctcactgctttgcacatgaaatctttacctccttatgtaatcttcaaatgtccaataatgatataatatttagaatagatgtatatattatagtaaatcaagataggatgaacaatacgtataacaaagtaagcaatggtggtttctgttttaataaactgaattacttggctttcttgcatttggatgactaaaaattacttcagtataaattctaagtatttacctacaaattcggtgtggaaatatgaaacaagacaatgtatatttaggatatatagggcatagacatatattattccatagcaagaaacattatttaaagagtttatctttttacttgtttcagaaagtctttgaataaggtaactttgtgcttaattcagctaccctaaatatcgactgttgctattctaagtttgctcttcaaatcagcatcagtatcacctggaaatgcgtgaagatacagagtctcaggtatcgccagtattcctaaatcaaaacttgcattttaatgagatttccagatgatttatagagatattaaaattcaagaaacactaacttttcgagtatgtgtcttataaacctcctact

SEQ ID NO: 700791 - DNA, 611 bp, Homo sapiens
taccagtatgagtacctttttttttttttttttttttttgagacgaagtctcgctctgtcacccaggctggagtgcagtggtgcaatctcggctcactgcaagctccacctcctgggttcacgccattctcctgcctcagcctcccgagcagctgggactacaggtgcctgccaccacgcctggctaattttttgtatttttagtagagacagggtttcaccgtgttagccaggatggtctcgatctcctgacattgtgatycgcccacctcggcctcccaaagtgctgggattacaggcatgagccatggcgccgggtcgattaccttgaaattgatgtccagactttaataagcagactcaactagcacataattatttctacaaaatcacaccaagttctacctggcctgaaacagcaatatctctgaaactgaatatcttttttaaactttctcaaaaacacaccctaatcactccaaaaacagctaaattaaagcaatttaaccatccttaaattctaaactgataaaaagagatcattcaattaatcattttaaaagggcatactatatgttacaaattaagtccaaggtcctgatttcttttaa

SEQ ID NO: 700792 - DNA, 611 bp, Homo sapiens
taccagtatgagtacctttttttttttttttttttttttgagacgaagtctcgctctgtcacccaggctggagtgcagtggtgcaatctcggctcactgcaagctccacctcctgggttcacgccattctcctgcctcagcctcccgagcagctgggactacaggtgcctgccaccacgcctggctaattttttgtatttttagtagagacagggtttcaccgtgttagccaggatggtctcgatctcctgacattgtgattcgcccrcctcggcctcccaaagtgctgggattacaggcatgagccatggcgccgggtcgattaccttgaaattgatgtccagactttaataagcagactcaactagcacataattatttctacaaaatcacaccaagttctacctggcctgaaacagcaatatctctgaaactgaatatcttttttaaactttctcaaaaacacaccctaatcactccaaaaacagctaaattaaagcaatttaaccatccttaaattctaaactgataaaaagagatcattcaattaatcattttaaaagggcatactatatgttacaaattaagtccaaggtcctgatttcttttaa

SEQ ID NO: 700793 - DNA, 655 bp, Homo sapiens
agagaatctcactctgtcacccaggctggagtaaagtggcacaatctcagctcactgcaacctccgcttcccaagttcaagcaattctcctgccttagcctaccgagtagctrggactacaggcgcacaacacctcacccagctaatttttgtatttttagtagagatggggtgtctcaccacattggccaggctggtgtcaaactcctgaccttaagtgattcacccacctcggccccgcaaagtgctgggattacaggcgtgagccaccacacccagacagtggcctatttttagattacgttccatgcttctttttccctaacagatttgttgactgattcaatcaaactaacacttgagacattactataagctttacactgtttttcatgttagaaaaattttattttatttttttaatttttgagacagagtctcactcttgtcacccaagctggagtgcaatggtactatctcagcccagtgcaacctccacctcccgggttcaagtgattctcctgcctcgacctccccagtagctgggattacaggcatctgccaccatgcctggctaatctttgtatttttagtagagatggggtttcaccatgttggccaggctggtctccaactcctgacctcaggtgatcca

SEQ ID NO: 700794 - DNA, 634 bp, Homo sapiens
cacctatatctatatggatatatatgagcacatacatatgaacaaatatatagaaatgtatacctttctgtatacatttatacacataattggaattgtatggcgtataatgattttatggtctacttaagcaatatagtattaaaaatgcataaacatcaacatcaacctgtttactgatcacctaatgttccagtgttcaattatacactgtaatttacctattttggaatatttaggtcattccaacttttttagtattataagtaatactgtggtggacattatggcttaaaagtcttcatctgaatctcagattatttgctcatgatgtatacttagaagtagaattactgggtataagcacaatttttaaggctttttatactcatagccaagttgcagtcttcaatttatatgcttattgctaatatatgagagtatcagcatcactcactgcatataatattgttattaaaaagcaattgccaattttttgttaaaatkgtatattggtatttcacatgattcatagtgagtttaaaactgtttttacattttcaacctcatgccatctcctatggcaccacatttatcattttgcccctcttagctggtggataataactaaatt

SEQ ID NO: 700795 - DNA, 660 bp, Homo sapiens
ttaactttcattggtttcagtatcatattctcattgagtaactgcttctcaagttggaatgagayagttatttcatcattttctaaaatttcttaaatagccaaatagctctaactttaacacaatgataaatgtttcactatttcacaattatgtgaaacaacaagctataaaccaacgaagcatctacagagcatactcaaatatttcgtttgtaactatactaaaaaactctcattatctagatcactaccaatattaattactgacttgcattttgtggttttgtttttattgtttaaagaataaggggaaaaggccgggtgtggtggctcatgcctgtaatcccagcactttgggagggtgaggtgggcagatcacaaggtcaggagatcaagaccatccgggctaacacagtgaaaccccgtctctactaaaaatacaaaaaattagccaggcgtggcagtgtgcgcctgtagtcccagctactcgggaggctgaggcaggaggatggcgtgaacctgggaggcggaggttgcagtgagccgagatcgcaccactgcactccagcctgggtgacagagcaagactctgtctccaaaaaaaaaaaaaaaagaaaagaaaagaataagggaaagaattagttgcaggtatgtaaga

SEQ ID NO: 700796 - DNA, 586 bp, Homo sapiens
agaggtggtctcactatgttgctcaggctggtcttgaactgaaacaacccatcagccttggtctcccaaagtgctgggatyacagaccaccacaccaagccaccacacccagtcatctaattttaagaatgaaattcattttaggctgggcacggtggctcatgcctgtaatcccagcattttgggaagcaaggcgggtggatcacttgaggtcaggagttcgagaccagcctagccaacatggtgaaaccctgtctctaccaaaaatacaaaaaaattagccaggtgtgttggcgtgtgcctatagtctcagctactcaggaggctgaggcaagagaatcagttgaacccaggaggtggagtttgcagtgagctgagatcgtgccactgcactccagcctcggcagcgaaacaagactctgtctcagaaaaaaaaaaaaagaaaagaaaaaaaataaattcattttaagaatgaaatttgggttgtgtgtggtggctcaagcctgtaatcctagcactttgggaggcggagacaggcagattgcttgagcccaggactttgagacctgtctgggcaacatggcga

SEQ ID NO: 700797 - DNA, 586 bp, Homo sapiens
agaggtggtctcactatgttgctcaggctggtcttgaactgaaacaacccatcagccttggtctcccaaagtgctgggattacagaccaccacaccaagccaccacacccagtcatctaattttaagaatgaaattcattttaggctgggcacggtggctcatgcctgtaatcccagcattttgggaagcaaggcgggtggatcacttgaggtcaggagttcgagaccagcctagccaacatggtgaaaccctgtctctaccaaaaatacaaaaaaattagccaggtgtgktggcgtgtgcctatagtctcagctactcaggaggctgaggcaagagaatcagttgaacccaggaggtggagtttgcagtgagctgagatcgtgccactgcactccagcctcggcagcgaaacaagactctgtctcagaaaaaaaaaaaaagaaaagaaaaaaaataaattcattttaagaatgaaatttgggttgtgtgtggtggctcaagcctgtaatcctagcactttgggaggcggagacaggcagattgcttgagcccaggactttgagacctgtctgggcaacatggcga

SEQ ID NO: 700798 - DNA, 713 bp, Homo sapiens
  misc_feature 159: n = A,T,C or G
tgtttttgccaaatgatgtgatactttccaaagcaccttgagtgtgaaatgtcaacagaaatatcagcaagcttttatctgaagtattatggtacctctgaattagcctgtatagttctcttcctgctataagcattacctggttagctcagacggctngaggcagtcccttaataatagggatgcttttcatctctaaggatgtaagaagcaaaccaatcatgtcattctttaagtgggctatgctttgatgaagtgctctttaaaggtgtgagattggaattwaagttgcttacattgaaatgtttgcattgcaccaaaggagctcagttttcaaactttaatggaaccttgggtaaagggaaaaaatttttaatgaaatctggggttttatattttgattagcctaaaagtaaaaatacagctttatccattaagtgacttttaaaaatcagttttgccataccaaagaaattagattcttagtgtcacatgctatacttttgtctgtgcttgaaacgagcaatgccaacattgggagcaatgacagaggtttgcatcagtttgtcttggctttgttaaggacttctgccagaaatgtgctcgtggttgacaacccaggatcattgttcaagttcttatgcagacacctttgaaaacaattcagatcgtgtcacaagaatttggaattgaaaatatcatttattttttaa

SEQ ID NO: 700799 - DNA, 713 bp, Homo sapiens
  misc_feature 159: n = A,T,C or G
tgtttttgccaaatgatgtgatactttccaaagcaccttgagtgtgaaatgtcaacagaaatatcagcaagcttttatctgaagtattatggtacctctgaattagcctgtatagttctcttcctgctataagcattacctggttagctcagacggctngaggcagtcccttaataatagggatgcttttcatctctaaggatgtaagaagcaaaccaatcatgtcattctttaagtgggctatgctttgatgaagtgctctttaaaggtgtgagattggaattaragttgcttacattgaaatgtttgcattgcaccaaaggagctcagttttcaaactttaatggaaccttgggtaaagggaaaaaatttttaatgaaatctggggttttatattttgattagcctaaaagtaaaaatacagctttatccattaagtgacttttaaaaatcagttttgccataccaaagaaattagattcttagtgtcacatgctatacttttgtctgtgcttgaaacgagcaatgccaacattgggagcaatgacagaggtttgcatcagtttgtcttggctttgttaaggacttctgccagaaatgtgctcgtggttgacaacccaggatcattgttcaagttcttatgcagacacctttgaaaacaattcagatcgtgtcacaagaatttggaattgaaaatatcatttattttttaa

SEQ ID NO: 700800 - DNA, 1035 bp, Homo sapiens
  misc_feature 35: n = A,T,C or G
ggcgtgagccactgcgcctggccaacatgcagttntaacttctgtgatacgtcacctaactcctcgtgaagacattgtctaggagataatgtcagttagaaatgcaaaatttctgccaggtgcagtgggctcacacgtataatcccagcacttagagaggctgaggcaggagaaattgcctgaatcaaggagtttgagaccagcctgggcaagatggtgagactccatctctacaaaaaatcaaaaagttagctgggcatggtggtacatgcctgtgatcccagatacacaggaggttgaggcaggagaatcagctgagtccaggaggtygaggtagcagcgagccatttgcatcactgcactccagccatggtgaagtagggcctgtgagaccctgtctcaaaaacaaacaaaaaaaaatttctaaatttagattagaactttacgtacatatgtatgactatataaagctacttagtttacaaacaagttgttatctgtaccaatttaattaccatatcttgttttataaatttttatattaaagtttattcatcttggccaggcgcagtggctcacgcctgtaatcccagcactttgggagatcgaggcgggtggatcacctgaggtcgggagttcaagaccagcttggccaacatggtgaaaccccatctctactaaaaataacaaaaattagctgggcgttgtggcagacacctataatcccagctatatggaaggctggggcaggagaatcgcttgaacctggggggcggaggttgcagtaagctgagattgcgccattgcaccccagcctgggcaacgagtgaaactccatctcaaaaaacaaaaacaaaaacacctcccaccccgccaaaacaaaacaagacaaaaaaactgtacacaaatgtatagctctattcacagttgccaaaacctgaaaacaacctaaatgtccttcatcaggtgaacagataaactgcagtacatctgtacaattggaatactcctcagcagtaaaaagcagcaaactat

SEQ ID NO: 700801 - DNA, 627 bp, Homo sapiens
tgccaccctgagctgtgtgacattaggccagacccctcttctccaagtgaggtcaaccacatgggtgatttcgggagcctgtgccccagtcagcctggattttaccttcataggtagataggaaactatgagggttcagagatgctgggagaaccttttccctgggagagctttccaaacaggaaacaaacagagccaccctgggccccactgagggaggatcctaccagcactgtcatgctccacgccggtggtgatggtgatgtcatcgatgtaggtggtaggtgtcgtgtacagaagcacagaccrctgcagtcccgcgtagttgaagaagtcaaagtctgtgttctggacaaagtaacccttgggatacctagggtcggaggacagtggttcgctgggcccttgccctgagtcccttgacctcagctcacaggtctcctcagatccaggtcctccactctgccaaggccaccctgtccctagcaggaagaccacagggtgggatgggaaggtaggtgcatgcggtggagacaagatggtatccacttggaggtgttgatcatgtagcagatggtccctggtggcagggtggagggggtgagcgtattattgatggtgatagtg

SEQ ID NO: 700802 - DNA, 658 bp, Homo sapiens
tgaaaataaactattaatgtatcataaagaactagaaaagctagaacaaaccaaacccaaaattaggagaacagaaataataaggatcagagcagaaacaagtgaaaataaaacaagaaatacaaaagaagagcataatgtaaagtgagtttttttgaaaagataagcaaaattcatagaactttagccaggctgtttgggattcagggccccatggtgtttgaattatctttaggtctgaagatgccaagtgcattgaaagatggagctggaatggctgattgctcttctgtgaaggtrtttttctagaaacctggttgaactgctccagaagggactgtatatcacaaacaggcagagaaatattctgcctgcaaattacggggcaagccaaagagagaaaagcctctctgaactaaagtattgtgggcacctcatatgtttatatcccgtctggtaattttgtacagtgtttgaataacataattaaaatcaaaattatctccaacctcagagacactcaataatagcagaagaaaaagaacattgttttattaaataaatcagaaggtgatctgcatcacagcaaatctgccaagattgttcttaaatagacttaacagcacaattgtcatacatagttgatcctaaattcatt

SEQ ID NO: 700803 - DNA, 618 bp, Homo sapiens
agatcatgaggttaggagattgagaccatcctggctaacatggtgaaccccgtccctactaaaaatgcaaacaattagccaggtgtggtggtgggcgcctgtagtcccagctacttgggagactgaggcaaaagaattgcttgaacctaggaggtgtaggttgcagtgagccaagactgtgccactgcactccagcctgggcaacagagtgagactccatttcaggaaaaaaaaaaaaaaaaaaaagatctagaatcaaatccacttgaaatagcttgataattctgtctaagccagaatatagaggaggaaaactaaaaccatatttttgttaatctaaatgaaaagagttcagggcattttaggcatcaatacctgtggagcatacccttaacatctgtcagcaattccaggtttgaactgcatagaattggcctctacctcccccagtagatgtttaaatgtagaaacataatccraaaattttacaaggttttcacttagttttgctaaaatgtccatctctttatcttgtttcaattgtgagagtcaattgtgcagcatggatacgattatactctcttcatatgcagaatgtcaccactatagatactttca

SEQ ID NO: 700804 - DNA, 1130 bp, Homo sapiens
ctcattttaaaatgatggataggctcacattacaacattcccttttgacacttgtgggcaagagtaatcagacaccattacctaaagagggaacagggactagggcgagaatactgagggactggggagggatgcatgcactttaccacacagacygtccctagaggccctactgttaaaaagagcagagactgccagaggcggtggctcacgcctgtaatcccagcactttgggaggctgaggcgggtggatcatctgaggtcaggagtttgagatcagcctggccaacatggtgaaaccctgtctcaactaaatatataaaaattagccaggtgtgttggtgggcacctataatcccagctactcaggaggctaaggcaggagaatcacgtgaacccaggagacagaggttgcagaaagccgagactgcaccactgcattccagcctggatgacaaagcaagactccatctcaaaaaacaaacaaacaaaaagggcaaagccctagtattctgctgttgtctccctatacttcctcatcttgccacctgcatagatgacacatggtttctcttcctttctttacaaaggcacgatgaacccaggtgtaattaatcctgaagtagtaaattctttataagcttcacaagtacagtaatagagttcaatggtcacaatcatgttttcccttttttgacagtgtaccacattcaaaaatcacaaatgagaaactattggaagtgtgacatgaatgaactattactttcatgtagattaacagccagatttttacagattagatataaaaacaagaaagctggtaccaactttgtgaaagtaactttcttccttccttttttttttttttccttctgttgcccaggctggagtgcagtggtgcaatctctgctcactgcaacctctgcctccaggttcaagcaactctcctgcctcagcctcctacgtagctgagattatgggcacatgccaccatgcccagctcatttttgtatttatagtagagacaggatttcaccatgttggccaagctggtctcgaactcctggcctcaggtgatccacccaccttggcctcccgaagtgctgggattacaggcctgagccactgcc

SEQ ID NO: 700805 - DNA, 1130 bp, Homo sapiens
ctcattttaaaatgatggataggctcacattacaacattcccttttgacacttgtgggcaagagtaatcagacaccattacctaaagagggaacagggactagggcgagaatactgagggactggggagggatgcatgcactttaccacacagaccgtccctagaggccctactgttaaaaagagcagagactgccagaggcggtggctcacgcctgtaatcccagcactttgggaggctgaggcgggtggatcatctgaggtcaggagtttgagatcagcctggccaacatggtgaaaccctgtctcaactaaatatataaaaattagccaggtgtgttggtgggcacctataatcccagctactcaggaggctaaggcaggagaatcacgtgaacccaggagacagaggttgcagaaagccgagactgcaccactgcattccagcctggaygacaaagcaagactccatctcaaaaaacaaacaaacaaaaagggcaaagccctagtattctgctgttgtctccctatacttcctcatcttgccacctgcatagatgacacatggtttctcttcctttctttacaaaggcacgatgaacccaggtgtaattaatcctgaagtagtaaattctttataagcttcacaagtacagtaatagagttcaatggtcacaatcatgttttcccttttttgacagtgtaccacattcaaaaatcacaaatgagaaactattggaagtgtgacatgaatgaactattactttcatgtagattaacagccagatttttacagattagatataaaaacaagaaagctggtaccaactttgtgaaagtaactttcttccttccttttttttttttttccttctgttgcccaggctggagtgcagtggtgcaatctctgctcactgcaacctctgcctccaggttcaagcaactctcctgcctcagcctcctacgtagctgagattatgggcacatgccaccatgcccagctcatttttgtatttatagtagagacaggatttcaccatgttggccaagctggtctcgaactcctggcctcaggtgatccacccaccttggcctcccgaagtgctgggattacaggcctgagccactgcc

SEQ ID NO: 700806 - DNA, 1276 bp, Homo sapiens
aaacagcctcacataacacagagtttaagagactataagccttgaaatgtatttgtaatggaaaagctaactcacattcaagtaattgtcagcatcaaaaaattgtaaagcaaatattctaaaaagtaagggcaaacagtttatgtcaaaaatacaataaagtcagaaaataaaatgtgtatatgtcacagggagtaagaggggtttcggggtggaatctcagatgtggttttttaaaaatattttaattatatttaaaatggatttcataaaataaatcacatattaatttgttttgttactgaatgcttataccaatttctatcttcaacaaataccaagtccccgcaggattttgtaaatccatatgttagaggaaatgacaaaagtattaaaagattttatatgagcatcaactgcttacactcctattaggggctttagttctgtctaattcattgttcaattcataaaaggaccacttgataaacaatacatacccaaagctatagtggtaagcttagcagacacgtacagacatgcaatctgaatgatgcacttttcctttactagtaacaacgcatgaatacgtctatgtatctggcacaaatgccagataaataaagggactagatcatgtaatagatcaagttttaaccattcaactcacaaaatacagagagatctaaaagcaattaagttcccctcctcccattttaataaatgtcctttagataagcagcacgttcagcctgcatctgaaagaaagcaggagagtggaatggacaarcctgagggtaactgtcctagctacccgaggatcccccttaaggatcagtcaatcttaggccaggcacaactcatgtctgtaattccagcactttgggaggcaaaggcgagaggatcacttgagcccaggagtttgagaacagcttggacaacacagtgagaccctcttctctgcaaaaaaatttaaaaataaaaaaattagctggatgcatgcgtgtagtcccagctacttgggaggctgaagtgggaggctcgcttgagctcagggggtagaggctgcagtgagtcaagatcacaccactggcactccagcctgggtgacagagagagacagaccctatttcaaaaataaataaagaaaaaagaatcagttaacgttcagaggatgagaaaaagggtggaatgtaatattacatttttattattacataaatacaaaaattgttgggatccatgaaaataagaaaagaaggaaaatgatttacta

SEQ ID NO: 700807 - DNA, 2473 bp, Homo sapiens
  misc_feature 1744, 1745, 1746, 1747, 1748, 1749, 1750, 1751, 1752, 1753,1754, 1755, 1756, 1757, 1758, 1759, 1760, 1761, 1762, 1763,1764, 1765, 1766, 1767, 1768, 1769, 1770, 1771, 1772, 1773,1774, 1775, 1776, 1777, 1778, 1779, 1780, 1781, 1782: n = A,T,C or G
  misc_feature 1783, 1784, 1785, 1786, 1787, 1788, 1789, 1790, 1791, 1792,1793, 1794, 1795, 1796, 1797, 1798, 1799, 1800, 1801, 1802,1803, 1804, 1805, 1806, 1807, 1808, 1809, 1810, 1811, 1812,1813, 1814, 1815, 1816, 1817, 1818, 1819, 1820, 1821: n = A,T,C or G
  misc_feature 1822, 1823, 1824, 1825, 1826, 1827, 1828, 1829, 1830, 1831,1832, 1833, 1834, 1835, 1836, 1837, 1838, 1839, 1840, 1841,1842, 1843: n = A,T,C or G
ttatttgccatgtattttttttaaataagcataacctgaactagggagatattggcaattaatgtaatgatttacatgatagacttggctttaaacaataggccaatgggtgataaattagattatacctggcttacacaagaaatgccattatttaaagaaattccaatgctagattactacatcaccattttctttcatattaactaatttttyaaactgaaattgttatatggccatttacataagatgagagactcctgcattattatccttggtagtaacgtaacatactcaaaaatatactccaaggagtaggcaacactttagagtgtgtgtgtgtgtgtagggatccacgactggaaatacttgttactggtttgcagcatctaggagtagtgctctttacagattgacaaagtggtactttgttatacatgtatcctttgttttgattaattttcctcctagtatgccatgtcctgcatcttgtattttaaactgcattttcttatttattctactcttagacctttagtttccagaaactgaccagctatcaaacacatatattaaatattatgcaattagcttatgtgagaatagttattgagtcccttcttccttagcttttccttttgcccattttcttctcatcacctgtgtaaccacataaaagcaaagagtatgatttgactcgcttttgaaaggtggctttgcatggagcagttctccataagtgatagtctcaaatgtttcacttactaattttatttaccttccattgttttcagaacatcacttttcttctttttttttttttccctgcctttcctagggtccaaatgtgagtctatatttcagtgccattatttccttaagcaaagaatgagctccaagtttaggtcaaatgcaacagatagctatgttattactctacagctaataatcactaagctctgagggagagcttagtgatttatttctcttatctttcatctgttttctttttattttaactgtgacatgatgtaagtcagaagaataattttgtcagtggggtatactgcatctgtcagagcattttgagaaggaaaatatataaagagggaaatataaagttgctacttgcattttcatccttaatgaggaaaagctaaagttggccatcagtgattgagaacttgggttctccaaagctgttgtatgtatgacaaatgtgtaagggcaagaaggatttttcctcttcctctgaaagaggaagtctgctattattaaccgacagtagacagattaacaggataaaaaacatgtaaatttattaaagtaaatataagcacaggagccacaaaatatgagactcaaagaagggccagatggttgaggcttaaatgggctattcatagggagaaggaaatgaagaatgtaagcaattgtgaggggtagtaaatgattttcgggagaaataaatgggcccaaggagaagatactagtctgtaaattgttctcttagaaaactggccacaatgggcaagtcatgggaaggtgaggggcagaactgcactgcaaacaaagattgtcttattatgcaagcaaggtctcctaggtaatctttcagagctgctcaaaagaatagataaaaagtctgggtgtggtgaaggctttgtctcttctctgtttaatcttggttatcccatgaaattcctagggtggggatcgtaagacaattgcatttcttttggannnnnnnnnnnnnnnnnnnnnnnnnnnnnnnnnnnnnnnnnnnnnnnnnnnnnnnnnnnnnnnnnnnnnnnnnnnnnnnnnnnnnnnnnnnnnnnnnnnngatttaaagtttctctccgcggcctacgccttcaggaaggaacataagagaaaccccccccgggccaaaagctacaattaggcgcaatatgggggagcccaatggtggggcttttgccttcaacctggtcagggcagccctggaaattaaaaattctcggaaaaagttttttctgacactaagcctttctagatagatggcattatttcgaatgctttggtaatcacgttttctgaaccgtgtcagtgtttccagagtagtttcatggctgactctctgggcagacagcctttggtcagtcagacatgaggtatttattgagcaactactatgtaacaagtgctgtgctaaccactggcaaacaagtcagacatgtcccctgacctcacagagctcatgggaaagcacccagaggtgcagtaccaagaatcatggtactctaaatgctactttcctcctatttcctttgaattttaacaatttccaaacccctattagaaaggttttggatcttatttttaactaaaacattttaaaatgtcatacttgtcattctcccttgcccctaaatgtggaaaatatccagtgaattcagcctgatcttttgctttaagtcatccgttcatacac

SEQ ID NO: 700808 - DNA, 2473 bp, Homo sapiens
  misc_feature 1744, 1745, 1746, 1747, 1748, 1749, 1750, 1751, 1752, 1753,1754, 1755, 1756, 1757, 1758, 1759, 1760, 1761, 1762, 1763,1764, 1765, 1766, 1767, 1768, 1769, 1770, 1771, 1772, 1773,1774, 1775, 1776, 1777, 1778, 1779, 1780, 1781, 1782: n = A,T,C or G
  misc_feature 1783, 1784, 1785, 1786, 1787, 1788, 1789, 1790, 1791, 1792,1793, 1794, 1795, 1796, 1797, 1798, 1799, 1800, 1801, 1802,1803, 1804, 1805, 1806, 1807, 1808, 1809, 1810, 1811, 1812,1813, 1814, 1815, 1816, 1817, 1818, 1819, 1820, 1821: n = A,T,C or G
  misc_feature 1822, 1823, 1824, 1825, 1826, 1827, 1828, 1829, 1830, 1831,1832, 1833, 1834, 1835, 1836, 1837, 1838, 1839, 1840, 1841,1842, 1843: n = A,T,C or G
ttatttgccatgtattttttttaaataagcataacctgaactagggagatattggcaattaatgtaatgatttacatgatagacttggctttaaacaataggccaatgggtgataaattagattatacctggcttacacaagaaatgccattatttaaagaaattccaatgctagattactacatcaccattttctttcatattaactaatttttcaaactgaaattgttatatggccatttacataagatgagagactcctgcattattatccttggtagtaacgtaacatactcaaaaatatactccaaggagtaggcaacactttagagtgtgtgtgtgtgtgtagggatccacgactggaaatacttgttactggtttgcagcatctaggagtagtgctctttacagattgacaaagtggtactttgttatacatgtatcctttgttttgattaattttcctcctagtatgccatgtcctgcatcttgtattttaaactgcattttcttatttattctactcttagacctttagtttccagaaactgaccagctatcaaacacatatattaaatattatgcaattagcttatgtgagaatagttattgagtcccttcttccttagcttttccttttgcccattttcttctcatcacctgtgtaaccacataaaagcaaagagtatgatttgactcgcttttgaaaggtggctttgcatggagcagttctccataagtgatagtctcaaatgtttcacttactaattttatttaccttccattgttttcagaacatcacttttcttctttttttttttttccctgcctttcctagggtccaaatgtgagtctatatttcagtgccattatttccttaagcaaagaatgagctccaagtttaggtcaaatgcaacagatagctatgttattactctacagctaataatcactaagctctgagggagagcttagtgatttatttctcttatctttcatctgttttctttttattttaactgtgacatgatgtaagtcagaagaataattttgtcagtggggtatactgcatctgtcagagcattttgagaaggaaaatatataaagagggaaatataaagttgctacttgcattttcatccttaatgaggaaaagctaaagttggccatcagtgattgagaacttgggttctccaaagctgttgtatgtatgacaaatgtgtaagggcaagaaggatttttcctcttcctctgaaagaggaagtctgctattattaaccgacagtagacagattaacaggataaaaaacatgtaaatttattaaagtaaatataagcacaggagccacaaaatatgagactcaaagaagggccagatggttgaggcttaaatgggctattcatagggagaaggaaatgaagaatgtaagcaattgtgaggggtagtaaatgattttcgggagaaataaatgggcccaaggagaagatactagtctgtaaatkgttctcttagaaaactggccacaatgggcaagtcatgggaaggtgaggggcagaactgcactgcaaacaaagattgtcttattatgcaagcaaggtctcctaggtaatctttcagagctgctcaaaagaatagataaaaagtctgggtgtggtgaaggctttgtctcttctctgtttaatcttggttatcccatgaaattcctagggtggggatcgtaagacaattgcatttcttttggannnnnnnnnnnnnnnnnnnnnnnnnnnnnnnnnnnnnnnnnnnnnnnnnnnnnnnnnnnnnnnnnnnnnnnnnnnnnnnnnnnnnnnnnnnnnnnnnnnngatttaaagtttctctccgcggcctacgccttcaggaaggaacataagagaaaccccccccgggccaaaagctacaattaggcgcaatatgggggagcccaatggtggggcttttgccttcaacctggtcagggcagccctggaaattaaaaattctcggaaaaagttttttctgacactaagcctttctagatagatggcattatttcgaatgctttggtaatcacgttttctgaaccgtgtcagtgtttccagagtagtttcatggctgactctctgggcagacagcctttggtcagtcagacatgaggtatttattgagcaactactatgtaacaagtgctgtgctaaccactggcaaacaagtcagacatgtcccctgacctcacagagctcatgggaaagcacccagaggtgcagtaccaagaatcatggtactctaaatgctactttcctcctatttcctttgaattttaacaatttccaaacccctattagaaaggttttggatcttatttttaactaaaacattttaaaatgtcatacttgtcattctcccttgcccctaaatgtggaaaatatccagtgaattcagcctgatcttttgctttaagtcatccgttcatacac

SEQ ID NO: 700809 - DNA, 709 bp, Homo sapiens
attttttgaaaatgatggaagagagacatcaaatgaaacctcaattatggatcttggcttcatggctttgacaaataatttcttactaaaaactgttaatggccctctgctacccacaaatttgaatatgtaaataaatacatctaggcacatcttcctggcttacagatgcagccttcctrtacatttccattcttatctccaatgatatccctgcaagtgttctttgtccaccttagtggcatgacctagatgcttagagtctaggatgtgggactcattttcccctccttgacttgcttatctattttttttttatccttggaacatattctgtggcccatctcacactccaatctctccctaaatccaagggccatcttgcatgctgtttccttcacaaaacctagtttagcaaatcccctatcacttgttgatctcagcagcctcacataccaactaagtcattgaaaggaatgctctgtggcacccccagcttcaaaatttcataaattctaagtgtctaactgagttttcaaagcatcgatttagtacttctaccacactacttaaaataccccgaatgatagttattttgaaggtatttgtggatttatgtccctagttagatcgtaaactgcttgaggattcaacctgcattaccctttttcttgactccttagcctagtacacaatcatgtatattacc

SEQ ID NO: 700810 - DNA, 1090 bp, Homo sapiens
  misc_feature 381, 382, 383, 384, 385, 386, 387, 388, 389, 390, 391, 392,393, 394, 395, 396, 397, 398, 399, 400, 401, 402, 403, 404,405, 406, 407, 408, 409, 410, 411, 412, 413, 414, 415, 416,417, 418, 419, 420, 421, 422, 423, 424, 425, 426, 427: n = A,T,C or G
  misc_feature 428, 429, 430, 431, 432, 433, 434, 435, 436, 437, 438, 439,440, 441, 442, 443, 444, 445, 446, 447, 448, 449, 450, 451,452, 453, 454, 455, 456, 457, 458, 459, 460, 461, 462, 463,464, 465, 466, 467, 468, 469, 470, 471, 472, 473, 474: n = A,T,C or G
  misc_feature 475, 476, 477, 478, 479, 480: n = A,T,C or G
tctgtttagcaggtgaaaagagtttacaccttaaagtagaatggttttaaaaattgaacattaaaatgttattctgtgttagtgtgggtaataagattaaagaacacagattagttatcaacataaaagaatgggcagaaaagtaaataatgaagggagcaagacaagaaggcagaatgcagtggagatgaacgtaactgatctcattcaaaactcaagggatgtgtcaacagtgagcagtgtgagcctgaggggttttaatcaatcatctggaactgtgggtcactcccgcatggtacatcatgaaattcaaaacaaaacaaaaaaatggagcagaaggaacatcacacacaaccactgaataaagacgaaaaacataannnnnnnnnnnnnnnnnnnnnnnnnnnnnnnnnnnnnnnnnnnnnnnnnnnnnnnnnnnnnnnnnnnnnnnnnnnnnnnnnnnnnnnnnnnnnnnnnnnnataaaacagtggaagggaatcagagcctggttaactgcttgagatctgcaaagtgctaaagatgttttgctttgctagcttagctcctgtcctttaatgaccaatatttaaaagtcttttactttaccctggatgtcagtacatagtctgtttcacggtcagtaaactgaagtttcttttatattaacagaaaattaggttgttttttttttttttttgcatgaactttaggaaatcattttggtcggttttatacaatgtgtaagttaatgtctggaaagatgttttgaamaggatgcaggaattagaaggcacagaaatgataatataaaaatttagatcatatatgaattttttctaaatgttcaagctaattgctttcattagtcatcctgaactgctgcaggtttcatttcccaccaggacagctgtgccttttaaagtaaaaatagtcatttgtattaactataaggaaaaagtggcttcagctggaagaacttaccaaccgaaacactcttgagcttatagaaataactttggtaagtggcctctcttaaaaaggctgctgaaagctctaaaatataaggataaaacatacggtttcagactg

SEQ ID NO: 700811 - DNA, 1624 bp, Homo sapiens
catggcagtattcagaggcccacttcacaggatcatctaaatttctatcctagttctgccacctactagctgtgtatggccttggttaagttcatttgcctctgtgcgtcagtgtcttcattatgaaatcttagttctaggatattttttctaggcaggcctttgcattgtctttgctcaggtaacaggctgttgtaaacagtgcataagttaatattagtaaagcactagaagcagtaactagcatgtatcaagccctatatgcgtttcatattgttatgttgtgaggactatatatgagaacccaaggaatgcactgagcgcgatcctggcaccaggctgacatccagattttagctattagtactgttgtggttgtatttcatgtaactcattaaatttartatgatattatatttaatgtattgtaatatgtttaaatgccagggccaagaaaaggcactgatgataagcaacgtctcttacagcatattccaaagaagaccagtttctgagtgacaagctgagtataatgaatgcttaggttcttaaactgtgtcctattccacttaggcaataaaaatgaaaatccaagatttgatcaaatatcaaactaaccaccagcaagaaaagtccagccccaaagcaaggcggctgggttgaataaagtccagaacttttgttgtcttggtgtttctccttgggtgatgatgtcctgctctcggacacagccctcaatctgtcagaccatcttgagtgtgtatagcctctctccctctttatctttaacttaacctatttttctgctcaaatgaagtgcaatcaagcattccttggtcttcaaagcaagctgggaatccaaaagagatgatagctgtgagttagccttccaggaatgtatttattctgtatctctagttagtatttcatggattgcttttaatcactgcactgctgagtaacggggtcctctttgtctctgagattgtgaaccaatctcacagtgaaccaatcacacagtgattttcttccccagctgtggcacgctcagaaactgcttggaatatactataagaaatgttgcttctcatctgtgcactttcttggccccagtattttaacagtaattgttttcaagggtctagctgtctcagataacaatcttgaacaataccttaaagctccttggacttagagctttagaataggaaaaaaaaaagattcactgagaatgaccacacataccagcactgaagcatctataatttccttaacagttaagatctaggttttgtcactgggtctactcatctctccctctacatctaaggcatactgctctctctttccatctaaggcagatcaaaatcttttttttttgtttttcttttttgagacaaggtctcactgtgtcccccaggctggagtacagtggcatgctcatagctcactgcagcctccatctcctgggctcaagcaatcctcctacctcggccttctgagtagctgagactacaggcacatgccaccacacctagataatttaaaaaaattttttagtagagacaaggtctatgttgcccaggctggtctcaaactcctgagctcaagtgatcctcccacc

SEQ ID NO: 700812 - DNA, 611 bp, Homo sapiens
cacacttacgtacttggggatgacaggtatcctgtcaaccacttggggggatgatagatatcctgtcaacaaccagtacttttaactggttcgagaaaagattttgtactgtgcttccaacttttctataagcttcaggttgtttcaaaaaacaacaaaaacgaaaagtatctgaccctaaggggcctatttagtgtaataattaaatagtaagaatgttgtattataaatgtctggtggtggtgttcattgtggggcatgcgtgtgtttgctgctattttgtgtgtgcacctgacacctacccatcacgcrggcctggcactcatggcccatctggagccaaaccttctgctccttggtttgtctctttagactttgggtcccatctggggcccagttcaatacagtgtgggtaaatccccacagttgatgtggccagtatatttgtaaaacctttaatatctttgaactacatctaatttttaactttctattgcttctggtgttcccaatttcagggatgtaggagatactgaatttaaaagataataaaatattttagcacttaagtgaagactaaagacggccaaggatttttcttttctaaactc

SEQ ID NO: 700813 - DNA, 647 bp, Homo sapiens
tgttacttgtgaaataaatttttaaatttctaaaaactgaaacaacacaaaacaaatgaacctaaatatgtcttcaattagtggaataattttatggagaagagctaacctggttcttctcccatattttcccttccctccagcctttgccatcagaatgtctgaccctaagcctacaacagattaaagtttgtaacagtctcaaaggcaaagcagaagcccgcatttcccctgaagtgttaatgggaagtcctccaacaaaagccaagatctcatttattttctgccttgtttactaaagaattactttcttcatttaggttccttcttcctttctcttctcagcatccttaaaaccacargtgagtgagcaggcttctctcttctaggaatgttcaaagttgggcgccttggaaaatggtagtttcaaagacacaactaggagcttttcaaagaaagatactttcagctagagatagagagcccttgactataggaaccagaattaattaacaacagaaagagtaggaaagcttctgaaactgtagcaggccataggaaggtaaagaagagcataatgcaggtcagaaccaaagaaaatgacaccaaagatcagtaacacaacagcgactgactctagttgccca

SEQ ID NO: 700814 - DNA, 852 bp, Homo sapiens
tggcgttagaaaaaactggagatctcagatatttatggaggcctgcctcaaatagaagcttgccagcaaaatataaacatgagtacgtcrgtgaaattggttggagaataccacagtataattttatcaacaaatcaagactggggagtggctttcatatcaaggtattgctcttaaatttatgcttttcatagtatactgttttctaacttgaattctttatgaatttgcttccaaaggaaatgtcgggtgcttgatttctcattgagacataatgaggtttgagttttgcagaaagacacatgtgtgaataaatgcatgtgctccactcctggagccctttaatacatcaagggaagggtatgaggaaaacaaagccatggataatccaaaagcgtttgtgtttgtctttggaatgtattctgattcacattcaggctgaggcacttgcacacactcttcccccatcctagcactgcttcatgcgtggacgatggaaagaaagaagcctgtgctgggcatcccataatccacaaacctaacacgtgcatctcagatctttaagattcactgtactgataatgccttcgtatcaagtattaataattcagggtatgttgtcagagggttttagaaaccttgtcttatttccttttggtgatgtagacataggcatgagatcctggtgtctcccctgaaacagaagagtgcacaagggattttagaagtaaaatctgagaatttggatatttttttccagacaggcctgtgcattgtctgaaaattaaatgtatcaatcatgcaataactgaatttcctcaaattcttaagtttcatctggtaaaggttaac

SEQ ID NO: 700815 - DNA, 852 bp, Homo sapiens
tggcgttagaaaaaactggagatctcagatatttatggaggcctgcctcaaatagaagcttgccagcaaaatataaacatgagtacgtcagtgaaattggttggagaataccacagtataattttatcaacaaatcaagactggggagtggctttcatatcaaggtattgctcttaaatttatgcttttcatagtwtactgttttctaacttgaattctttatgaatttgcttccaaaggaaatgtcgggtgcttgatttctcattgagacataatgaggtttgagttttgcagaaagacacatgtgtgaataaatgcatgtgctccactcctggagccctttaatacatcaagggaagggtatgaggaaaacaaagccatggataatccaaaagcgtttgtgtttgtctttggaatgtattctgattcacattcaggctgaggcacttgcacacactcttcccccatcctagcactgcttcatgcgtggacgatggaaagaaagaagcctgtgctgggcatcccataatccacaaacctaacacgtgcatctcagatctttaagattcactgtactgataatgccttcgtatcaagtattaataattcagggtatgttgtcagagggttttagaaaccttgtcttatttccttttggtgatgtagacataggcatgagatcctggtgtctcccctgaaacagaagagtgcacaagggattttagaagtaaaatctgagaatttggatatttttttccagacaggcctgtgcattgtctgaaaattaaatgtatcaatcatgcaataactgaatttcctcaaattcttaagtttcatctggtaaaggttaac

SEQ ID NO: 700816 - DNA, 852 bp, Homo sapiens
tggcgttagaaaaaactggagatctcagatatttatggaggcctgcctcaaatagaagcttgccagcaaaatataaacatgagtacgtcagtgaaattggttggagaataccacagtataattttatcaacaaatcaagactggggagtggctttcatatcaaggtattgctcttaaatttatgcttttcatagtatactgttttctaacttgaattctttatgaatttgcttccaaaggaaatgtcgggtgcttgatttctcattgagacataatgaggtttgagttttgcagaaagacacatgtgtgaataaatgcatgtgctccactcctggagccctttaatacaycaagggaagggtatgaggaaaacaaagccatggataatccaaaagcgtttgtgtttgtctttggaatgtattctgattcacattcaggctgaggcacttgcacacactcttcccccatcctagcactgcttcatgcgtggacgatggaaagaaagaagcctgtgctgggcatcccataatccacaaacctaacacgtgcatctcagatctttaagattcactgtactgataatgccttcgtatcaagtattaataattcagggtatgttgtcagagggttttagaaaccttgtcttatttccttttggtgatgtagacataggcatgagatcctggtgtctcccctgaaacagaagagtgcacaagggattttagaagtaaaatctgagaatttggatatttttttccagacaggcctgtgcattgtctgaaaattaaatgtatcaatcatgcaataactgaatttcctcaaattcttaagtttcatctggtaaaggttaac

SEQ ID NO: 700817 - DNA, 2383 bp, Homo sapiens
gacaggtttgagattctcgcctattctggatgtgaaaatgaatcttgagaggtcccrttagtcagaccaacctggccacgggcattgaagcgtggagatgcagcagttcgtggggaaaacccaacggccaggctgaccaaagcgcatgtgcggggttggggttcctgacagacttctagccgaagtttgcttcccattgcctgacctacgctctctatcgtctctccaaatgtcaaggaacatgtggagatggtacctatccccagcgccaagattcgctgtgggactttttttcccctcccctccttagcacagatgagcccagttctacaaccctctattcaacccgtactgatcttattgtttggctgattccccaggtcaatggcagaagtcagtcgacttcttgccaaaacccctctgtaggggcaaagtagacgtccaaccaactgcacaaacctgtcccgtgtcattcgtgggatcttggcacagtcggatcacctgcagggaccagaccctatcggggatagagatgtttgccatccccacgggaggctggcttgcttgccagcgtgttgtgggtggatgtcagtgggtgacagcgacggacgaaggtgtccgatcccgtggctggcgtccaccctagcccggggcaaggggctgacaccaaggaaaggagagaagcatgttgcgtgctgggagctggaagaaggagtccagggtgtccagggggtgcacagggctggctggccaggtctgggagtgaggctgtgcagtcaaacggaggttgtgcagatgcctggggcgttagggcacctcgcgggctgcctatgccataggtgggagggatcccagctggtggcggagctggcgtgagtctgaagaggctgaaggaggccagggctgggggatatgagtcgtctgagagaggggcattgacggcgagacggagagttggctgtgtgagacagagacagagagatagagacatagagacagagagagagagagagacagagaaagacagagagagagagagagagagagagagtgtgagtgtgtgtgtgtgtgtgtgtgcgtgcgcgtctgagtgtgtgtgtgagtgaaggggtgggtggcgtgagaccaaggtgggggagggagggctgagcctgaaggctggtgggaacagtacattttcagccggttggtctgggcaggaacgaagtctgtgtggtcaaaggggacccgcgccggcgagactgggatgctgcttgggctgggcggtcagagtatggagtggggctggggtgaggtggcaagcagcccagggtgggagagacatcgtgacagagcgactggaggccacgtcccacgtcccaaaagggtagggaatgcaactggacccgagacataaataagccgtcttcaggacgcacattcacgtctcaggcatgtgtctggggctgagatgaaaagaggtccgagggagagaaacaaggcagcatcctcgactaaagtggtggattggggttaggttgggagttgcgacatggcggtggtggtgccggcagaatgaggggagagagtgtggagtagccggaacacggtgaatatagacggtgcacatgccacgcgtacactcgtgtggtcgcgttaaggactgtgtgaccaactaggggaaagtgatgagttactccctggagtcgcgacttccttcctactggaagggcaaccatggcatcattttctggatgtggggagccagcgagggggggggagagagagacagagagagagagagagagagaggtcgaggcggtgaaatgtgaagagaaggggtggtgcgagtggctgcaagcccgtggtgcctggcggtgttccgtgaagtgaaatgcgtcgggcagaggcggtggcagggcaatgaagagaaacaggaccaggaggctgccaagttctggtgtctggcgcgctctcgtgtctggaggggttgttgtcaccaaggtgtgtgggtgcggggggtaggctcatccctaagtcagtcgagagaggcacggaagaaagggcagagggccgtcgcgcgtgggagcgcagccggtgccggactcgctcgcgcgccccgagtgtaaggaggcggcagaggcgagcgcagctacgccttggtgctgctgcagcaccaaaatgggagggcgtgctgcatgggccgggaatcgaacccgggcctcccgcgtggcaggcgagaattctaccactgaaccacccatgcaccgatggcaaacgccaacggaagctggcacagcggaactcgccaccagccgccgttcactggtcaccgcctgccgtgggcctccgtcctattgcagcgtccacgagaggctggcccgatggggcgagcagaagggga

SEQ ID NO: 700818 - DNA, 2383 bp, Homo sapiens
gacaggtttgagattctcgcctattctggatgtgaaaatgaatcttgagaggtcccgttagtcagaccaacctggccacgggcattgaagcgtggagatgcagcagttcgtggggaaaacccaacggccaggctgaccaaagcgcatgtgcggggttggggttcctgacagacttctagccgaagtttgcttcccattgcctgacctacgctctctatcgtctctccaaatgtcaaggaacatgtggagatggtacctatccccagcgccaagattcgctgtgggactttttttcccmtcccctccttagcacagatgagcccagttctacaaccctctattcaacccgtactgatcttattgtttggctgattccccaggtcaatggcagaagtcagtcgacttcttgccaaaacccctctgtaggggcaaagtagacgtccaaccaactgcacaaacctgtcccgtgtcattcgtgggatcttggcacagtcggatcacctgcagggaccagaccctatcggggatagagatgtttgccatccccacgggaggctggcttgcttgccagcgtgttgtgggtggatgtcagtgggtgacagcgacggacgaaggtgtccgatcccgtggctggcgtccaccctagcccggggcaaggggctgacaccaaggaaaggagagaagcatgttgcgtgctgggagctggaagaaggagtccagggtgtccagggggtgcacagggctggctggccaggtctgggagtgaggctgtgcagtcaaacggaggttgtgcagatgcctggggcgttagggcacctcgcgggctgcctatgccataggtgggagggatcccagctggtggcggagctggcgtgagtctgaagaggctgaaggaggccagggctgggggatatgagtcgtctgagagaggggcattgacggcgagacggagagttggctgtgtgagacagagacagagagatagagacatagagacagagagagagagagagacagagaaagacagagagagagagagagagagagagagtgtgagtgtgtgtgtgtgtgtgtgtgcgtgcgcgtctgagtgtgtgtgtgagtgaaggggtgggtggcgtgagaccaaggtgggggagggagggctgagcctgaaggctggtgggaacagtacattttcagccggttggtctgggcaggaacgaagtctgtgtggtcaaaggggacccgcgccggcgagactgggatgctgcttgggctgggcggtcagagtatggagtggggctggggtgaggtggcaagcagcccagggtgggagagacatcgtgacagagcgactggaggccacgtcccacgtcccaaaagggtagggaatgcaactggacccgagacataaataagccgtcttcaggacgcacattcacgtctcaggcatgtgtctggggctgagatgaaaagaggtccgagggagagaaacaaggcagcatcctcgactaaagtggtggattggggttaggttgggagttgcgacatggcggtggtggtgccggcagaatgaggggagagagtgtggagtagccggaacacggtgaatatagacggtgcacatgccacgcgtacactcgtgtggtcgcgttaaggactgtgtgaccaactaggggaaagtgatgagttactccctggagtcgcgacttccttcctactggaagggcaaccatggcatcattttctggatgtggggagccagcgagggggggggagagagagacagagagagagagagagagagaggtcgaggcggtgaaatgtgaagagaaggggtggtgcgagtggctgcaagcccgtggtgcctggcggtgttccgtgaagtgaaatgcgtcgggcagaggcggtggcagggcaatgaagagaaacaggaccaggaggctgccaagttctggtgtctggcgcgctctcgtgtctggaggggttgttgtcaccaaggtgtgtgggtgcggggggtaggctcatccctaagtcagtcgagagaggcacggaagaaagggcagagggccgtcgcgcgtgggagcgcagccggtgccggactcgctcgcgcgccccgagtgtaaggaggcggcagaggcgagcgcagctacgccttggtgctgctgcagcaccaaaatgggagggcgtgctgcatgggccgggaatcgaacccgggcctcccgcgtggcaggcgagaattctaccactgaaccacccatgcaccgatggcaaacgccaacggaagctggcacagcggaactcgccaccagccgccgttcactggtcaccgcctgccgtgggcctccgtcctattgcagcgtccacgagaggctggcccgatggggcgagcagaagggga

SEQ ID NO: 700819 - DNA, 2383 bp, Homo sapiens
gacaggtttgagattctcgcctattctggatgtgaaaatgaatcttgagaggtcccgttagtcagaccaacctggccacgggcattgaagcgtggagatgcagcagttcgtggggaaaacccaacggccaggctgaccaaagcgcatgtgcggggttggggttcctgacagacttctagccgaagtttgcttcccattgcctgacctacgctctctatcgtctctccaaatgtcaaggaacatgtggagatggtacctatccccagcgccaagattcgctgtgggactttttttcccctcccctccttagcacagatgagcccagttctmcaaccctctattcaacccgtactgatcttattgtttggctgattccccaggtcaatggcagaagtcagtcgacttcttgccaaaacccctctgtaggggcaaagtagacgtccaaccaactgcacaaacctgtcccgtgtcattcgtgggatcttggcacagtcggatcacctgcagggaccagaccctatcggggatagagatgtttgccatccccacgggaggctggcttgcttgccagcgtgttgtgggtggatgtcagtgggtgacagcgacggacgaaggtgtccgatcccgtggctggcgtccaccctagcccggggcaaggggctgacaccaaggaaaggagagaagcatgttgcgtgctgggagctggaagaaggagtccagggtgtccagggggtgcacagggctggctggccaggtctgggagtgaggctgtgcagtcaaacggaggttgtgcagatgcctggggcgttagggcacctcgcgggctgcctatgccataggtgggagggatcccagctggtggcggagctggcgtgagtctgaagaggctgaaggaggccagggctgggggatatgagtcgtctgagagaggggcattgacggcgagacggagagttggctgtgtgagacagagacagagagatagagacatagagacagagagagagagagagacagagaaagacagagagagagagagagagagagagagtgtgagtgtgtgtgtgtgtgtgtgtgcgtgcgcgtctgagtgtgtgtgtgagtgaaggggtgggtggcgtgagaccaaggtgggggagggagggctgagcctgaaggctggtgggaacagtacattttcagccggttggtctgggcaggaacgaagtctgtgtggtcaaaggggacccgcgccggcgagactgggatgctgcttgggctgggcggtcagagtatggagtggggctggggtgaggtggcaagcagcccagggtgggagagacatcgtgacagagcgactggaggccacgtcccacgtcccaaaagggtagggaatgcaactggacccgagacataaataagccgtcttcaggacgcacattcacgtctcaggcatgtgtctggggctgagatgaaaagaggtccgagggagagaaacaaggcagcatcctcgactaaagtggtggattggggttaggttgggagttgcgacatggcggtggtggtgccggcagaatgaggggagagagtgtggagtagccggaacacggtgaatatagacggtgcacatgccacgcgtacactcgtgtggtcgcgttaaggactgtgtgaccaactaggggaaagtgatgagttactccctggagtcgcgacttccttcctactggaagggcaaccatggcatcattttctggatgtggggagccagcgagggggggggagagagagacagagagagagagagagagagaggtcgaggcggtgaaatgtgaagagaaggggtggtgcgagtggctgcaagcccgtggtgcctggcggtgttccgtgaagtgaaatgcgtcgggcagaggcggtggcagggcaatgaagagaaacaggaccaggaggctgccaagttctggtgtctggcgcgctctcgtgtctggaggggttgttgtcaccaaggtgtgtgggtgcggggggtaggctcatccctaagtcagtcgagagaggcacggaagaaagggcagagggccgtcgcgcgtgggagcgcagccggtgccggactcgctcgcgcgccccgagtgtaaggaggcggcagaggcgagcgcagctacgccttggtgctgctgcagcaccaaaatgggagggcgtgctgcatgggccgggaatcgaacccgggcctcccgcgtggcaggcgagaattctaccactgaaccacccatgcaccgatggcaaacgccaacggaagctggcacagcggaactcgccaccagccgccgttcactggtcaccgcctgccgtgggcctccgtcctattgcagcgtccacgagaggctggcccgatggggcgagcagaagggga

SEQ ID NO: 700820 - DNA, 664 bp, Homo sapiens
aagttacttaacaaaaaattggtgtacccagggttcaaaactaggtcagatgactctggagcaaattaagcacagctttttttttttttttaaaatacagacagggtcttggttaattgcccaggctggtgtcaaactcctggactccagtgaccctcccatcttggcctcccaaagtgctgggattacaggtgtgagtaataataagcttgtttcttagcttatgaagttgagagcaaggccctggactataatgatgtcatcattcattaagggacccatgcatcagctagctgccctctaccaagaagtgctgtttcacatcrttgggtaccagccatcttttcaactgacatttccacataaagagagctactgtgaagagagactccaaatgcatataacttataatttgttagattgtaagttataagatttactttattatttttattagagacatttataatttacagacatttaattagagatatcatagtttattagtgacacttcctaaagctctaagcgtactgtgcttctgcagctataacagtcacctaaatgttgagtagttaacaggaaaattactagaaacagaaaatagcatttgtatttggaactttgagagtagttctagttgttatgttttaaaaagacctca

SEQ ID NO: 700821 - DNA, 664 bp, Homo sapiens
aagttacttaacaaaaaattggtgtacccagggttcaaaactaggtcagatgactctggagcaaattaagcacagctttttttttttttttaaaatacagacagggtcttggttaattgcccaggctggtgtcaaactcctggactccagtgaccctcccatcttggcctcccaaagtgctgggattacaggtgtgagtaataataagcttgtttcttagcttatgaagttgagagcaaggccctggactataatgatgtcatcattcattaagggacccatgcatcagctagctgccctctaccaagaagtgctgtttcacatcattgggtaccagccatcttttcaactgacatttccacataaagagagctactgtgaagagagactccaaatgcatataacttataatttgttagattgtaagttataagatttactttattatttttattagagacatttataatttayagacatttaattagagatatcatagtttattagtgacacttcctaaagctctaagcgtactgtgcttctgcagctataacagtcacctaaatgttgagtagttaacaggaaaattactagaaacagaaaatagcatttgtatttggaactttgagagtagttctagttgttatgttttaaaaagacctca

SEQ ID NO: 700822 - DNA, 1273 bp, Homo sapiens
attactctccaactcctctcttaacagttttgttttgagtaagcttcaagcttttagcttrttgggcagaaagatgatgtgatgtttaacttaacattttgaaagaagtagatttgattgtacttaaaaggaatataagttgtcagaaaacctcaaactttaaaaaacataaatgaagatatagattgacttccagttattcagagtaatttaacattgaaacatagggaagttgcatgaaaatgaaatatatcaattttgattcttcatagtaaggtttaccagatgaagtcttgtggttttcctcctactggcgatttctcgatctcctttccaggactttaaatgttggtgttcttcagagttttattccacatgctccactgatactatatgctgctcccatggcctcattttctatctgctgagtcccgtatcagttatctccagcccagatctctaacaggtttaactcatatttctagttgcatcctagacatctttatttgaatgtcctctaccacaaatgaaaatcaccatgttcaaatctgtacataatcatctttcctagcccccaaccaccagtttcatcccttagtgattgactccgcatttcacctagctacctaagctagaaacttggacatcattcatggctctttttacctcacttctcacatccaggtagtcaggaagttctctaaacaccgtgtcccaaatatctgcattatagcactttctagtacaagcgactgcaaaacaattgaaattaacttaatctggccaggggtagtcactcacacctgtaatctcagcactttgggagaccaaagtgggtagatcattagatgtcaggagttcaagaccaccccggccaacatcgtgaagccccatctctactaaaaatccaaaaaaaaaaaaaaaaaaaaaaaaatagccgggtatggtggcagttgcttgtaaccccagctaccctggaggctgaggcaggagaattgcttgaaccctggaggcagaggttgcagtgacccgagatcacgccattgcactccagcctgggcgacagagcaagacttcgtctcaaaaaataataaaaataaagttaacttaatcaaaacagaggatgtattgactcctgtttagggaggaagagaaaacctctagtaaaggtcagagggagattttgactcagaaatgacttgattcaggggccggattacgggttgactgtctctcctcttctccctgtcttgaccttattctgttctactat

SEQ ID NO: 700823 - DNA, 1178 bp, Homo sapiens
  misc_feature 1078, 1079, 1080, 1081, 1082, 1083, 1084, 1085, 1086, 1087,1088, 1089, 1090, 1091, 1092, 1093, 1094, 1095, 1096, 1097,1098, 1099, 1100, 1101, 1102, 1103, 1104, 1105, 1106, 1107,1108, 1109, 1110, 1111, 1112, 1113, 1114, 1115, 1116: n = A,T,C or G
  misc_feature 1117, 1118, 1119, 1120, 1121, 1122, 1123, 1124, 1125, 1126,1127, 1128, 1129, 1130, 1131, 1132, 1133, 1134, 1135, 1136,1137, 1138, 1139, 1140, 1141, 1142, 1143, 1144, 1145, 1146,1147, 1148, 1149, 1150, 1151, 1152, 1153, 1154, 1155: n = A,T,C or G
  misc_feature 1156, 1157, 1158, 1159, 1160, 1161, 1162, 1163, 1164, 1165,1166, 1167, 1168, 1169, 1170, 1171, 1172, 1173, 1174, 1175,1176, 1177: n = A,T,C or G
tttctagttaccacaacatacattgaattgtaaagagatgggaagtttgaatgtaacagatggtaaattaagctctaaaataaaatagatggatgttaatgttaggcattgtttttattagggctgtttaaatttctacacccagtgactytttgtcagtgttaaaactcaatggcaaataggagacgctttaaaaggtgattataagtgtatattttaatataatttggttttaatttttaaaaattactttaaaattatgcatgcctgtcattaagccattcaaataagataacacgcaaaggagaaaatataaatgtcactaagttgcataattcagaaagcaccactgctaatattttggtgactatccttccaaacacatctctctgtaagcatatacaaataagtatttacaaataattctacataaaataatgttatatatgatactttaacttccctttaactcaatatgtcattattggttccattcccctggttttggttccattcccctggtctctttctgtattaatgaataggggaacatcattgcatctaatatttgattaatttttcattgtactgaagaaggattctaatgatagacatatatgttgtttcctttttctactataaagactgtggtagaaaaatttttgttcaaatgtaagtttttcatcttgtcctattcttagttcattcattcattcagcagatattagcctctaccatgcattggtcactgtttgagatactgtggcagaatagtaatctaaatatttgcctttagtggattaacattatgcatgcgctttatattcttaaactgtcctacagacatatactaatgtagacatctaccaactttacaggatagtacctgtttaccctaaacaattctaggatttgtaaaatatctaaatccttccaaacctgatgggcgaaatgtgatctctcagatatttagtcacatttctttgatggatgttgaatacatttttatgggtatattattcatttgtatatcttttttgtgtgttgcataatcacatacttatattaggacattttnnnnnnnnnnnnnnnnnnnnnnnnnnnnnnnnnnnnnnnnnnnnnnnnnnnnnnnnnnnnnnnnnnnnnnnnnnnnnnnnnnnnnnnnnnnnnnnnnnnnt

SEQ ID NO: 700824 - DNA, 1178 bp, Homo sapiens
  misc_feature 1078, 1079, 1080, 1081, 1082, 1083, 1084, 1085, 1086, 1087,1088, 1089, 1090, 1091, 1092, 1093, 1094, 1095, 1096, 1097,1098, 1099, 1100, 1101, 1102, 1103, 1104, 1105, 1106, 1107,1108, 1109, 1110, 1111, 1112, 1113, 1114, 1115, 1116: n = A,T,C or G
  misc_feature 1117, 1118, 1119, 1120, 1121, 1122, 1123, 1124, 1125, 1126,1127, 1128, 1129, 1130, 1131, 1132, 1133, 1134, 1135, 1136,1137, 1138, 1139, 1140, 1141, 1142, 1143, 1144, 1145, 1146,1147, 1148, 1149, 1150, 1151, 1152, 1153, 1154, 1155: n = A,T,C or G
  misc_feature 1156, 1157, 1158, 1159, 1160, 1161, 1162, 1163, 1164, 1165,1166, 1167, 1168, 1169, 1170, 1171, 1172, 1173, 1174, 1175,1176, 1177: n = A,T,C or G
tttctagttaccacaacatacattgaattgtaaagagatgggaagtttgaatgtaacagatggtaaattaagctctaaaataaaatagatggatgttaatgttaggcattgtttttattagggctgtttaaatttctacacccagtgactttttgtcagtgttaaaactcaatggcaaataggagacgctttaaaaggtgattataagtgtatattttaatataatttggttttaatttttaaaaattactttaaaattatgcatgcctgtcattaagccattcaaataagataacacgcaaaggagaaaatataaatgtcactaakttgcataattcagaaagcaccactgctaatattttggtgactatccttccaaacacatctctctgtaagcatatacaaataagtatttacaaataattctacataaaataatgttatatatgatactttaacttccctttaactcaatatgtcattattggttccattcccctggttttggttccattcccctggtctctttctgtattaatgaataggggaacatcattgcatctaatatttgattaatttttcattgtactgaagaaggattctaatgatagacatatatgttgtttcctttttctactataaagactgtggtagaaaaatttttgttcaaatgtaagtttttcatcttgtcctattcttagttcattcattcattcagcagatattagcctctaccatgcattggtcactgtttgagatactgtggcagaatagtaatctaaatatttgcctttagtggattaacattatgcatgcgctttatattcttaaactgtcctacagacatatactaatgtagacatctaccaactttacaggatagtacctgtttaccctaaacaattctaggatttgtaaaatatctaaatccttccaaacctgatgggcgaaatgtgatctctcagatatttagtcacatttctttgatggatgttgaatacatttttatgggtatattattcatttgtatatcttttttgtgtgttgcataatcacatacttatattaggacattttnnnnnnnnnnnnnnnnnnnnnnnnnnnnnnnnnnnnnnnnnnnnnnnnnnnnnnnnnnnnnnnnnnnnnnnnnnnnnnnnnnnnnnnnnnnnnnnnnnnnt

SEQ ID NO: 700825 - DNA, 1178 bp, Homo sapiens
  misc_feature 1078, 1079, 1080, 1081, 1082, 1083, 1084, 1085, 1086, 1087,1088, 1089, 1090, 1091, 1092, 1093, 1094, 1095, 1096, 1097,1098, 1099, 1100, 1101, 1102, 1103, 1104, 1105, 1106, 1107,1108, 1109, 1110, 1111, 1112, 1113, 1114, 1115, 1116: n = A,T,C or G
  misc_feature 1117, 1118, 1119, 1120, 1121, 1122, 1123, 1124, 1125, 1126,1127, 1128, 1129, 1130, 1131, 1132, 1133, 1134, 1135, 1136,1137, 1138, 1139, 1140, 1141, 1142, 1143, 1144, 1145, 1146,1147, 1148, 1149, 1150, 1151, 1152, 1153, 1154, 1155: n = A,T,C or G
  misc_feature 1156, 1157, 1158, 1159, 1160, 1161, 1162, 1163, 1164, 1165,1166, 1167, 1168, 1169, 1170, 1171, 1172, 1173, 1174, 1175,1176, 1177: n = A,T,C or G
tttctagttaccacaacatacattgaattgtaaagagatgggaagtttgaatgtaacagatggtaaattaagctctaaaataaaatagatggatgttaatgttaggcattgtttttattagggctgtttaaatttctacacccagtgactttttgtcagtgttaaaactcaatggcaaataggagacgctttaaaaggtgattataagtgtatattttaatataatttggttttaatttttaaaaattactttaaaattatgcatgcctgtcattaagccattcaaataagataacacgcaaaggagaaaatataaatgtcactaagttgcataattcagaaagcaccactgctaatattttggtgactatccttccaaacacatctctctgtaagcatatacaaataagtatttacaaataattctacataaaataatgttatatatgatactttaacttccctttaactcaatatgtcattattggttccattcccctggttttggttccattcccctggtctctttctgtattaatgaataggggaacatcattgcatctaatatttgattaatttttcattgtactgaagaaggattctaatgatagacatatatgttgtttcctttttctactataaagactgtggtagaaaaatttttgttcaaatgtaagtttttcatcttgtcctattcttagttcattcattcattcagcagatattagcctctaccatgcattggtcactgtttgagatactgtggcagaatagtaatctaaatatttgcctttagtggattaacattatgcatgcgctttatattcttaaactgtcctacagacatatactaatgtagacatctaccaactttacaggatagtacctgtttaccctaaacaattctaggatttgtaaaatatctaaatccttccaaacctgatgggygaaatgtgatctctcagatatttagtcacatttctttgatggatgttgaatacatttttatgggtatattattcatttgtatatcttttttgtgtgttgcataatcacatacttatattaggacattttnnnnnnnnnnnnnnnnnnnnnnnnnnnnnnnnnnnnnnnnnnnnnnnnnnnnnnnnnnnnnnnnnnnnnnnnnnnnnnnnnnnnnnnnnnnnnnnnnnnnt

SEQ ID NO: 700826 - DNA, 657 bp, Homo sapiens
ttgtagacttgggggtgggaaagtcttcctttcccgtttacaatcttcctcctttgaacatgttggaactattgtaataggttgtgtaaaagtatttgaaattttatgaagtctttattgaagacgtgtcaatttcaaagaggattacaacwtgacattaaatagttgaagttatagaaaacataatccttcacccagcatttcacggaggaaatatttaaggaattaatatcttcacaaaatgtgtcttcttctgattgacctccaattctgtctttctattctcctctctttagtttttggcatgactccaaatctccacccacttttttttaaaaaatttatttgacattctggggtacatgtgtaggacgtgcaggttgttccgtaggtaaacttgtgccatggtggtttgctgcacttaatcaacccatcgcctaggtattaagccctacatgcaccttagctgtttatcccgatgctctccttccccaactcctctgacaggccccactgtgcgttgttcccctccctgtgtccatgtgttcccattgctcagctcccacttgtaagtgagaacatgcatccaccctcttctttagggagggttttggttcccccccaatacctactcttttccctatgttttcctttttt

SEQ ID NO: 700827 - DNA, 1903 bp, Homo sapiens
gtctagtatctcaatagaaaacattaagtgacagcaatggaaatagtggcataagaactttcaaaaaattctcttataaaaagcaatgagaacactagaaaaagttaacaaaaatcagtgttttaagaaaccaaggcttataataatttgtgaacatttattcaagaaaaatgggctgggtggagtggctcatgcctgtaatcccagcactttgggaggctgaagcaggtggatcacttgagcttgggagtttgagaccagcctgaccaacatggtgaaaccctgtctctactaaaaatagaaaaattagccaggggtggtggtgggtgcctgtaatcccagctactcagaaggctgaagcaggagaatcagaagaattgcttgaacctgggaggcagaggttgcagtgagccgagattgtgccactgtactccagcctgggtgacaaagccaggttccatctcaaaaaaaaaaacaaaagaaaaaagaaaaaagacttattctcaataaaaacattaagttttgtgatgtttcaacttaccctatccccatcttcctcttcccatttgtggtagccttgaaaatcaacagccttgtaattatcttgaaaaccagcagtctagcagccactggagaatgtatttggggttggaattcctacaaagccccattcttaactgttattatttgacctgtctggcaattccttggaaaatcctactcccaatgcttgtctgtatttgacctgtgttacaactctttcagtataaacacacttttgcccagggatatttgttgaaataatctgtggcagttgctcgaggtagtgaaaggatgagttgaccaaamcacttttaaaaaagcttattggacccacctattaaagctttggaaagatctgacattttcctgggaatctagaaggggccctcacatgcagagacatgtttttgcatagggctatgtgcatactcaagaaagacccaagagggccttaaactctccacaagtaagaagtaaaagctctatatgtgccacattttctcatactatgcagccataaaaaagaatgagttcatgtcctttgcagggacacagatgaagctggaaaccatcgttttcagcaaactaacccaggaatagaaaaccaaacaccgcatgttctcactcataagtgggagatgaacaatgagaacatatgggcacagggaggggaacatcacacattgaggcctgttgggggtcaagaggagggatagcattaggagaaatacctaatgtagacgacaagttgatgggtgcagcaaaccactatagcacgtgtatatgtgtgtaacaaacctgcatgttctgcacatgtatcccagaactaaagtataatttaaagaaaaaaaagatagtgtagccctgcagtttacaattaagtgctggccacattattaacttgtgcccaaaccagagtaaagacccctgaggcaaaaaaaaaaaaaaaaaaggtaaaacctgactggtcatggtggcttatggttataatcccagcactttgggaggttgaggctggcggatcacctgaggtcaggagttcgagaccagcctggccaacatggtgaaaccatgtctctactaaaaatacaaaaaaaatgagccgggcatggtggcacacacctgtaatcccagctacttgggaggctaaggcaggagaatcacttgaacacgtgaggcagaggttgcagtaagctgagatcacgccactgcactccagcctgggtgacagagcgagacaaaaaagctaaggcagagtgttaaactgctggacttgagtgttgaagccatgccccaccggatacacagagagccttttggtaaaagctgggagcttattggttacaggcatttaaagaaa

SEQ ID NO: 700828 - DNA, 1397 bp, Homo sapiens
ataatacctaaggcaatcaatgacagattaagattttgtcaggtagggaaaccattataatctctaagatatttttctttttccaagaataaattttcatcccctggaggcgatatcattcccattgaaatgcgtggtttatggtagattcattgatgtcgacagccttgaattctcaattagaaaaataggaattatataatcaaacttacatttaaatgtgtcccaatacaatgtgtggttgtgtagtttattattagttcaagcagtatttttgactatcagccatatatcacacatgatggtaggtgatagtgatacatagttgaatagcatatcaagaagatttggtttttacactcaaaaaacttgcagtataaacaggtaggcaaacatatagacagataattttaatacaatatggcaagtatagttattgtagtgggcaaagaaggatcctagcttacttttcccataggttaaggaaacatggaatgacaaaaaattcattataaagaatgaatggggtatgagtctggaagaagcctcatgatacatgagggcagaaggagaacaatctagttgagaaaaacaacatttggaatggcaacatgaaactatataactaatgtactctttgcacaagcaaaatcaacttaaaaaatttttttgaataagaatctcactctgttgcccaggctggagtgcaatggcatgatcatgcttcatggttcaatgtaactttgaactcctggtctcaaacgatccatcccctgactattacctcaacctcccaagtagctggggctatgggtatgcaccaccacatctggctgacttaaaaaaaaatattttgtagagacaagatattactttttggcttaggctggtcttgaccttctggcctcaagcaacctcctgtctgggtctcccaaagcagtgggattacagtggttcttmatctttttcaccaatgtaaccctaacaacagagatggttgttaatactgtattgttattttaaggattaaaagctgttattttaaacttaaaatttcatgtgaattttggactctattttatatctgcttactaataattttaaattacttgttaattaaattgctccaaaaaaatatttgagtaatgccaatggtcttaaaagatgtgtcatgtttatgctttcagcatcctatggtacatcttcatatctgtggtaataggtatgtctgtgtttgagaattaagtgtggtcttaggttatgaaggaaatttaaaaatagtggaaaagtagtggcatgtatttctcctttaaatagaatattcaagttgcagggaagaggatgaatttgaaggagttaagagtgggaataatcaagaagctactgcagtagtttca

SEQ ID NO: 700829 - DNA, 627 bp, Homo sapiens
ctcccaagtaactgggattacgggcatgtgccaccacacctggatattttttattaatattatttttagtagagatgggtttcaccatgttggccaggctggtctcaaactgctgacctcaagtgatctacctgccttggcctcccagagtgctgggatcaagtaagccactgcacccagccagtcatgggaacgtacttgtaaagagtgttwagctatccaatttaatgtacagtcatgcatcatttaacaatggggtacgttctcagaaatatattgttaggtcatttcacagttttgtaaacatcatagggtgtacttacccaaacctagatggtatagcctactacacacctacgatgtgaggtatagccgattgctctaggctacaaaccctacagcatgttactgattgaatgttgacaaaatggcaagtatttgtgaatctaaacatagaaaaggctcagcaaaaatgtggtattataatcttacaggaccaccattgtatatgcggtccatcattgaccaaaatgtcattatgtgaaacatggctgtattactgtaatagtgttaaaattccacttacatgtcaaaatagatgctattttttgaggttttataaggaaa

SEQ ID NO: 700830 - DNA, 645 bp, Homo sapiens
ttctccataggtggtacctcctggttatcactaaggccatgaagagcacagatttttggaaaaaaaaaaaagagagagagagaatctaacagatatattggatacctggatgtacttggttagaggattcttctacctagtaattatgccatgctagtctgtctttgtcctttaaaatcacccmatttaagcacaccatttctttcaaaaagccttcccttttgtttcccagtctagtttagatcctcttttctgttctcaaaaatccatgcacacctctgacttaactctaactgtgatatactgaattgtcttatttatttctcttttcaatcagttggaatatgctaagtgaaggcaaaagccaatttatttgtctttttatctctagatcctagtaaagaagtcatcacatagtatgttttcaatagatgtttgtacaattaataattactgactgataaataaaaaggttctatttcattacaaataaaattagagcacccgataccaacctgaaatttgacaatcatttgaaggagtgttgtaatatttaaaaagaattttataaagattttgttttttccttctttcttacattaatgttgtaggttcattttctaaagtagttgtgtctttcttaag

SEQ ID NO: 700831 - DNA, 1551 bp, Homo sapiens
ttattataaaaatatctattcaagtaacccacggctgtctcatgattcattactttcatctaattctgcatcagatcatttaaatataaaattatcaaaagaagttcttccgttaattgaagggtctagtttgcttaagaattctaccctccacacctctcagcttgacrccctagagtaaggccagagcaatcaggtcatagggtggccaggttattactatttacccctttcttaataattaacatggatcatgtttatgatggcaacgaataggatcaatagtgaaatatggatacagaaaatggtactgtttttttctactttagtctgattttctacccagtccattatttttcttttttatgatggagagaagtataatacattctctcttaatttgttttatttaggcttctctgtgtttactgggaggcagtttagcaaactgattaaatgaacaggctgtggaaatgagacaacctgtgttcaaatccaattgctacttggggcagtggttcttaaacttgttagtgtattagaatcacctggaaggcttgctgaaccatggattacaaggcgctgttctcaaagattgtgattaagtgggtctgagatagagccccaaatttgcatttttaatgtttccagatggtgttaatactgttgatccagagaccatactttgagaatcacaaatgtcagtttatctgagcctaaattttctcatctgtggagtgttaacagtttctaattaataaggttgttaattgccaagggataatttagaggaaaaattcccaaagtttgttactttgatgtagattgtaaccaactgaataaattgtgcttttttagttgtgctttttaaataaatcttatatatgatgatctgggtttatattaaggacacatgattaatgaaatagttctttgctttattaaggattttcagtttgatcatgggaatactcctctgtactgttgagagccaaatttgatttacacctaggaacatgctccagctgtgacaggcactactggttgctttccaattatttcttcttctttccctttcatccttgactcttaattcctgcaggtatccacatttctaagagtggccatatactttaggggaagctggacacatttctttgtctaatgtcctgattaagcctcttatgggtgtcctgttccatgagcaccggatgtagctctggtcaacaagaaactcaggtgagtcttctggatgtacttccaggaaacagcctttgttctcgtaaagcaacacttagagttgccttctttttgtgctagctcttgaggtgcctgtacgtactgctgcagttgtcccatgaccataaggggagtcatctaaggacagcctgaggatgagagaacagaaagatggaaagaaatccaggcctttgatgatgtgattgaaccatagagttaactaaccctggaattactataccttcatgctccctgttattcaagataatacattttccttatcatttaaccattttcaattgcatttttagt

SEQ ID NO: 700832 - DNA, 638 bp, Homo sapiens
tctgcctcctggattcaagtgattctcctgcctcagcctcccgagtagctgggattacaggtgcgcgccaccatgcctggcgaatttttttgtatttttagtagagaagaggttttaccatgttagcaaggatcgtcttgatctcctgacttcatgatccgcccgtctctgcctcccaaggtgctgggattacaggcgtgagccaccgtgcctgcctttttttttttttttttttgagacagagttttgctcttgtcacccaggctgaagtgccgtggcgagatctcggctcactgcaacctccacctcctgggttggagcaattttcctgccttagactcctgagtaggtagctgagattacaggcgctgccaccaggcccagctaacttttgtatttttagtggagacagggtttcgccatgttggctaggctggtctcgaactcctgacctcaggtgatccaccggcctcagcttcccaaagtgctgggattacaggtgtgagccaccacgcccaacctcatgctctctccttctgtacatgttaaaattctccgtgattaaaggaggcagcagyggaggaacacagggcatgattccctctgccacaggctgctgtgaggtgggataaaatgaa

SEQ ID NO: 700833 - DNA, 1699 bp, Homo sapiens
ttttttttttgagatggagtctcgctccatctccaaggctggagcacagtggtgtgatctcggctcactgcaagctctgcctcctgggttcacaccattctcctgcctcagcctcacgagtggctgggactacaggcgcccaccaccacacctggctaatttttttgtatttttagtagagaaggggtttcactgtgttagccagtatggtctcgatctcctgacctcgtgatctgcctgcctcagcctcccaaagtgctaggattacaggtgtgagccaccgcgcccgcctgggttagtgtaattttcttaagccaccacttgttcatcatttcacatgtgttagatgtgaacttaagctcatgtgttttcagtaatagtgttgtgaagatcaagttcatttttaaaacacttgagagttttttgaccttcgctagtgggatgggtaggaaaacaaaaagagaaaccttcagcactaatattataccctcagaatctacttttgttcatttggaaacaaagtagtataaaacaagcaggaagattaaaatacaactataaacatcagtgaattaaaaaagaattccaaatcttaaaagactgaatgttcagaggttattttacagacattagttgagaaaaaaatttgtcttatagattatatcttcaaaataacaataagccagagatatattcagagagactaagaggtcagggttcgttgatacatgttttctgtggaacttctgcagattttcatttaactaatgtgaaactggtatttttcaggaaaaggaccagggaaaaggagaggtccaacaatcaagatatccggagttcaggttaatgtgaaatccattatccaacatgaagaggagtttgagatgctgcataaatctatccctgtggaccctgaagaaaaaaaaaagtgagtatattttgtgtacatgcttagatggtcgtaccgtaagaaaatagatttgaagttagactttgtgtagttccatagtatttttactgtctcttctttaacataccaaaaaggcccctcttctaatgtcttcctgtttttaaactttctttagatactgcttaacctgtcgtgtcaaagctgcacattttgatgtagagtggggggtggaagatgattctcgcctgttgctggggatttatgaacatggctatggaaactgggagttaattaaaacagacccagagcttaaattaactgacaaagtaagtaaccctaccatgctagagatttctagaagatttgttgtgtaatatttttatatcgattacttatttctaactattttcgagggggcatcaaattagaaattagtatagtcattcttggaaatacttccatctttagcagattgtggcactgtttcacggatgaagataaagggaaaagacagtagccaggtgaaattttggggaaactgtaggagaaatcttaaaattctggtatttaattataggtcagatttcattacaataaatacccaggtgagtttgttaatgataaaagcattccttggccttagttattggccctttgtttaaaagtacatttgaaacaaccatatttcayttcctcacgtaaagattgaatgtcaccttggtattctttgtaatggaattaaacattggctgttcttctcccacaaaatcgagcctcccaccctatctg

SEQ ID NO: 700834 - DNA, 786 bp, Homo sapiens
cgatcaaccagataaacaaagtgtgctgtggccatacaatgaaatattayttggcagtgaaaaaaaaatccactaacatgttcaacatcctggattgatctcaaaagtattatgctaggtaaaagactcaaaacacaaaaggcaacaaaaatactctaagtttctattatattttatataaatgactttctggaaaatacaaaactatacgtacaaagatcagatcagaggttgccagggattgggaatatagacaagttattggttgtaaagggaaatgggaaaacttttagaaataattttttattttggtggtgattatatactctaccaaatgttaaaactcattgatgtgtatattaaagcatacattaaataaatataacttaaaaacatttgggctcagggttggccatttgctagttctgctgccctcttaagatctgactgccaaataaatcatcctcatgtccttttaaaaaaaaaaaaaaaaaaatatttgtattgctctggcctttatattttaccaaaagttgtagatgttccttaagaatgtctacttacctggatgttttagtcctttaacacaaacaaaacatcttccaaagttctaaagaagaatgaatacagaattttgtggaggcaagaaaaggttgtctcttctgctaactacattctgcaagttgtacacaactcttatttaacagcgtttttcccatttggtgctgccaagtgcttcaatgagacaccaaaagataaaagcaacatttaaagcatatttttaat

SEQ ID NO: 700835 - DNA, 786 bp, Homo sapiens
cgatcaaccagataaacaaagtgtgctgtggccatacaatgaaatattatttggcagtgaaaaaaaaatccactaacatgttcaacatcctggattgatctcaaaagtattatgctaggtaaaagactcaaaacacraaaggcaacaaaaatactctaagtttctattatattttatataaatgactttctggaaaatacaaaactatacgtacaaagatcagatcagaggttgccagggattgggaatatagacaagttattggttgtaaagggaaatgggaaaacttttagaaataattttttattttggtggtgattatatactctaccaaatgttaaaactcattgatgtgtatattaaagcatacattaaataaatataacttaaaaacatttgggctcagggttggccatttgctagttctgctgccctcttaagatctgactgccaaataaatcatcctcatgtccttttaaaaaaaaaaaaaaaaaaatatttgtattgctctggcctttatattttaccaaaagttgtagatgttccttaagaatgtctacttacctggatgttttagtcctttaacacaaacaaaacatcttccaaagttctaaagaagaatgaatacagaattttgtggaggcaagaaaaggttgtctcttctgctaactacattctgcaagttgtacacaactcttatttaacagcgtttttcccatttggtgctgccaagtgcttcaatgagacaccaaaagataaaagcaacatttaaagcatatttttaat

SEQ ID NO: 700836 - DNA, 1408 bp, Homo sapiens
ttttgaaagaggattgtttgcaggaaatgatatctcctcactttctgaaatcttactgtctgaaaatcaagacctacacagattcagataaaatggtgtggattgctctctaaacttgsggtctgagttgtcactatccaaactcactaactgggtagaatcagatagcacaggacacagttttttgttgctttaaacatataaaatatctaaagcaaaatactacatttttaacaatttgttaaatctgaaaaaaaaaatgtctcttcacttaaatatctttcagctcaatgctccttggcttctttgctttttcatatattcatcctcatggcttggatttcccacagtgtttgtctcggagtagttgctcttcttctacagcaggtacacaaaaggacaaaaaacagaaactgccaaaccatttaatggctatgcctggaacagatacagtgtcaatattgctttattatattagtaaaagaagttacaggggctacccaaattcaaagagttaaggaaatagattctacctcttactggaggggtagcaaagtcgtattgctgaagagtgtttggaataaaaaatattgtggccttctgtgggaaaaaaagtcacattacatgtaagaaataagataaagtatttgaagtttccactatagcagctagcatatggtcattatgataaaaaggataattttaatgtctgtatagtgtttgctgtactttaagtacctttaggaatagagacagatgcatttaatccgcccagcaaaactatatgctagcatcattatcattattatattacacatgggataaatggattatagcattaaataatttgcccaaatcaaacagatatccagaagtagagctggaattcaaatctgtttaactaaatgtcataccctataaaacagtcactaatacaaaaagaaaataatatgatgccactcaaaactaactcctgctgctacctttccagaagctgtagaataccctgtggctcacttatacaatgactgcaatcatttttgtgtgtatgagtgtgtgggtagtgatttaattccttcttatattcaaacatctaataaatgtataagcaggttaagcatgctagtataattcatactcttaacttttacaatagcaataaaatatattttccttaaatctgtttatttctatgatatttaattattattttccataaacaacaatcgagtaaatatcaaaataaatatttagaattccatattttataaatttttttcttccattttccttatagagctctataagcattctcactgcttagtttcttatgtctatggtttgattctgtaacttcatgagactttattaacattaatcatttacaagtcatttactttaaaaatgt

SEQ ID NO: 700837 - DNA, 674 bp, Homo sapiens
ggtgttatttcaatacagggaagcatgcttctaaatagaagttcagaaatgtagaaagaaataatgaataatgaaaattgtgtgcatatatgtatgtttaaattatatttcactatatttatgatgtaatcaagaaaatttttgttttgttttgcttttgagatagratcccactctgtcacccaggctgaccatttcagctcacgtcaacctctgcctaccaggctcaggcgttcctcctgcttcagcctccagagtagctggtagtacaggcacacactaccacaactggctaatttttatgtattttttttgtagagacagggtctcactatgttgcccaggctggtcttgaattcctgagctcaggcaatccgcctgccttggcctcccaatgtgctgggattacaggcataagccaccatctctggtcaagaaaattaaataaatcaaattccttgagccttccaggcaaccaaaaacagataaaaatgccaattaatgttagagtttgataaacaggttgctggttgtaatttctagagtaatcatctaaagaatatcaaaactgtatggtacaaactgccaataaagaatgaaattgaaaaatcagattcacaatttaaataaaaacaaagaggaaagaaaaaacattgagcagaagggaaaaatgt

SEQ ID NO: 700838 - DNA, 529 bp, Homo sapiens
cttcctgcctgcctgccttccttccttccttccttccttccttccttccttcctcccttccttctttccttccttccattcttttgggggagagagagaggttctggatacgctatttgtcttatctctgattacaattttgagttttcttacatatggaagttttgtacatactacaattacgtgttttatctgtattaataaatggtcatttctttgttatccaatgtttaaaatactttatctttagtttaaattcagtatatagtcattggatagaaaactagtgaaatgctaaacttcagtatagatgttttttttataaatacagcatgccctaaatagcactactgatgartagtacaagaaagttaaggtactgtttgtgaatcatttaatattttgcattacttaaacattttcagagtcaaaacttggaggattcctcatattttccttgctttaagtttaccactgcctttgaaacttcacctcatgtttcatacttatgaattaaacaagcgaccat

SEQ ID NO: 700839 - DNA, 810 bp, Homo sapiens
gagaaaaacaaacatatcaatagataacttcaaactgatagtccacacctggggttactgaattcctgcacacaggctcagctgtacccgaggttctaagaccctccctgtctcatgcataccaggaagacttaagaagctttagctcaatctcagaggatttagcagatcaaatttccctctagtctgacctggcccctgagaggccgtgtttagacttaagacccactacttctctcactgctgcaggtttagcctcacagcctcagtgtgtgtcactctatgcccagtgggttggaaggtctttctactctagytaatgggaacaccagctctccccagcctgtgtaagctctgctgacggatccatttcctcctcctctccagggttcctttccccagtgtgtcagtagtttcttcacacacgtgactgattggaacccaaagaatcaggggaagccaggcgcaataactcacgcctgtaatcccagccctctgggaggctgaggcaggcagataacctgagctcaggagtttgagaccaacctgggcaacatgatgaaatcctgtctctacaaaacatacaaaaagtagccaggtgtggtggcttgcacctatagtcccagctactcaggaggttgaggctgcagtgagccatgttcgcaccactgcactccagcctcggtgacaaagtgagaccctgtctcaaaaataaaaaagtcaggggactcctctgcaggtctccaggagcccacgttctctgtgctatagcttggacactctctccagctgggacatctgctctgctca

SEQ ID NO: 700840 - DNA, 810 bp, Homo sapiens
gagaaaaacaaacatatcaatagataacttcaaactgatagtccacacctggggttactgaattcctgcacacaggctcagctgtacccgaggttctaagaccctccctgtctcatgcataccaggaagacttaagaagctttagctcaatctcagaggatttagcagatcaaatttccctctagtctgacctggcccctgagaggccgtgtttagacttaagacccactacttctctcactgctgcaggtttagcctcacagcctcagtgtgtgtcactctatgcccagtgggttggaaggtctttctactctagttaatgggaacaccagctctccccagcctgtgtaagctctgctgacggatccatttcctcctcctctccagggttcctttccccagtgtgtcagtagtttcttcacacacrtgactgattggaacccaaagaatcaggggaagccaggcgcaataactcacgcctgtaatcccagccctctgggaggctgaggcaggcagataacctgagctcaggagtttgagaccaacctgggcaacatgatgaaatcctgtctctacaaaacatacaaaaagtagccaggtgtggtggcttgcacctatagtcccagctactcaggaggttgaggctgcagtgagccatgttcgcaccactgcactccagcctcggtgacaaagtgagaccctgtctcaaaaataaaaaagtcaggggactcctctgcaggtctccaggagcccacgttctctgtgctatagcttggacactctctccagctgggacatctgctctgctca

SEQ ID NO: 700841 - DNA, 647 bp, Homo sapiens
gattcatgctaaggtcagcaattttacataccattgcttctgtaccatcagtacaagcatcaacatagtgaaaaaggcaaatgtcttagaattattatgaaaagttttgaccttctggtcaaaaaaactccctaggtggtggtcagtggggatccacatgttgaaaaccactgagaaacaattacatttggtgagaatttacatgccatacaatgcgatgcttctattatgtattcatttgctccttgcaataatcttaaaagacattttttaaactgcaagaaaatttaggtggaaccaaaagacaaatccaaatgtttctataattacaaagctttccatcgctatgtttaagatttggctctgatatatttgtcatattatcaagggcaggtcattaaactctgcttccttacctgtaaaatgataatagttacctacatagcttgccctcttcrtaatattgtacaaggttcacaagaaggaaaacagtactctaaaatttttcttaaactattttaagtatgatgaaacgaacaaaactcaattccgagaataaaaaaatccttgaggttcaaaaagatagtcactttaagtgactgtgaaaatgtacctatgttttaaaacaggtgaaaaacagataaaac

SEQ ID NO: 700842 - DNA, 627 bp, Homo sapiens
atttcaccttaattttttgaaggtaattctttcttggtatagaattctatgttagcaggggtttttgctttattttattttgttttatgaagcactttagatgctgtttattttccaaatttatttatttaaaatcatatataaaattgtatgtatttaccatatacatggcgttttaaagtatatatacattgtggaatggttaaatctagttaattaaaaatgtattacctcacatttttatttggtaaggcaccaaaatacataaggaactcaaacaacttaatagcaatagcaagaaaacagataacccaatttaaaaagtggacaaaagacctgaatagacatttctcmaaagaagataaataataactgtcaaatgtatgacaaatcaacagggaaatgcagatcaaaatcacaatgagatatcacctcactatggttagaatggtaaatatatatatatatagtcatatatatcttttatatatatttatatatatcttttataagttgttttattatcctctggtttttgaagatcacatatcatatgtacttgctcatttaaaggtcatacatctcccaccatccttagccttctggctgcttttaagatgttctgtg

SEQ ID NO: 700843 - DNA, 775 bp, Homo sapiens
caacctataaaattctttattcccatccctttcttatttaatagattctagctttatggtaaatttgctcagtttttttctattttattgtatttatcatatttgttttagttttaattattattatttttgagagacagtccmactctgtcacccaggatggagagcagtggcgccatcttggctcactgtaacctccgactcccaggctcaggtgattctcacactcctggactcaagtgatttgcccacttttgccttccaaagtgctggaattacaggggtgcaccaccacaccgagcctgtcatatttatttttaaagtacctactagaaaagtccaatatgtggatcttttgtggctctctattgtctatattttctcttaaaaacatctttagcattgttttttggaatgcataataatttttaaaaatttggacattgtttatgaaaaattacagtaaccacagctgatgtcatctgcaccaaaaaaaaaagatttaatttgcttttgccaaacggaattatatggtatatagagttgaaaagaatataagtatatctcaggatttaaatattcatagctcattttatttactttggaaaaatctagcatgttttctagcatgtgagttttcttccagttctcatggtcagattatattatggtgaaatatcagaaacacaggtgccataactgttgtactcacaataatatcttagtggaaccaatgagcatagaaaattgataatcaattacttagtaaaagtta

SEQ ID NO: 700844 - DNA, 800 bp, Homo sapiens
catttttgtctgttctatacaagacaaatgtataataattaacacttggagtgtcaggatttgtgtagttatatccctttcagttctaactctgttgtggacaaaggtgaggagtaattagattatcaacaaaggattgcagatactcatacaaattaatatatgaaatatatttctgccttgtaggatmcaaattttaatgcatgtcaaactgcattttcacttaggtaatgtgaggccttacaaagagaagaatatgcatctgtattcttattaaactttgattcttgaaatgctatgatcacgttctcttctagcttactgaaaatgtatagtaatcaaccagagtttaattgatggtaaatttaacccaaagagaaatatttaaggcagttgtaagaacaaagacatactttatacaataaacggaaggtaaatatttttattaaagatatgaatatccatataaaaattcagagtgctttttgggtctggaagtttggcactttattcctacaccttagttgtcttgaatgtttgactttgtgttgaaattgtatattttcattgtcattttacattgtccttgaaatatgcttgtgtttgaattctaatcttattagggaaaaaataattctaaacttcatatttacatttttaatgcatttagagtctaatttaattattttagaggttattttgcagaagtactgtgttaaagggattgcagaatttcaaactattgtcacagaaattaatggcatgtagcccagtatgtcttagaatgtaacataggaata

SEQ ID NO: 700845 - DNA, 800 bp, Homo sapiens
catttttgtctgttctatacaagacaaatgtataataattaacacttggagtgtcaggatttgtgtagttatatccctttcagttctaactctgttgtggacaaaggtgaggagtaattagattatcaacaaaggattgcagatactcatacaaattaatatatgaaatatatttctgccttgtaggatccaaattttaatgcatgtcaaactgcattttcacttaggtaatgtgaggccttacaaagagaagaatatgcatctgtattcttattaaactttgattcttgaaatgctatgatcacrttctcttctagcttactgaaaatgtatagtaatcaaccagagtttaattgatggtaaatttaacccaaagagaaatatttaaggcagttgtaagaacaaagacatactttatacaataaacggaaggtaaatatttttattaaagatatgaatatccatataaaaattcagagtgctttttgggtctggaagtttggcactttattcctacaccttagttgtcttgaatgtttgactttgtgttgaaattgtatattttcattgtcattttacattgtccttgaaatatgcttgtgtttgaattctaatcttattagggaaaaaataattctaaacttcatatttacatttttaatgcatttagagtctaatttaattattttagaggttattttgcagaagtactgtgttaaagggattgcagaatttcaaactattgtcacagaaattaatggcatgtagcccagtatgtcttagaatgtaacataggaata

SEQ ID NO: 700846 - DNA, 800 bp, Homo sapiens
catttttgtctgttctatacaagacaaatgtataataattaacacttggagtgtcaggatttgtgtagttatatccctttcagttctaactctgttgtggacaaaggtgaggagtaattagattatcaacaaaggattgcagatactcatacaaattaatatatgaaatatatttctgccttgtaggatccaaattttaatgcatgtcaaactgcattttcacttaggtaatgtgaggccttacaaagagaagaatatgcatctgtattcttattaaactttgattcttgaaatgctatgatcacgttctcttctagcttactgaaaatgtatagtaatcaaccagagtttaattgatggtaaatttaacccaaagagaaatatttaaggcagttgtaagaacaaagacatactttatacaataaacggaaggtaaatatttttattaaagatatgaatatccatataaaaattcagagtgctttttgggtctggaagtttggcactttattcctacaccttagttgtcttgaatgtttgactttgtgttgaaattgtatattttcattgtcattttacattgtccttgaaatatgcttgtgtttgaattctaatcttattagggaaaaaataattctaaacttcatatttacatttttaatgcatttagagtctaatttaattattttagaggttattttgcaraagtactgtgttaaagggattgcagaatttcaaactattgtcacagaaattaatggcatgtagcccagtatgtcttagaatgtaacataggaata

SEQ ID NO: 700847 - DNA, 1108 bp, Homo sapiens
atggcatagatattgacaatgtgctgttaaatgaaaaaagaaaacatattccaaaacattattttcaggatgactctgtttttataaactatttcatatatattaatataaaaaaattctgggatctcacacacacacacacacacacacayacacacacacacgcacactttaggtccactttaggtagtgagattaaaggctgcttttctttctatgatggttatttgaaatttctaaaatgaatatatattaattgatcattgttatgggctgaattgtacccccctccaaattaatatgctgaagtcctaacccctggtatctcagaatgtgactatatttggagacagggcctttaaaaaggtaactaagacaaaatgggtctttacagtgggccctaatccaatatgactagtgtctttccaagaagaggagttcaggagaaaaaaaatacagacagagggataacctgacccagagagaagagggccatctccaagccaaggaaagaagcctcagaagaaaccaaaactactttaggcttccagaattgtgagaaaataaatttctgttgtttaagccacctagtcagtggtattttgttatagtagcccaaatagaatctttttttaaaaactaaaacagccttggagttttaagggaaagcttattgaggtagaatttctcattcgaatgaatgaagaataagtagatttaaggatgcttcccaaaatgtacttaatgctagttactgaacattattaactacataatacatgcaaggctcacttctaagtgaatatattcaatatttagtataactgagaaataaaagttacataaacacatttacttttaaatgtatataattacagctttcgattaacctcatctctatcatgacaaatgatatagaaatcaaattctgtaggattctgaaaaacacaacaaaataaaacaacaaaaaaaaagggaaataatcacttactttctgtcattatttaaatcagaaagttggtcaaagattatctaaaactgtcccattggctctgcctacatgttaattcctcaatcttatttcaagaaatctaatcttaattattat

SEQ ID NO: 700848 - DNA, 1463 bp, Homo sapiens
gaaattagactccatccatcctctcagctaggctcctcagcagcgaatagcccatccaaccatacttggaattcctcagttaaagcacttaagtctaaaaacattaattttagtagatatatgacatatattctttccttcttccctccttctcactccctctctttctcatttctattcttttttctgtgagcagggtaatggaaaggatacacatttgtctctttcttgaacataatcaaaattgaaaacaattcacacagtataaaggaagaagctgaaaggaatactctccatcagctatttgatgaaactccccttcatatttatatctgagactgaaaccacactgaaaaaatattttaaacacatattataacatatataatactgtgtattataaatataataatcacatattatacatattatataaggagaagatacagagagctagtattctttttaaaaacacatttctgtttacctagtgattttggtagcagattcttcacaaattctgcatgatcccccacgtgcagtatgctgtagacgctcgtattcattaattcctcctgattgtaacctaagtagctggttacattctctgacacaaatacaattctcccttcacagttcacaacaaagaaaaatccatccaaagcctgcaaaaccaaaagaaaaaaatggtttggaggttgaaagataaaagaaaaattaaactatacatttttctattaaaaaagagatcagaaatatatgtcaagacctggtctctgtcctcaaggaaattgtgatacgcaggagagagagacataaacataataaaatatcagtgataaaatgcagatcagagacatacacaaaatagtccataagcacacagaaggatgcctaatttgggatcagggtgggggtcaaagaaaggtacagacccctacctaacatataaaaggcatagttggggaggaagaggattgaaggaagaacattccaggaagtggagagagcatagcacaaaaagaaaacgaacaggcagtttgcagctgctggagtatatggtacaaggcgagtcagcagacgtggacaggagccaaatcacaggggcttcctatgcactgaratggagccaggggtctccaaaagaagacatatgcgtcctacggggcatataatatccacaagggagcacgggaaaagttagaacctctatgtatattgtaatctaaaacataataaagacatgaagcttaagcatattaacactatggtgcctgactcggtgcagacagtcacatatcacacaaaccctggtatcccgaggaagagccagaatgcagaggttgactgtggcaccttacttatttgtaatcttttcatttattgcaacatgttgcagcttacttgctgcagaatatatataagcaataaaatcaagatcctgaaaaaatagaacatttaca

SEQ ID NO: 700849 - DNA, 1157 bp, Homo sapiens
tatccatcacatgccaggaatatttgcaatgataacattttaaattgacttcataattgaaatgtctaataagaggattctgattttattaagtgtttgaatttttaatatgttaaaaatataatttatattactggaattctggtgtgattataagaagttatcaatttttattttctctgtatcatatgcacacatacaaacatatttaaataaatatattaaaatgtataaaacatttataagtaaaatatgtattaagtatgtaaaatacatattgcacagtctctatcatatatgcatgcgtgtgtggattataaattagttatatggaggaaaatacgaaatcttatctaccctcattccattacatagaaatagctccccatttcccccttttagctcactcaatagggagatatgatcacattattactctttttttctgactcattttgaaaaatatattcaaaattaaaaatttcaagggcctgttaatgttcattttaaataatactcaaacatttattaggaatatttcataatgtttatctaacatctatattcttgaataattattatataatttttcaataaggtaacatcagtgcagagatgtgagcaaatctataccatcttcaggttagcagaaaagattcttataaataaagaaatcaacatgatacaagaatccttacagtgaggatatgataaacaggaacctactgaatcattttatatttttttgttatggtttcattgtagagtttataatttttttaatgaaggatgttacaagaaaataaagctttgaaaaatgactcctagtactatagtatcattttgattattcacatmgagcttgtccacccacagcccatgagccacatgcatcgcaggacagctttgaataaggccaaacacaaattcataaaatgtcttaaaacattatgagttttgtttgtttgtttgttttttttagttcatcggctatcgttaattagtgtattttatgtgtggcctaagacaattcttccaatgtggcccagggatgtaaaaagtttaaacactcctgatttacataaaattggctacagtgaacgaacttagacaatcattgtttccaaaagataaagaggtaacagaaaaaatgcttt

SEQ ID NO: 700850 - DNA, 1314 bp, Homo sapiens
ggaggctgaggcaggagaatcacttgaacccgggtggcagagtccagtgagccragatcacactactgcactccagcctggtgacagagtgagctccgtcagaaaaataaataaaaataacgccaaattcatacagtccctgaggagtgggaactgatgcacatctcttgtatacaataagctatgcttgtgctctgaacagtgtaagattgagaattgtattcctttaaagaaagttcagcagaactgtaactgaattactaacaaggcactgagaaggcataccgtactttgtattctttttaaagtccctgttaggtggtggtgtagctggaagtgtatagtattgaggatgtaaagtttcccctaaaaaatttttggtatttggcgaatggcataacacatcaaaaaattggttgtatcacatgattaaattgcaacgtgatgatttcaacttggtggaagacttctgcttcgtcttggtatgtgaaaatcccctttgcttcaaacttaatacacaccaaggaaaacaacctgatacaagtttgcaagtgtctttgagctaatggcttttcgtgggtattaaaaagcattgggttatttatgtataattacgtagaaagaaaatgtttgttccattcaagatacggttacacgaaaaggcatctagttgtgaccttcaaattattacttatatacctacagaaaattcctataaataggctgggtgcgatggttcacacctgtcatcccggcacttagggaggccagggtgggcagatcacctgaggtcaggagtccaagaccagcctggccaatatggtgaaaacttgtctctacgaaaaatacaaaaattagccaggcatgttggcccatgcctgtagtcccagctactcagcaggctgaggtaggagaatcgcttgaactcgggaggggaggctgcagtgagccaagatcacacaccactgcactccagcctgggcaacaaagtgagacccccatctcaaataaagaaagaaaattcctatgaagaaacactatacctctgagtttcaataatatagatgattaacccagtttccctgcaaggatgtgctcactgtgaacagatgtagtggttaccactccagatgtctgcctagcatttgagacaacctgtcacccctgcctctctctgggaacttttgccccaccaccatacagaggggcagtaggcccagccataatcaactgaaacagatacagagttatgacctgagcctaggcaattaggttttctcaggaatatggatctgggactaaagaactcagcat

SEQ ID NO: 700851 - DNA, 1327 bp, Homo sapiens
ttttattttttttttttgagacggagtctcactctgtcgcccaggctggagcacagtggcacgacctcggctcactgcaagctccgcctcctgggttcacgccattctcctgcctcagcctcccgagtagctggaactacaggcacccaccaccacgcctggctaatttttttgtattttcagtagagatggggtttcacygtgttagccaggatggtctcgatctcctgacctcatgatcttggcctcccaaagtgctggcattacaggcgtgagccaccgcgccctgccaatagttcttatttttaatggaaactttaaaatttatctgtctgtgtgtctattagagtcttgctgtgtcacccaggctggagtgcagttgcataatcgtagctcaccgtaacattgaactgggctcgagcttcccagagtgctgggattataggtgtgagctactgcgcacagcctacaattttttgatacgtagttttgggaggtgctgtggctggagtgcagtggcatgatcatagctcactgcatcctcgaactcctgggctcaagtgatcctctcctgcttcagcctcagctcggtagctgggactacaggtgcctgccaccatgcctggctacattgttaaattttttgtaaagacaaggtcttgctatgtttcccaggctggttggtcttgaactcctggcttcaagtgatccttctgccttgccctcccaaagtgctgagattacaggtatgagccaccacacctgactgtgaacttttaatcataataagttagtttccctcttaatccattcactcaggtctcctttcctagatgacagctactgttaggagtttcttgggtgttcagaaatattttttgcatatgcaaatgtgcaatacattctttctctgcttttaaaaaatattgtgcctcaatgtgggtgtgctttacctattgccagatgccttgcttttctaaatgtttcttcattgttccacttcagcacagagatacctacctcagtctttattaactaccacatatttctgtagaatgaatatataatagaaacatcttagatgcttgtattttattttatcagtttattttaaagcttaatgatcaaatgattataagcataaaatgtaggttatgtgctggcatttgggtatgtaagaattggctaacttttatggcaagattttcagactcttaatcagaggaatactgtggttctagtaagtacatctgcattgcagctaggtagttgacaaagtatcttgaaaccttttagttaagatgaggaaatagctaggcgtggtggc

SEQ ID NO: 700852 - DNA, 1327 bp, Homo sapiens
ttttattttttttttttgagacggagtctcactctgtcgcccaggctggagcacagtggcacgacctcggctcactgcaagctccgcctcctgggttcacgccattctcctgcctcagcctcccgagtagctggaactacaggcacccaccaccacgcctggctaatttttttgtattttcagtagagatggggtttcaccgtgttagccaggatggtctcgatctcctgacctcatgatcttggcctcccaaagtgctggcattacaggcgtgagccaccgcgccctgccaatagttcttatttttaatggaaactttaaaatttatctgtctgtgtgtctattagagtcttgctgtgtcacccaggctggagtgcagttgcrtaatcgtagctcaccgtaacattgaactgggctcgagcttcccagagtgctgggattataggtgtgagctactgcgcacagcctacaattttttgatacgtagttttgggaggtgctgtggctggagtgcagtggcatgatcatagctcactgcatcctcgaactcctgggctcaagtgatcctctcctgcttcagcctcagctcggtagctgggactacaggtgcctgccaccatgcctggctacattgttaaattttttgtaaagacaaggtcttgctatgtttcccaggctggttggtcttgaactcctggcttcaagtgatccttctgccttgccctcccaaagtgctgagattacaggtatgagccaccacacctgactgtgaacttttaatcataataagttagtttccctcttaatccattcactcaggtctcctttcctagatgacagctactgttaggagtttcttgggtgttcagaaatattttttgcatatgcaaatgtgcaatacattctttctctgcttttaaaaaatattgtgcctcaatgtgggtgtgctttacctattgccagatgccttgcttttctaaatgtttcttcattgttccacttcagcacagagatacctacctcagtctttattaactaccacatatttctgtagaatgaatatataatagaaacatcttagatgcttgtattttattttatcagtttattttaaagcttaatgatcaaatgattataagcataaaatgtaggttatgtgctggcatttgggtatgtaagaattggctaacttttatggcaagattttcagactcttaatcagaggaatactgtggttctagtaagtacatctgcattgcagctaggtagttgacaaagtatcttgaaaccttttagttaagatgaggaaatagctaggcgtggtggc

SEQ ID NO: 700853 - DNA, 621 bp, Homo sapiens
agttatttactttctccacccccaaagaaactaatgttattgctttcttgtgtgttcttcaggaaatgttttatgcatctccaagtaaacacacatatatcccctgtctttaaaagaaggaggaaaacgtttgaacattgcatttactttatttccattaactgtatcttggagatgtttccatgtcagtatatataaagggtattctcattagtttggatgcttgcatattattccattgtatggatgtactgtagttttggagtttttaaaaccagggtcctaaagccaggacattagcttgcttttactttttttttttaaatgctacttcaagtaatttagcaatgattaacttgtgccatgaattcctgaaagaattgcagtatcaaagtatatctgtgcatttataatttttagagctgttgccaaatatctaaccctaaagaggttgtatcaaattacatttccaccaccaattaagaaagtggtgatagaattaaaagccgatgctctagtcacccatatagttacttttggcatgtttctagtaagygggcattgcctatgactggacgttttcagtgatggacattcattacttttcaagatagcccagtg

SEQ ID NO: 700854 - DNA, 1914 bp, Homo sapiens
tggtaaaactcacacaaaacagatggagaagagtttttgtatatcaacatgaatgttaatgtgatttttttaaagccaacgaacacatttgtgttccttgtgagatcctgtgcatgaatttgtcaggtaatttttttgacctgaacattctcataatagcttcaatttgcacaatgcaacctcgtcattttgcagattttcaaggctcacttcaaaaacatgttccttgaggcctattaacatttctttcctaaattgtctattcatatggtgcttttaaaagttagattacttttagtagatttattagagccgcacagtttagagtcagtagtcaattaaagtccctacttaaacttcagactaagattttttttttatttaatattttattttttctttttgctttcatgcagacagacatcttgcaatactttaagattcttgggccatttctgtcaggttgttctgtgttctgtgcctgcttcctccccatagtaatttcaaaatagctatcctcacctctgtaaggtttccaaaatcaaacttgggcttctggctagccttttctaggtcttgatttttcagtgctttccagaggcaattgtttggaacctcttggcacagtttctgtttcttcttccatgtacaggcatraaagatcttttggttgttttctggtaaaactatcataaaacagttcaagcaaatgactattggtagttttgtcattaacaggggtgccttctagtcgttttgtttcctggtaaaacagaccaaacagagggagcagacagtttgtacatctgtatgagtgttgatgtgctttttattttaagccagggaacacattttatgttatttatgacatcctttccatgaatttgtcaggtgatttttgagctgaacattctcagtaataactttagtttacaaaatacaacctagtctttctgcagattttctaggcccacttcaaatgcattgaccatcagatggcatcttggttccttacgtcctttctgtgactgaatgtccataattccacatcatactgatctttcttagaaaaggcaacagttactttcttctttattccttttttaatgcttgtgaggtagttcttgttgatcacagcgatgctattctcttattcttcatgtcatatttagcagtttttttctagtttgtcatttgataatcttgattggtgtattttgatgtacagaaatttaaaatttatgtagttaaatctttctttaatttctattgcttttgtatttgtagctcttgactagatagtcttaactgtagtatagactttaacagtgttttctttcttttctttttttttttttagttgcaactactggcccttcagtatattatagtcagtcaccagcatataattcccagtatcttctcagaccagcagctaatgttactcccacaaaggtaacaaaggaataatttatacatttataattattttctttttaaattgtttagggtccttcaaataaattcaagagagcagttcactattaaaacttttatgtcccttaaaatgtagatattttaaatttatctccaaatacagaaattatccttcttagtcaccttatttttgagttaataagtgtgaatatttagaatattttaaaaatgggagtggtggtggtggatccttcatcgttctgttttaacagaaatagaactgtaatgcccttgctgacccactatgtggtaagtactttcaggcctgatacagctatatatataacaattgattgaagactcaatattacagtggtagttgaatgtgacagctttgaggatagagtgttggggtgcatttagacccttgctcttctgcttattttgaccacaggcaagtttcttaacctctcaatg

SEQ ID NO: 700855 - DNA, 1914 bp, Homo sapiens
tggtaaaactcacacaaaacagatggagaagagtttttgtatatcaacatgaatgttaatgtgatttttttaaagccaacgaacacatttgtgttccttgtgagatcctgtgcatgaatttgtcaggtaatttttttgacctgaacattctcataatagcttcaatttgcacaatgcaacctcgtcattttgcagattttcaaggctcacttcaaaaacatgttccttgaggcctattaacatttctttcctaaattgtctattcatatggtgcttttaaaagttagattacttttagtagatttattagagccgcacagtttagagtcagtagtcaattaaagtccctacttaaacttcagactaagattttttttttatttaatattttattttttctttttgctttcatgcagacagacatcttgcaatactttaagattcttgggccatttctgtcaggttgttctgtgttctgtgcctgcttcctccccatagtaatttcaaaatagctatcctcacctctgtaaggtttccaaaatcaaacttgggcttctggctagccttttctaggtcttgatttttcagtgctttccagaggcaattgtttggaacctcttggcacagtttctgtttcttcttccatgtacaggcatgaaagrtcttttggttgttttctggtaaaactatcataaaacagttcaagcaaatgactattggtagttttgtcattaacaggggtgccttctagtcgttttgtttcctggtaaaacagaccaaacagagggagcagacagtttgtacatctgtatgagtgttgatgtgctttttattttaagccagggaacacattttatgttatttatgacatcctttccatgaatttgtcaggtgatttttgagctgaacattctcagtaataactttagtttacaaaatacaacctagtctttctgcagattttctaggcccacttcaaatgcattgaccatcagatggcatcttggttccttacgtcctttctgtgactgaatgtccataattccacatcatactgatctttcttagaaaaggcaacagttactttcttctttattccttttttaatgcttgtgaggtagttcttgttgatcacagcgatgctattctcttattcttcatgtcatatttagcagtttttttctagtttgtcatttgataatcttgattggtgtattttgatgtacagaaatttaaaatttatgtagttaaatctttctttaatttctattgcttttgtatttgtagctcttgactagatagtcttaactgtagtatagactttaacagtgttttctttcttttctttttttttttttagttgcaactactggcccttcagtatattatagtcagtcaccagcatataattcccagtatcttctcagaccagcagctaatgttactcccacaaaggtaacaaaggaataatttatacatttataattattttctttttaaattgtttagggtccttcaaataaattcaagagagcagttcactattaaaacttttatgtcccttaaaatgtagatattttaaatttatctccaaatacagaaattatccttcttagtcaccttatttttgagttaataagtgtgaatatttagaatattttaaaaatgggagtggtggtggtggatccttcatcgttctgttttaacagaaatagaactgtaatgcccttgctgacccactatgtggtaagtactttcaggcctgatacagctatatatataacaattgattgaagactcaatattacagtggtagttgaatgtgacagctttgaggatagagtgttggggtgcatttagacccttgctcttctgcttattttgaccacaggcaagtttcttaacctctcaatg

SEQ ID NO: 700856 - DNA, 1914 bp, Homo sapiens
tggtaaaactcacacaaaacagatggagaagagtttttgtatatcaacatgaatgttaatgtgatttttttaaagccaacgaacacatttgtgttccttgtgagatcctgtgcatgaatttgtcaggtaatttttttgacctgaacattctcataatagcttcaatttgcacaatgcaacctcgtcattttgcagattttcaaggctcacttcaaaaacatgttccttgaggcctattaacatttctttcctaaattgtctattcatatggtgcttttaaaagttagattacttttagtagatttattagagccgcacagtttagagtcagtagtcaattaaagtccctacttaaacttcagactaagattttttttttatttaatattttattttttctttttgctttcatgcagacagacatcttgcaatactttaagattcttgggccatttctgtcaggttgttctgtgttctgtgcctgcttcctccccatagtaatttcaaaatagctatcctcacctctgtaaggtttccaaaatcaaacttgggcttctggctagccttttctaggtcttgatttttcagtgctttccagaggcaattgtttggaacctcttggcacagtttctgtttcttcttccatgtacaggcatgaaagatcttttggttgttttctggtaaaactatcataaaacagttcaagcaaatgactattggtagttttgtcattaacakgggtgccttctagtcgttttgtttcctggtaaaacagaccaaacagagggagcagacagtttgtacatctgtatgagtgttgatgtgctttttattttaagccagggaacacattttatgttatttatgacatcctttccatgaatttgtcaggtgatttttgagctgaacattctcagtaataactttagtttacaaaatacaacctagtctttctgcagattttctaggcccacttcaaatgcattgaccatcagatggcatcttggttccttacgtcctttctgtgactgaatgtccataattccacatcatactgatctttcttagaaaaggcaacagttactttcttctttattccttttttaatgcttgtgaggtagttcttgttgatcacagcgatgctattctcttattcttcatgtcatatttagcagtttttttctagtttgtcatttgataatcttgattggtgtattttgatgtacagaaatttaaaatttatgtagttaaatctttctttaatttctattgcttttgtatttgtagctcttgactagatagtcttaactgtagtatagactttaacagtgttttctttcttttctttttttttttttagttgcaactactggcccttcagtatattatagtcagtcaccagcatataattcccagtatcttctcagaccagcagctaatgttactcccacaaaggtaacaaaggaataatttatacatttataattattttctttttaaattgtttagggtccttcaaataaattcaagagagcagttcactattaaaacttttatgtcccttaaaatgtagatattttaaatttatctccaaatacagaaattatccttcttagtcaccttatttttgagttaataagtgtgaatatttagaatattttaaaaatgggagtggtggtggtggatccttcatcgttctgttttaacagaaatagaactgtaatgcccttgctgacccactatgtggtaagtactttcaggcctgatacagctatatatataacaattgattgaagactcaatattacagtggtagttgaatgtgacagctttgaggatagagtgttggggtgcatttagacccttgctcttctgcttattttgaccacaggcaagtttcttaacctctcaatg

SEQ ID NO: 700857 - DNA, 1914 bp, Homo sapiens
tggtaaaactcacacaaaacagatggagaagagtttttgtatatcaacatgaatgttaatgtgatttttttaaagccaacgaacacatttgtgttccttgtgagatcctgtgcatgaatttgtcaggtaatttttttgacctgaacattctcataatagcttcaatttgcacaatgcaacctcgtcattttgcagattttcaaggctcacttcaaaaacatgttccttgaggcctattaacatttctttcctaaattgtctattcatatggtgcttttaaaagttagattacttttagtagatttattagagccgcacagtttagagtcagtagtcaattaaagtccctacttaaacttcagactaagattttttttttatttaatattttattttttctttttgctttcatgcagacagacatcttgcaatactttaagattcttgggccatttctgtcaggttgttctgtgttctgtgcctgcttcctccccatagtaatttcaaaatagctatcctcacctctgtaaggtttccaaaatcaaacttgggcttctggctagccttttctaggtcttgatttttcagtgctttccagaggcaattgtttggaacctcttggcacagtttctgtttcttcttccatgtacaggcatgaaagatcttttggttgttttctggtaaaactatcataaaacagttcaagcaaatgactattggtagttttgtcattaacaggggtgccttctagtcgttttgtttcctggtaaaacagaccaaacagagggagcagacagtttgtacatctgtatgagtgttgatgtgctttttattttaagccagggaacacattttatgttatttatgacatcctttccatgaatttgtcaggtgatttttgagctgaacattctcagtaatarctttagtttacaaaatacaacctagtctttctgcagattttctaggcccacttcaaatgcattgaccatcagatggcatcttggttccttacgtcctttctgtgactgaatgtccataattccacatcatactgatctttcttagaaaaggcaacagttactttcttctttattccttttttaatgcttgtgaggtagttcttgttgatcacagcgatgctattctcttattcttcatgtcatatttagcagtttttttctagtttgtcatttgataatcttgattggtgtattttgatgtacagaaatttaaaatttatgtagttaaatctttctttaatttctattgcttttgtatttgtagctcttgactagatagtcttaactgtagtatagactttaacagtgttttctttcttttctttttttttttttagttgcaactactggcccttcagtatattatagtcagtcaccagcatataattcccagtatcttctcagaccagcagctaatgttactcccacaaaggtaacaaaggaataatttatacatttataattattttctttttaaattgtttagggtccttcaaataaattcaagagagcagttcactattaaaacttttatgtcccttaaaatgtagatattttaaatttatctccaaatacagaaattatccttcttagtcaccttatttttgagttaataagtgtgaatatttagaatattttaaaaatgggagtggtggtggtggatccttcatcgttctgttttaacagaaatagaactgtaatgcccttgctgacccactatgtggtaagtactttcaggcctgatacagctatatatataacaattgattgaagactcaatattacagtggtagttgaatgtgacagctttgaggatagagtgttggggtgcatttagacccttgctcttctgcttattttgaccacaggcaagtttcttaacctctcaatg

SEQ ID NO: 700858 - DNA, 1329 bp, Homo sapiens
  misc_feature 715, 844, 845, 846, 847, 848, 849, 850, 851, 852, 853, 854,855, 856, 857, 858, 859, 860, 861, 862, 863, 864, 865, 866,867, 868, 869, 870, 871, 872, 873, 874, 875, 876, 877, 878,879, 880, 881, 882, 883, 884, 885, 886, 887, 888, 889: n = A,T,C or G
  misc_feature 890, 891, 892, 893, 894, 895, 896, 897, 898, 899, 900, 901,902, 903, 904, 905, 906, 907, 908, 909, 910, 911, 912, 913,914, 915, 916, 917, 918, 919, 920, 921, 922, 923, 924, 925,926, 927, 928, 929, 930, 931, 932, 933, 934, 935, 936: n = A,T,C or G
  misc_feature 937, 938, 939, 940, 941, 942, 943: n = A,T,C or G
gacaaggtttcaccatcttggccaggctggtcttaagctgctgacctcgtgatccacccgcctccgcctcccaaagtgctaggattacaggcgtgarccatcgcacctggccagtctgttttttaaaagagaagacagctgggcatggtggctcacacctgttatcccaacactgtgggaggccaaggaacgcagattgcttgaacccaggagtttgagaccagcctgggcaatatagtgaaaccctgtctctataaaaaatacaaaaatttagttgagcatggtgatgtgcacttgtagtctcagctacctgcaggctgaggtgggagaatcacctgagcccagggaggtcgacactgcaatgagctgtgatcatgccactgcactttagcctaggtgactgactgagaccctgtctcaaaaaaaaaaaaaaaaaaaaaaaaaggaaggaacgtgtgtgggtgtgggtgtgggtgtgtgttctttttactgaagcaaaatattaattcaaatattttatataaaaaaaagaattgaccgcaaagggaatttctggctaggatttctgtttttaatcatgactatttcagttctgtaaatatgactattaacagtgttagaagacatattccatatatcagtagacttcggtattcaaagagaaacaagagcctggaaacattaaggcttcaatgttcatgatgtgaccaggatnatctaaattgaggcaatgattaaaatgttttgtcagggagtagtttattcagggaatcctggatgaattgccgagaaatcaatggtgaactattaaatgatgcatataagtaggaagatgatgtcccgnnnnnnnnnnnnnnnnnnnnnnnnnnnnnnnnnnnnnnnnnnnnnnnnnnnnnnnnnnnnnnnnnnnnnnnnnnnnnnnnnnnnnnnnnnnnnnnnnnnntaaagcaaagcaatcttccattagtcatttctaattttatttgtgcactaatggaaagaaaacactgatctgaatgaaatcaatgattaaataaacaactgtacttacgtgttagatgaaagatgccatcacaggcactaatatgagataaaaaagcattccccaggccctgcccattgtgagctcctttcacaaggccagcaatatccaccacatttagaaaggcaggaattttgctgaaaaacaaaagatggctttattataaaacagtactaaaaacttatctatcaaccaaatgaattctccaaacatttcacataaattctttcctttctagaacaatggaacaataatgatttgataaatgaatatccacccctcccccc

SEQ ID NO: 700859 - DNA, 613 bp, Homo sapiens
taacaactaaaaccactcatatgataaatatgaagttgatatagtttggatgttctgtcacctccaaaacttatgttgaaatgtgatgcgtaatggtggaggtggggcctggtgggaggcgtttgggtcacggggtggatccctcatgaatggcttggtgccctctccatagtaatgagtgagttctcgctctgttagttcactggagagcaggttgtttaaaatggtctggtgcctstctccactctctcttgctccccctgtctccatgtgacacacccactccccttttcatcttctggccatgagttaaagctgcctcgtccgggtgcagtggctcacgcctgtaatctcagcactttggaaggccaaggtgggtggatcacctaaggtcaggagtttgagaccagcctgaccaacatggagaaaccccatctctactaaaaatacaaaattagaagggtgtggtagcacatgcctgtaatcccagctactcaggaggctggggcaggaaatcacttgaacccaggaggcggaggttgcagtgagctgagatcgcgccattgcactccagcctgggcaacaatggcgaaactccctctcaaaaaaaaaa

SEQ ID NO: 700860 - DNA, 872 bp, Homo sapiens
ttccttactatcatgagagcagcatgggagaaactgccctcatgatccagtcaactcccactatgtccctccctcsatccctggggattacaattcgagatgagatttgggcggagacacagagccaaaccaaatcaaaaactatagaaagaaagatgttcacttgcccaaactaaaattagagtgcatatccgtctttattttacattgtgctgaagttaagtctgtctctcctagcgccagtcttgcccagtgctgggttttaaaggctcttctagcctttaattcatacctccagtcaagtctgtttaatgtgccactattttaggatccccaaccctacgaacatgggccctgctcaaagccttgcattcactttgtgtggaatgtgctcgccctgccactaagctaatgtcttctcctagctcccctattacatgttcagtcaacgtgaatcgattcctgctcaccttcttagttcaaatttcagttcccttcgaagattgggttcctctttaaaatctagcattttggaaatcaggtcatgcaaaatccttaatgacttcccattttacgaagtaatttttaaaaacttttattttggaataacttgatactcacagaaaaattgtaaaaataatgcagtttccagtaattcttcacccagtttctcataaagttaatatcttatttataaaccatattcataaaataattattcaaatcagaaaattcacctcgatacaatactattaacaaatttacagaccttgttctgtaaatttaccagttgtccaactaataatggtccttttcctgattcaggatctaatttaagattttatactgcattttgtcatgtttcttcagtc

SEQ ID NO: 700861 - DNA, 1664 bp, Homo sapiens
aggacagtttcaagtagatgaggtgatggaagcttttgcaggagaaatgaaggaatttctgggcagaaaatcaatccactgtgtgtcatctatatagtcaagtgtgttttgctacaaaagtcgttacatagtgatccattgtatatgaccaatattggtaacttctttgatttgaaccgccaagaaatgcatgattcattgggagcaatttgcatcatattaacatatatatgtttttcgttattctgaataaaactcactcccaatgtgacttttgtttccctgttatatattacattatactaggcatatattttaaaatttatgttttcattatatgtaatttactaacaaaatatttccataatttaacagaggttaatttttttctcactatgtcttcagtataatagcagtgaatggatgcctggagaacccatctatacacagactgttttccacartagcagagctgttgattgtcagctgcccactgatgttcagcagtttgataccatggatctggtgggtgggaaaccaactgggaagtggcagttgaaggtaaaaaataaaaagacatcttcatatttataaacaaagtaaatacttaacatttcataatgaatttagaacatttagaacaaatcatcttattatagaactattatgttacaggtatctaatgatggttataaattcagtaatcccaaaataacggtcatatatgatggtgcttgccaagtttgtggtctctataaaaatgactcatgtactataaaggtatgtatttttttcatgtattttcacatttacatcataggtattttcatttcctatgctgtgggcacattaattgtagttttttcacttttataccagaaaaactaatagagaaaagccttcctcaagtttatataagttaactgaaattgttactctgcctgcaacgaagaggttcctacctttaacattttgaaatggcagattacttctaaaaaattgtaagaggaagtccagactaaattatttactacttcactcctacctacattgttttttcagtagtaataatgactttccaataagagatcttacgttacctactcttctttgcatcaagtgacatacatttggttaaaatttgtaaaatgtataaagttagtatttttatggggagtatttcctggcaactaattttattggagcatgtaaatacctgccacttgatggattacagaacagcagtgcagcctgagctgaggtgaagtcacaacttcttcttagtctatatccagccttccgtatttatcagaagggctgtctcacatgtgaactgctgacttaagagacacttgactcctcaaagctgaggtgcatacaaataatatttatgtacatgaaaattttaaagtattattttttctaagtttaaaatttattttcttgagattagtcatcagatcaaatctctggttttgagagattgtttgatttttatttttcccaaatattccatttccatatattcataagtactttaaaaatattattattcaagattgttttctcctcctggagctattttgctctaacttttgtgcaattttccaagtgatattaaaggagattttgtaaaatgagctaagtttatatttcctgaataa

SEQ ID NO: 700862 - DNA, 1664 bp, Homo sapiens
aggacagtttcaagtagatgaggtgatggaagcttttgcaggagaaatgaaggaatttctgggcagaaaatcaatccactgtgtgtcatctatatagtcaagtgtgttttgctacaaaagtcgttacatagtgatccattgtatatgaccaatattggtaacttctttgatttgaaccgccaagaaatgcatgattcattgggagcaatttgcatcatattaacatatatatgtttttcgttattctgaataaaactcactcccaatgtgacttttgtttccctgttatatattacattatactaggcatatattttaaaatttatgttttcattatatgtaatttactaacaaaatatttccataatttaacagaggttaatttttttctcactatgtcttcagtataatagcagtgaatggatgcctggagaacccatctatacacagactgttttccacaatagcagagctgttgattgtcagctgcccactgatgttcagcagtttgataccatggatctggtgggtgggaaaccaactgggaagtggcagttgaaggtaaaaaataaaaagacatcttcatatttataaacaaagtaaatacttaacatttcataatgaatttagaacatttagaacaaatcatcttattatagaactattatgttacaggtatctaatgatggttataaattcagtaatcccaaaataayggtcatatatgatggtgcttgccaagtttgtggtctctataaaaatgactcatgtactataaaggtatgtatttttttcatgtattttcacatttacatcataggtattttcatttcctatgctgtgggcacattaattgtagttttttcacttttataccagaaaaactaatagagaaaagccttcctcaagtttatataagttaactgaaattgttactctgcctgcaacgaagaggttcctacctttaacattttgaaatggcagattacttctaaaaaattgtaagaggaagtccagactaaattatttactacttcactcctacctacattgttttttcagtagtaataatgactttccaataagagatcttacgttacctactcttctttgcatcaagtgacatacatttggttaaaatttgtaaaatgtataaagttagtatttttatggggagtatttcctggcaactaattttattggagcatgtaaatacctgccacttgatggattacagaacagcagtgcagcctgagctgaggtgaagtcacaacttcttcttagtctatatccagccttccgtatttatcagaagggctgtctcacatgtgaactgctgacttaagagacacttgactcctcaaagctgaggtgcatacaaataatatttatgtacatgaaaattttaaagtattattttttctaagtttaaaatttattttcttgagattagtcatcagatcaaatctctggttttgagagattgtttgatttttatttttcccaaatattccatttccatatattcataagtactttaaaaatattattattcaagattgttttctcctcctggagctattttgctctaacttttgtgcaattttccaagtgatattaaaggagattttgtaaaatgagctaagtttatatttcctgaataa

SEQ ID NO: 700863 - DNA, 1664 bp, Homo sapiens
aggacagtttcaagtagatgaggtgatggaagcttttgcaggagaaatgaaggaatttctgggcagaaaatcaatccactgtgtgtcatctatatagtcaagtgtgttttgctacaaaagtcgttacatagtgatccattgtatatgaccaatattggtaacttctttgatttgaaccgccaagaaatgcatgattcattgggagcaatttgcatcatattaacatatatatgtttttcgttattctgaataaaactcactcccaatgtgacttttgtttccctgttatatattacattatactaggcatatattttaaaatttatgttttcattatatgtaatttactaacaaaatatttccataatttaacagaggttaatttttttctcactatgtcttcagtataatagcagtgaatggatgcctggagaacccatctatacacagactgttttccacaatagcagagctgttgattgtcagctgcccactgatgttcagcagtttgataccatggatctggtgggtgggaaaccaactgggaagtggcagttgaaggtaaaaaataaaaagacatcttcatatttataaacaaagtaaatacttaacatttcataatgaatttagaacatttagaacaaatcatcttattatagaactattatgttacaggtatctaatgatggttataaattcagtaatcccaaaataacggtcatatatgatggtgcttgccaagtttgtggtctctataaaaatgactcatgtactataaaggtatgtatttttttcatgtattttcacatttacatcataggtattttcatttcctatgctgtkggcacattaattgtagttttttcacttttataccagaaaaactaatagagaaaagccttcctcaagtttatataagttaactgaaattgttactctgcctgcaacgaagaggttcctacctttaacattttgaaatggcagattacttctaaaaaattgtaagaggaagtccagactaaattatttactacttcactcctacctacattgttttttcagtagtaataatgactttccaataagagatcttacgttacctactcttctttgcatcaagtgacatacatttggttaaaatttgtaaaatgtataaagttagtatttttatggggagtatttcctggcaactaattttattggagcatgtaaatacctgccacttgatggattacagaacagcagtgcagcctgagctgaggtgaagtcacaacttcttcttagtctatatccagccttccgtatttatcagaagggctgtctcacatgtgaactgctgacttaagagacacttgactcctcaaagctgaggtgcatacaaataatatttatgtacatgaaaattttaaagtattattttttctaagtttaaaatttattttcttgagattagtcatcagatcaaatctctggttttgagagattgtttgatttttatttttcccaaatattccatttccatatattcataagtactttaaaaatattattattcaagattgttttctcctcctggagctattttgctctaacttttgtgcaattttccaagtgatattaaaggagattttgtaaaatgagctaagtttatatttcctgaataa

SEQ ID NO: 700864 - DNA, 1664 bp, Homo sapiens
aggacagtttcaagtagatgaggtgatggaagcttttgcaggagaaatgaaggaatttctgggcagaaaatcaatccactgtgtgtcatctatatagtcaagtgtgttttgctacaaaagtcgttacatagtgatccattgtatatgaccaatattggtaacttctttgatttgaaccgccaagaaatgcatgattcattgggagcaatttgcatcatattaacatatatatgtttttcgttattctgaataaaactcactcccaatgtgacttttgtttccctgttatatattacattatactaggcatatattttaaaatttatgttttcattatatgtaatttactaacaaaatatttccataatttaacagaggttaatttttttctcactatgtcttcagtataatagcagtgaatggatgcctggagaacccatctatacacagactgttttccacaatagcagagctgttgattgtcagctgcccactgatgttcagcagtttgataccatggatctggtgggtgggaaaccaactgggaagtggcagttgaaggtaaaaaataaaaagacatcttcatatttataaacaaagtaaatacttaacatttcataatgaatttagaacatttagaacaaatcatcttattatagaactattatgttacaggtatctaatgatggttataaattcagtaatcccaaaataacggtcatatatgatggtgcttgccaagtttgtggtctctataaaaatgactcatgtactataaaggtatgtatttttttcatgtattttcacatttacatcataggtattttcatttcctatgctgtgggcacattaattgtagttttttcacttttataccagaaaaactaatagagaaaagccttcctcaagtttatataagttaactgaaattgttactctgcctgcaacgaagaggttcctaccttyaacattttgaaatggcagattacttctaaaaaattgtaagaggaagtccagactaaattatttactacttcactcctacctacattgttttttcagtagtaataatgactttccaataagagatcttacgttacctactcttctttgcatcaagtgacatacatttggttaaaatttgtaaaatgtataaagttagtatttttatggggagtatttcctggcaactaattttattggagcatgtaaatacctgccacttgatggattacagaacagcagtgcagcctgagctgaggtgaagtcacaacttcttcttagtctatatccagccttccgtatttatcagaagggctgtctcacatgtgaactgctgacttaagagacacttgactcctcaaagctgaggtgcatacaaataatatttatgtacatgaaaattttaaagtattattttttctaagtttaaaatttattttcttgagattagtcatcagatcaaatctctggttttgagagattgtttgatttttatttttcccaaatattccatttccatatattcataagtactttaaaaatattattattcaagattgttttctcctcctggagctattttgctctaacttttgtgcaattttccaagtgatattaaaggagattttgtaaaatgagctaagtttatatttcctgaataa

SEQ ID NO: 700865 - DNA, 1007 bp, Homo sapiens
cgaaaccccgtctctactaaaaatatgaaaattagctgggtgtggtggygcacgcctgtaatcccagctacttgggaggctgagacaggagaatcgcttgaaactgagaggcagaggttgcagtgagccgagatggcaccactgcactccagcctgggcgacaaagtgagactccatctcaaaaaaaagagaaagaaacccattaagaatttaaatgtgagatgggaaatgagcaaggttttggccttgagagataagcgttcgctttatccttggagaataggagggaattgggcctagactctgaggtgagaaaatgcctggagcactcagtggtgggtgaactggcttctgtctcagagaatggtgaatagctaggcagacagcctgcctctgaagactgaggcaggtggaattcaccctgtaagttgtgtttctgttttaatctaacactgcaacaaattccagatgttaaaagtcacagccccttctcaactgttctgtgaaaaatatgagcacacggagtcctccctataccaaggcctatgaggccatcagcaatagtgtctctagaagaatagctgtgggcattgctctggattaaacatgagccgacagcctggaacactgaaaaagctaggagaatgcttaggactgatttctactggggtttagagctgcagtaattacaatataaataagcgttaccttatcttgtatcagagaccacagtggccatatataaataaggattcaaacattccaatattgcactttcataccatttgttaaatattctcaccaaagagaagctacaaaagggcccgctttgctggtgcgcgacggcgtgtttctgttcctcactgcctctcgcggcgtccgttcgcccctcgccttcctcaggttcaggctgagcgccgcgtgggccgcagccagagggggcgtagcggaacgggagcgggcggtggccaggctgcccccacgagaaatgcggcagcctggggttc

SEQ ID NO: 700866 - DNA, 1007 bp, Homo sapiens
cgaaaccccgtctctactaaaaatatgaaaattagctgggtgtggtggcgcacgcctgtaatcccagctacttgggaggctgagacaggagaatcgcttgaaactgagaggcagaggttgcagtgagccgagatggcaccactgcactccagcctgggcgacaaagtgagactccatctcaaaaaaaagagaaagaaacccattaagaatttaaatgtgagatgggaaatgagcaaggttttggccttgagagataagcgttcgctttatccttggagaataggagggaattgggcctagactctgaggtgagaaaatgcctggagcactcagtggtgggtgaactggcttctgtctcagagaatggtgaatagctaggcagacagcctgcctctgaagactgaggcaggtggaattcaccctgtaagttgtgtttctgttttaatctaacactgcaacaaattccagatgttaaaagtcacagccccttctcarctgttctgtgaaaaatatgagcacacggagtcctccctataccaaggcctatgaggccatcagcaatagtgtctctagaagaatagctgtgggcattgctctggattaaacatgagccgacagcctggaacactgaaaaagctaggagaatgcttaggactgatttctactggggtttagagctgcagtaattacaatataaataagcgttaccttatcttgtatcagagaccacagtggccatatataaataaggattcaaacattccaatattgcactttcataccatttgttaaatattctcaccaaagagaagctacaaaagggcccgctttgctggtgcgcgacggcgtgtttctgttcctcactgcctctcgcggcgtccgttcgcccctcgccttcctcaggttcaggctgagcgccgcgtgggccgcagccagagggggcgtagcggaacgggagcgggcggtggccaggctgcccccacgagaaatgcggcagcctggggttc

SEQ ID NO: 700867 - DNA, 2367 bp, Homo sapiens
ttatttagtaaaatatgtgctgttgagaaaatgccctttcaaaactgtgccttagaaataaattatattttaacataatttttctacgtattttcttataccagctacagcctgaattgagcactatatcagaggatgggaaagaatactacctgaggatagaaagcacagttcctattatttgttctgaatttagtgagcttgatcaagaatgcaaaatctcattaaaactgaaaactattggtcaaggtaatatactaactttattttatcttattattagattgcaaacaataatgcttttttttcctgtaggaaaagtcactggagtgtactcatataataaatcatgttgcatgttgacatcaaattttagcccaatcatattactaatactcggccaaactgacgattgccaaagcaattcacatttcttcttcttggctgaaagcatacattttaaaaaaagaaaaaaaatagtgaataatctcctcttcgtcatcatctttttcctctcgctcctctttttttctcctatttttttctcattctcctgtttattcctctgtttgcttagtttacagaaaacgagggaaaaactgctctttaagatttttcaaatcatccccaatgagagacatttgataagttacgttaaaagttcaagcttatgaaatatagatctcataatgcatccttcaagtttctctccctaacgtacgtttatgtttgggatcttgtgtcttaaaattcttctatttcaattactgattatatggatgttgtgatacatggccacatatgtgtcaatggatagagtgaagaaatcctcccacataacaagatagaatatgcgaggacaaaccatgcatagcagtgattggcttgattatgttctttttcccactgagcccctgatgtagagatcaaagcaagttacagatacataaaatataacctttaagagagattacaatttcattggcataccacatacattttcaccgtagaacattacattgtctttagtaaatataccaaacacaaggtatctatagaccttcatgtccatattataaataattaaatcagagaaacaagaagataaaaaagccaggagagagagagagagaaagagaatcatttggaatgatgcactcaagaaaagagatggctaaagagatagaggaattaagagaggtcatcttaggattgttaacagtaagcaggctcagtaatacctacctactcgctcagatttcaggagcaccacgagcaacattrtatttttaattacagcctagacatattacattataccctctctcggactatttgacacaattctacttcaagttagctctgaaaagtgtattatgcaaatattactatagtttatggagagaacagaaagaggatgatgttattgatgttttccaaaatcatgttagtcaaagattttcttcagttacaggtatactttaaaatatattttcatgctttcaattctttcaacaaggcaagcattgctaaaataatataataatagcctaaatatatttctacattttagaagtttgcatgcatgttcttattctctgagaattaaaaatggcttttgtttgttgaagaaaaaattctggatttcattctggatacccctcatcttgtcctctttaagtacagtagcattaaatctttactttcatagggaaccagttggtgtctgagtgtatttctaaacagactatgctgctattcacaggcttaaagagaacaacccctcatgtattggcttgaggaatggatgttatgggctatatctaagctagaaatattctgtattcaccttagagagttggttaagagtttgaatgtttctgttattttttatgtgcatgggaaaagtatatatttctaaaaaaatagttcagtatgcctatatctgattaatataacttcatacctaaaaaatctgtatggaagaaaagaagatagaacattttttaacaacttttttccttttagattcttaggaggactttggaatcattaattggatatgatagcatacttcctctctgaccaattttgggggcaaatctgttctttttgtttagttatacaaattcctggagttcttttctctttttttgttaccatttcctttccaaattattttttctttgttatcgaagcgagggagcatctcaaggttgtgaatatattgggacatttgggaggtgaaagaagatagcttgttactgttgtgagatcatcttcatttgttgtgatttgtctattttttgagatgataagccctttatcaataattaaaagccattgctactattcaacaatggatgg

SEQ ID NO: 700868 - DNA, 818 bp, Homo sapiens
aattatctgttgaaatagtctagtttataaaaacactattaaaaaagcaaaatatgatacttacgaacacaatcacctcctgtttcagtttcatcagaaccacatgggtgtaatcgtgcatcagaaatagctgccaagggttaaggtttgtataattattcagctgggcatgaagatatacatctacatatatccaagatgacaatttattgaaggatgatttaatacagactaagactttcttaattcttctcttatttcataacatttttttccttttaagggtgagatcaaatgaaaagataaggcatcatatttcaaaacaatcaaagctttaatatcttattttctaagtacaaatctgcatttttaaatagtgagacactgacaacatcaaatgctgacaaggatgtggagcaacaggtgctggtgagaattcaaaatggtacagctattttggagaacagtttagtggtttcttacagaactaaacatactcttagcatatgacatagaaatcatgctcctctatgtttacccaaaggagctgaaaacttatttccayagaaaaacctgcacatggaagtttatagcaactttattcataattgcccaaacttgcaagcaaccatgatgttcttcagtaggtaaatggatatgctgttgtacatatagacagcatggaatattattcagccttaaaaagaattgagctatcaagccacaaaaagacatgtaggaaacttaaatgagtattaagtgaaagaagccaatctgaaaaggctacctactaagtgattccaactatatgaaatcta

SEQ ID NO: 700869 - DNA, 589 bp, Homo sapiens
tgcccagtctggtcttgaacttctaggctcaagcgatcctcctcctcagccttccaagtagccgggattacaggcatgcgccactgtgcccagcccagaagactctcgcttcttaaatgcatttaygctatcactaaaatttgtggccttatttttccagatgccataatttcaccaaggataatttagaattacagtcactagtcaaggaagctttgatgaacaaaattgtttgagaggcactttagaacagaaagaggacaaagtttcaaacatccaattgtctgtaggattattggggctgaatccataaagattcagaaacatccatctaaatttctacccaaacttgcacaataccctctaaaccagagctaaagaaggactgagatagtcaaaagcatgatagagaaaggactcatcatattttaaacaagtcctcgtaacatccctaccctcccagtcaaaaaactcaataggtggggatagacatctgctcaggaccttgaggtcataaatagaatagtcattctctgagtagaatcaaatacttctttatctccagcgcttcctgaagctgcatatttta

SEQ ID NO: 700870 - DNA, 1814 bp, Homo sapiens
ggagtcgttgacccatgcaagcatatcatggcgactcagattttcactggtcacagatgtggagtacacattgacggccataccccagctggaaagcaagaagaaaggtgaggtcagcactggggcctcatgtagctccttagctgtcaagagagaggggctgtatgatactgggaagtaagaaacattccctccagattggcctctcagtttatccccagagggagggtctttattccttagacatttcatgagcatctactatatgctagacgtgcaccaggagccagtaattccaagttaattaagaaatggcctctgccttgaggcatttacagacaggcagatcccctcagtagggagtgatgaggcagtgaaacaggcacataaatgttcagggacagcacaaagaagggtgtgagcgcatctgctgggcagggtcagcgaaggcttcaragcagagatgttggagcctgagaagaataggaattttccagacataaaaagggatgggtggaaggcatttcagccacagggactagcaagaacaaaggcagagcttattccgggcactctgagtcgtggagcaggcccggggagcagatttttctgttggggtgtggcacaatgaggttggcagggacaggttgccaggcccttgtttaccagaaggaggaatctggactttctatttggatgacaggaagccattagagggttttaagcgacagtaacctgaccagatttgtgttttagaaagccagctaacctttgcctctgctccgacttcagactccacattcctgtggctgatgcagaggcatctaaattctgcttgtccacaacctttccttagaatatgcttctggctcctgtattcattatcccagtgaatgtcatcaccagcaattaatcaccaccttagaaacctgcggggtcatcccagacagcttactctccctcatgcacctatcaagtcattcctcaagtcctggaacccgacttcctcaattcgcccttttctgcttaccctcaggatttatgcataccgttgtcccttggtattcatgagggaatttgttccagaacatctccccataccaaagtcaatgcacagtcaagtcccttatataaaatgatgtagtatttacagttaacctacacacatcctcctgtatgatttaaatcatctctagattacttataatacctactaccatgtcacttcgatgtaaatagttgttatactgtattgtttaggaaatcatgacatgaaaaaaaagtctgtaagcaatgcaacaatcctttttttttcctgaatatttttgatcggtatttgattgaatccacagatgtggatcccacggatgtgaagggctgactgtattttctctctagcccaggctagcaggagcctcctaaaaggccttccagcctccagtctctccctcctcttaatccatccttgacattgctgtagtcagaatctacctaaaagcaggtctggccaccgccctcccccacttcaagtcctttcagccagcagtcataaaagagacactccttggccgaatttgccttgcagacttaaactgttcagcactcatagtgttggaaacagttttgaattagtgcccaatattttaaagttcagatgtttaacaacttgggatttctggcttcttttggccactctgaccctatgctcccgcactgaaaccagcagttggagtggagccagcagtgagcctccttcccaccccagaggccaagggtcagctgctgctgctaactgacttgcgctgttaagaaaa

SEQ ID NO: 700871 - DNA, 1341 bp, Homo sapiens
ttttaaaggtggcttcccaggttacctaatcatgttctcctctttctagacatattcttcccaacagtggagttcactaacatttaccaattttttttttgtttttagacagggtcttgttctgtcactggagtgcagtggcatgatcatagctcactgcagcctcaaacttctgagctcaagtgagctcaaactcctcctgcctcagcctccctagtagctaggtctataggtacacaccatcatgcttggctaatttttgtattttttgtagagatggggtttcactatgttgcctaggctggtcttaaactcctggcctcaagtgatcctcttgccttggcctcccaaagctttgggattacaggcgtgagccaccgagccactgagccccgccttgtttaattttattttaaaatattaattgagaatactgtggatcgtttaagtctaaacaggaaaattatttatgaattaggggtagtatttattaatctctaatggtacttccagctctaaaattgtgtgtgtgagagcgagtgtgaatgtgagatggtgtgtgtgatgtgtgtgcaatatgagtgagaaacaatggtcagtgagaacgttcttacagtagttggcccacagttttatattcgtttagttactaattaaagatccttatagggcttcagttttagtcaacaagaaacaaaaaagcatcagaaggagagaaaaatgtggctggctgcagtaatcacccaagggaacaatgaggctgaaactatccaggggagatgatctggcacctacgcaaatttctacctgtaaatgaaccaagatatgtcccttattttcaacacaaatatggcaacttcaaaggtaacctctgtgaggtttgggagaacagmtatttccaattgagaaaaggccatattcaaatatttcttgaaatattaaaaaagatacaagcttaatttaagaaaagaaaaagaggaagaagggagaaaaatggaagaagacagaaaaatggcattcatgtgcaatatgtatcattgaagtgcacatacagtatatatttttcttcttccttttttccttttataaattccagtggatgacagcataaagcaaagcttcttgtactaagcacgaaagattgccaagacacttggcctcaatcacagagggtgtatttattttattctgaatcaaaggttttaaaaatgcaataatctgcattgataaattctttgcaaacactattctagaagttgaggagctgcttggtcaccataggaggttttttcccaataccagagatacaaatttataagaaacgatagatctcctcattca

SEQ ID NO: 700872 - DNA, 1147 bp, Homo sapiens
aataccaattgttgtatatgctggaacattcattatatagtratttaaaatttataaattatttttatacacattttattttatgaccctaacagctttttgagacaggcaaaacaataattattagacatttttagataaacttaatttagagagattatcttatttgcccttgtttctcaacttgtgcatgttagaataaagacgtaagttcctggcgcctaacagctcatgttctttgtttatggtaggctagcttaggtttccttctataacaaatggggttcctaatcatatatggcttccagccatgccactttgagaattcttgatagttcttgtgattaataatggataacctatgttttctctggcatacatacacatgaattataaagagtatatttttgaattaaagcccaattaaaatattgtacaagacctagcttctttcgaaactgtatggaatttaggaaatccccatttatatgcaagaggttgttcaaaggcttattgttccaggaaaatcacataattctttgagatatcaatttcttactaatatgctctcatgagtaccatgaagcctctctgaaaaccattcttgtacaataccaaagtaaggtcctaaattctagtgcagattcataaaggaagttttagaagcagttatctgactctagcaccattcagttaagtcaaaaatacaaaaaaatgtatacaagatggatcagtgtatagaggtcagaggattccataaggagggcttctttggaggacgctgtgctttgtatggaagtgtctgcaccttgccttaagtccaatggagacaagagagtctgcaactggatcatctggagagcctagaatgtgttacttgcgattggagacactcaggacctgtgtttgatgtatacctgagaaagccaaagcagctaatggcagggcaaaaatagaaggagcaagattctatatttaaaaagtaactacactctcaacatcagggaagtccaggaatgtgagctggatgggagtgaaagttggcagtcattttaaatattactcaataatgtagccaggaaaaaaaatgggaccccaatagggagggacaggtagagccccacatataatatagtcacttatacaa

SEQ ID NO: 700873 - DNA, 1147 bp, Homo sapiens
aataccaattgttgtatatgctggaacattcattatatagtaatttaaaatttataaattatttttatacacattttattttatgaccctaacagctttttgagacaggcaaaacaataattattagacatttttagataaacttaatttagagagattatcttatttgcccttgtttctcaacttgtgcatgttagaataaagacgtaagttcctggcgcctaacagctcatgttctttgtttatggtaggctagcttaggtttccttctataacaaatggggttcctaatcatatatggcttccagccatgccactttgagaattcttgatagttcttgtgattaataatggataacctatgttttctctggcatacatacacatgaattataaagagtatatttttgarttaaagcccaattaaaatattgtacaagacctagcttctttcgaaactgtatggaatttaggaaatccccatttatatgcaagaggttgttcaaaggcttattgttccaggaaaatcacataattctttgagatatcaatttcttactaatatgctctcatgagtaccatgaagcctctctgaaaaccattcttgtacaataccaaagtaaggtcctaaattctagtgcagattcataaaggaagttttagaagcagttatctgactctagcaccattcagttaagtcaaaaatacaaaaaaatgtatacaagatggatcagtgtatagaggtcagaggattccataaggagggcttctttggaggacgctgtgctttgtatggaagtgtctgcaccttgccttaagtccaatggagacaagagagtctgcaactggatcatctggagagcctagaatgtgttacttgcgattggagacactcaggacctgtgtttgatgtatacctgagaaagccaaagcagctaatggcagggcaaaaatagaaggagcaagattctatatttaaaaagtaactacactctcaacatcagggaagtccaggaatgtgagctggatgggagtgaaagttggcagtcattttaaatattactcaataatgtagccaggaaaaaaaatgggaccccaatagggagggacaggtagagccccacatataatatagtcacttatacaa

SEQ ID NO: 700874 - DNA, 1147 bp, Homo sapiens
aataccaattgttgtatatgctggaacattcattatatagtaatttaaaatttataaattatttttatacacattttattttatgaccctaacagctttttgagacaggcaaaacaataattattagacatttttagataaacttaatttagagagattatcttatttgcccttgtttctcaacttgtgcatgttagaataaagacgtaagttcctggcgcctaacagctcatgttctttgtttatggtaggctagcttaggtttccttctataacaaatggggttcctaatcatatatggcttccagccatgccactttgagaattcttgatagttcttgtgattaataatggataacctatgttttctctggcatacatacacatgaattataaagagtatatttttgaattaaagcccaattaaaatattgtacaagacctagcttctttygaaactgtatggaatttaggaaatccccatttatatgcaagaggttgttcaaaggcttattgttccaggaaaatcacataattctttgagatatcaatttcttactaatatgctctcatgagtaccatgaagcctctctgaaaaccattcttgtacaataccaaagtaaggtcctaaattctagtgcagattcataaaggaagttttagaagcagttatctgactctagcaccattcagttaagtcaaaaatacaaaaaaatgtatacaagatggatcagtgtatagaggtcagaggattccataaggagggcttctttggaggacgctgtgctttgtatggaagtgtctgcaccttgccttaagtccaatggagacaagagagtctgcaactggatcatctggagagcctagaatgtgttacttgcgattggagacactcaggacctgtgtttgatgtatacctgagaaagccaaagcagctaatggcagggcaaaaatagaaggagcaagattctatatttaaaaagtaactacactctcaacatcagggaagtccaggaatgtgagctggatgggagtgaaagttggcagtcattttaaatattactcaataatgtagccaggaaaaaaaatgggaccccaatagggagggacaggtagagccccacatataatatagtcacttatacaa

SEQ ID NO: 700875 - DNA, 652 bp, Homo sapiens
gattcaattatttacttttctaaacattgttccaaattgtattgtattttaccttcctttttattctttattcattgaacatttatattatagttccaggttcttaaggtattaacatgaaataaacacaaatgcacctggaatcttatactctagaataagtgtatagaaggcgaaggttatcaaaatagcatttaaaatgctttgcaagattcaaaattactaattcaatgctattcagcagatattttttgagttacttcttaactgtctccctgtactgagtgttaggtagataggagattctaagacagtcatttgttagtttttcygttactataaagaaataactgaagctgggtaatttacaaagaaatgaggttttagtttggctcatgtatcttcagctatataggaagcatggtgccagcattttcttctggtgtgggcctcaagaagcttccaatcagggcagaaaacgatggggagctggcacatcacatagtgagagccggaacaagagagagaaaagaggtgccatccactttgaagcaactagatcttgagtgaactcagagcaagaactcactaatcactgaagggatggcactaaaccattcatgaaggacctgccctcatgatcccatcacct

SEQ ID NO: 700876 - DNA, 652 bp, Homo sapiens
gattcaattatttacttttctaaacattgttccaaattgtattgtattttaccttcctttttattctttattcattgaacatttatattatagttccaggttcttaaggtattaacatgaaataaacacaaatgcacctggaatcttatactctagaataagtgtatagaaggcgaaggttatcaaaatagcatttaaaatgctttgcaagattcaaaattactaattcaatgctattcagcagatattttttgagttacttcttaactgtctccctgtactgagtgttaggtagataggagattctaagacagtcatttgttagtttttccrttactataaagaaataactgaagctgggtaatttacaaagaaatgaggttttagtttggctcatgtatcttcagctatataggaagcatggtgccagcattttcttctggtgtgggcctcaagaagcttccaatcagggcagaaaacgatggggagctggcacatcacatagtgagagccggaacaagagagagaaaagaggtgccatccactttgaagcaactagatcttgagtgaactcagagcaagaactcactaatcactgaagggatggcactaaaccattcatgaaggacctgccctcatgatcccatcacct

SEQ ID NO: 700877 - DNA, 1995 bp, Homo sapiens
tattccaggagggcaagtgttctgcctcttcaagatagctgaaggaaaggaaactgtatagctccctgcagtttaaaagttagttgcgcactgattgcttcatgaataaagctggaagatctaagtttgggagtgaaggaaagaggatctgcggccgggcgcggtggctcacgcctgtaatcccagcactttgggaggccgaggcgggcggatcacaaggtcagaagatcgagaccacagtgaaacctcgtctctactaaaaatacaaaaaaaaaaaaaaaaaaaaaaaaattagccgggcgcggtggygggcgcctgtagtcccagctactcgagaggctgaggcaggagaacggcgtgaatacgggagacggagcttgcagtgagccgagatcgcgccactgcactgcagcctgggcgacagagcgagactccgtctcaaaaaaaaaaaaaaaaaagaagatctgaaagagaaaaattggagaatacagtcccagagattcatatttctagactcagatctcatggacatttttgcctgatgtgaaaaaacattgtcctggccaggtgcagtggctcacgcctgtaatcccagcactttgggaagctgaggcgggcagatcacctgagatcgggagttggagaccagcctgaccaacacggagaaatcccatcactaccaaaaatacaaaattagccaggcatggtggcgcatgcttgtaatcccagctactcaggaggctgaggcaggagaactgcttgaacccaggaggcagaggttgtggtgagccaagatcacaccactgcactccagcctgggcaacaagagcaaaactccatctcaaaaaaaaatacactgtcctgcccaaccacactcgctggtttactgctcccaaaccttgaataaaattctacaagaagatggtgtattgatgatccattctatgcctatcattctgcatctgacttcaagtctgttttatgacagtttccatgtctcctttaaagagccctttgcttttgcaggaaaatgaaagatattaccagtcttacaaaagcatgtggcttcatatattttgagtgctatgaaatattaatttttctaaaactgacattatttagcaattggaaatgtgttagctctaactttcttttatgggtacttttctgtggttataatatacaaaattaaatttaccactttgatcatttttaggtgtatagctgtgcgtcattaagtacattttaggggcattttaaaatctcttcctactctcagtgcagaggttccttcctgctttctctataagtcatatccagcagatagtatttaggaacccttcatttctcaactttgttttgacaaaattaggagtaattctattacctctttttaaaaatcgggattctaggccgggaacagtggtgcacgcctgtaatcccagcaatttgggaggccaaggcagtcagatcccttgaggccaggaattccagatcagcttgggcaacatggtgaaactccacctttattttttcaaaaaagcgattctaaagtggagtggatgaaggactatgtctttcttactggtttattgctcgtctgtgactttttattcactaaagatccctcttaggtagatcttaaactttctctcgctcagactaagtgatttcagtttcattatctattaatagatacctttgcccacactttagtcgtggagttctcacagtggttcttctctgataccttgcccaaggttatttatatcctgttaatttaaaagtctagtagtagtgtctgtaaacgccgcttaaaataaaactcaccaagggtttgccagaataggtttctggagaagaatcgctggtgtgagcaggagctctgtcccagtggggctgctgagtgtcacccactcccccactgcgattttctcactgtcagtcccaccgcttcctgccacttggtctggctggtctttttttttttttttt

SEQ ID NO: 700878 - DNA, 951 bp, Homo sapiens
gaaactattttttacaattctgtttctcccatatcatctgtcacaggcctgagaaagtaaaaagtacttcctaagtgacaacatgtagactaatttgagaaatataaactgcctcttaataactcttttgaaaaccttgttgtttttcattgaattgaggtaacaggaccagtttccctgtaaatctatggttttaaagaaaaaaagtgactgagcaacctaattgctttaaaaaacaaagccacatttaggatatatatgaatagatttatgaaattatcactgttactctcacttcacaaacttagatgtcagatatctttgtgtatgaagaattgttgaatgttgcactgcatctcaaaaaagaaatatgcaatttcattttgtatttcctgttccttctctccattgtttagtgaacaattagtagttaatcttaccttaaatttcccatcggaggagaaaatgctgacccatttattatcataatcggcaatgattatgtccccactgggatgtacagccactcctgtgggccgctgcagctgccccggagagcgtccccgtatgccaaaacgacttttgaactggccatcattggaaaatatctgtaagataaattacattcattggaatgtgaactagtacaggcattgctgaggaaggcataggcagaaacatctgccatacatacagagatcagaacacgcaaactctatttgaagaaaagtytacataaacataagcttttttccttacaccatgtatctgaagtctaaagtaggaatatatgtaactatatatatttttatcaatataagtagttaaaggtatataattaggggctatacctgcacacattggttgttactgtctgcaattaatatctttccatttgtagatgcagctaccccctgaagatttgtaaactctcctttatttcttcctttg

SEQ ID NO: 700879 - DNA, 951 bp, Homo sapiens
gaaactattttttacaattctgtttctcccatatcatctgtcacaggcctgagaaagtaaaaagtacttcctaagtgacaacatgtagactaatttgagaaatataaactgcctcttaataactcttttgaaaaccttgttgtttttcattgaattgaggtaacaggaccagtttccctgtaaatctatggttttaaagaaaaaaagtgactgagcaacctaattgctttaaaaaacaaagccacatttaggatatatatgaatagatttatgaaattatcactgttactctcacttcacaaacttagatgtcagatatctttgtgtatgaagaattgttgaatgttgcactgcatctcaaaaaagaaatatgcaatttcattttgtatttcctgttccttctctccattgtttagtgaacaattagtagttaatcttaccttaaatttcccatcggaggagaaaatgctgacccatttattatcataatcggcaatgattatgtccccactgggatgtacagccactcctgtgggccgctgcagctgccccggagagcgtccccgtatgccaaaacgacttttgaactggccatcattggaaaatatctgtaagataaattacattcattggaatgtgaactagtacaggcattgctgaggaaggcataggcagaaacatctgccatacatacagagatcagaacacgcaaactctatttgaagaaaagtctacataaacataagcttttttccttacaccatgtatctgaagtytaaagtaggaatatatgtaactatatatatttttatcaatataagtagttaaaggtatataattaggggctatacctgcacacattggttgttactgtctgcaattaatatctttccatttgtagatgcagctaccccctgaagatttgtaaactctcctttatttcttcctttg

SEQ ID NO: 700880 - DNA, 951 bp, Homo sapiens
gaaactattttttacaattctgtttctcccatatcatctgtcacaggcctgagaaagtaaaaagtacttcctaagtgacaacatgtagactaatttgagaaatataaactgcctcttaataactcttttgaaaaccttgttgtttttcattgaattgaggtaacaggaccagtttccctgtaaatctatggttttaaagaaaaaaagtgactgagcaacctaattgctttaaaaaacaaagccacatttaggatatatatgaatagatttatgaaattatcactgttactctcacttcacaaacttagatgtcagatatctttgtgtatgaagaattgttgaatgttgcactgcatctcaaaaaagaaatatgcaatttcattttgtatttcctgttccttctctccattgtttagtgaacaattagtagttaatcttaccttaaatttcccatcggaggagaaaatgctgacccatttattatcataatcggcaatgattatgtccccactgggatgtacagccactcctgtgggccgctgcagctgccccggagagcgtccccgtatgccaaaacgacttttgaactggccatcattggaaaatatctgtaagataaattacattcattggaatgtgaactagtacaggcattgctgaggaaggcataggcagaaacatctgccatacatacagagatcagaacacgcaaactctatttgaagaaaagtctacataaacataagcttttttccttacaccatgtatctgaagtctaaagtaggaatatatgtaactatatatatttttatcaatataagtagttaaaggtatataattaggggctatacctgcacacattggttgttactgtctgcaattaatatctttccatttgtagatgcagctaccccctgaagatttgtaaactctcctttatttyttcctttg

SEQ ID NO: 700881 - DNA, 606 bp, Homo sapiens
cctcatttcatcagttctgcctacagaagcttgcctatcctatgattcagaaaagacaggataatttattattcaattgactaaaaccctacccatgaaaaggaaacaaaatttgctttagttatgagatgttggtgggatgattcagtgactccaatttatatcagatcttcaagtgacaatgatataaattacccaatttagattacagaatattgcctgttggtgccctggcatttracaacttagctcctgcatttacaaagagttgctgtttttaattatcctatagtggtcagtttcctcatccttaagttaaaaaacatctataaatcttaagctatttatacacagatgatctattagaacacatttaaatttgtcacaacccaaatgctcagaaatatcagatgtttgtgtgtatttttccacaccatcaaggcaggcacctaatggcattgctgagacaggattaatctactaattaaaataaagaagaaaactgtgaattctgatggtaaatgagactgtgactcagcttttaaagctaaccatttcatttgccttttaagctaatgagagctttcacattaaaaatgattttta

SEQ ID NO: 700882 - DNA, 618 bp, Homo sapiens
gccaagaggagctgaggctgatggcagaggccagtgcaaacrcaggttctccccaccagggtccagattctttcaaagacatgcaggctattacctacagtccacatcttttgaatgacagttcctgatccacatcaccttatgccaccattacctctgctgctggacaaggagggagagcctgctcatttgtccatccatcagcctgtttagtccatcctcctctccatctgccttccttctcccttctgccctcctgggctctaataacctagagcctacagataccttccttttctttttccttcttggtgcccaggaagcacagccaaaaggcagaagctcataacctgcccatactcccaaacagaaatgaacccgggaggagggagggatgagcagcagctccctgtccagctcagcccagcccagccaggctggaggagccttgcaaatgagaaaggcccagggcagagccacgtactcatattgtaggactgaggacttacaatatcagtatgactgagttggctgcagcccatatgctggcttcctagaaaatagacctgtctcctttctgaatgacaactgaaagctgctaagagaagaggagatgcc

SEQ ID NO: 700883 - DNA, 618 bp, Homo sapiens
gccaagaggagctgaggctgatggcagaggccagtgcaaacgcaggttctycccaccagggtccagattctttcaaagacatgcaggctattacctacagtccacatcttttgaatgacagttcctgatccacatcaccttatgccaccattacctctgctgctggacaaggagggagagcctgctcatttgtccatccatcagcctgtttagtccatcctcctctccatctgccttccttctcccttctgccctcctgggctctaataacctagagcctacagataccttccttttctttttccttcttggtgcccaggaagcacagccaaaaggcagaagctcataacctgcccatactcccaaacagaaatgaacccgggaggagggagggatgagcagcagctccctgtccagctcagcccagcccagccaggctggaggagccttgcaaatgagaaaggcccagggcagagccacgtactcatattgtaggactgaggacttacaatatcagtatgactgagttggctgcagcccatatgctggcttcctagaaaatagacctgtctcctttctgaatgacaactgaaagctgctaagagaagaggagatgcc

SEQ ID NO: 700884 - DNA, 1512 bp, Homo sapiens
cttccaaaaagcccctccctcttttccttaaagacttttggccgggcgtgttggctcacacctgtaatcccagcactttgggaggccgagatgggtggatcacctgaggtcagaagttcaagaccagcctggaaaccctgtcactaccaaaaacacaaaaattagccaggcgtggtggcaggtgcctgtaatcccagctattcastaggctgaggcaggagaatcacttgaacccgggaggcagaggttgcagtgagccaagatcatgccactgcaccccagcctgggcaacagagtaagactccatctcaaaaaatataaaaaataggctgggtgcggtggctcatgcttgtaatcccagcactttgggaggctgaggcgggtggatcacgaggtcaggagattaagaccatcctggctaacatggtgaaatcctgtctcttctaaaaatacaaaaaattagtcgggcatggtggtgggcatctgtagtcccagctacttgggaggctgatgcaggagaatggcatgaacccgggaggcagagcttgtagtgagcggagatcacgccactgcactccagcctgggcgacagagtgagactccgtctcaaatagataaataaataaataaataaataaataaataaataaataaaataataaacaaaaacgacttttgccagctgggcacggtggctcaatcccaacactttgggaggctgaggcgggtggatcacgaggtcaggagatcgagaccatcctggctaacacagtgaaaccccatctctactaaaaatacaaaaaaattagccaggcgtggtgggaggcgcctgtagtcccagcttctcgggaggctgaggcaggagaatggtgtgaatccaggaggtgcagcttgcagtgagctgagatcacaccactgcactccagcctgggcaacagagcaagactccatctcaaaaaaaaaaaaaaaagacttttgccacctccaggggaccctctcctttcttcttctctgttcattcagtctttgacccttctaagaaggtagatccatcaattaataatttaatcatatatacacacaagtcccattttcctgttttgtttaacaatgttaccactgggtgattctctctgaaaactttccaggagcctaagggagaggacacgatggaagaagggtctgggaaacacacaaggagagctgggaaatgtgtggctctagtaggccgctcctgaagatgagcagaaattcagttattccagccttctccaaatccagaagaaagtatccaaagcttagctgagactctggccttaaccttaaccctacccctgtgagtcagtggatctcagaccagggagaagtcattggacgcaatagaggatgttgctgggccttccccagaggtcacggaggaggcgctttggtctagtggttatgagcttcagccctgaagtaaagcacctggttctgaatcctggctccatgaattatgcccatgggacatta

SEQ ID NO: 700885 - DNA, 1512 bp, Homo sapiens
cttccaaaaagcccctccctcttttccttaaagacttttggccgggcgtgttggctcacacctgtaatcccagcactttgggaggccgagatgggtggatcacctgaggtcagaagttcaagaccagcctggaaaccctgtcactaccaaaaacacaaaaattagccaggcgtggtggcaggtgcctgtaatcccagctattcagtaggctgaggcaggagaatcacttgaacccgggaggcagaggttgcagtgagccaagatcatgccactgcaccccagcctgggcaacagagtaagactccatctcaaaaaatataaaaaataggctgggtgcggtggctcatgcttgtaatcccagcactttgggaggctgaggcgggtggatcacgaggtcaggagatyaagaccatcctggctaacatggtgaaatcctgtctcttctaaaaatacaaaaaattagtcgggcatggtggtgggcatctgtagtcccagctacttgggaggctgatgcaggagaatggcatgaacccgggaggcagagcttgtagtgagcggagatcacgccactgcactccagcctgggcgacagagtgagactccgtctcaaatagataaataaataaataaataaataaataaataaataaataaaataataaacaaaaacgacttttgccagctgggcacggtggctcaatcccaacactttgggaggctgaggcgggtggatcacgaggtcaggagatcgagaccatcctggctaacacagtgaaaccccatctctactaaaaatacaaaaaaattagccaggcgtggtgggaggcgcctgtagtcccagcttctcgggaggctgaggcaggagaatggtgtgaatccaggaggtgcagcttgcagtgagctgagatcacaccactgcactccagcctgggcaacagagcaagactccatctcaaaaaaaaaaaaaaaagacttttgccacctccaggggaccctctcctttcttcttctctgttcattcagtctttgacccttctaagaaggtagatccatcaattaataatttaatcatatatacacacaagtcccattttcctgttttgtttaacaatgttaccactgggtgattctctctgaaaactttccaggagcctaagggagaggacacgatggaagaagggtctgggaaacacacaaggagagctgggaaatgtgtggctctagtaggccgctcctgaagatgagcagaaattcagttattccagccttctccaaatccagaagaaagtatccaaagcttagctgagactctggccttaaccttaaccctacccctgtgagtcagtggatctcagaccagggagaagtcattggacgcaatagaggatgttgctgggccttccccagaggtcacggaggaggcgctttggtctagtggttatgagcttcagccctgaagtaaagcacctggttctgaatcctggctccatgaattatgcccatgggacatta

SEQ ID NO: 700886 - DNA, 1512 bp, Homo sapiens
cttccaaaaagcccctccctcttttccttaaagacttttggccgggcgtgttggctcacacctgtaatcccagcactttgggaggccgagatgggtggatcacctgaggtcagaagttcaagaccagcctggaaaccctgtcactaccaaaaacacaaaaattagccaggcgtggtggcaggtgcctgtaatcccagctattcagtaggctgaggcaggagaatcacttgaacccgggaggcagaggttgcagtgagccaagatcatgccactgcaccccagcctgggcaacagagtaagactccatctcaaaaaatataaaaaataggctgggtgcggtggctcatgcttgtaatcccagcactttgggaggctgaggcgggtggatcacgaggtcaggagattaagaccatcctggctaacatggtgaaatcctgtctcttctaaaaatacaaaaaattagtcgggcatggtggtgggcatctgtagtcccagctacttgggaggctgatgcaggagaatggcatgaacccgggaggcagagcttgtagtgagcggagatcacgccactgcactccagcctgggcgacagagtgagactccgtctcaaatagataaataaataaataaataaawaaataaataaataaataaaataataaacaaaaacgacttttgccagctgggcacggtggctcaatcccaacactttgggaggctgaggcgggtggatcacgaggtcaggagatcgagaccatcctggctaacacagtgaaaccccatctctactaaaaatacaaaaaaattagccaggcgtggtgggaggcgcctgtagtcccagcttctcgggaggctgaggcaggagaatggtgtgaatccaggaggtgcagcttgcagtgagctgagatcacaccactgcactccagcctgggcaacagagcaagactccatctcaaaaaaaaaaaaaaaagacttttgccacctccaggggaccctctcctttcttcttctctgttcattcagtctttgacccttctaagaaggtagatccatcaattaataatttaatcatatatacacacaagtcccattttcctgttttgtttaacaatgttaccactgggtgattctctctgaaaactttccaggagcctaagggagaggacacgatggaagaagggtctgggaaacacacaaggagagctgggaaatgtgtggctctagtaggccgctcctgaagatgagcagaaattcagttattccagccttctccaaatccagaagaaagtatccaaagcttagctgagactctggccttaaccttaaccctacccctgtgagtcagtggatctcagaccagggagaagtcattggacgcaatagaggatgttgctgggccttccccagaggtcacggaggaggcgctttggtctagtggttatgagcttcagccctgaagtaaagcacctggttctgaatcctggctccatgaattatgcccatgggacatta

SEQ ID NO: 700887 - DNA, 1512 bp, Homo sapiens
cttccaaaaagcccctccctcttttccttaaagacttttggccgggcgtgttggctcacacctgtaatcccagcactttgggaggccgagatgggtggatcacctgaggtcagaagttcaagaccagcctggaaaccctgtcactaccaaaaacacaaaaattagccaggcgtggtggcaggtgcctgtaatcccagctattcagtaggctgaggcaggagaatcacttgaacccgggaggcagaggttgcagtgagccaagatcatgccactgcaccccagcctgggcaacagagtaagactccatctcaaaaaatataaaaaataggctgggtgcggtggctcatgcttgtaatcccagcactttgggaggctgaggcgggtggatcacgaggtcaggagattaagaccatcctggctaacatggtgaaatcctgtctcttctaaaaatacaaaaaattagtcgggcatggtggtgggcatctgtagtcccagctacttgggaggctgatgcaggagaatggcatgaacccgggaggcagagcttgtagtgagcggagatcacgccactgcactccagcctgggcgacagagtgagactccgtctcaaatagataaataaataaataaataaatwaataaataaataaataaaataataaacaaaaacgacttttgccagctgggcacggtggctcaatcccaacactttgggaggctgaggcgggtggatcacgaggtcaggagatcgagaccatcctggctaacacagtgaaaccccatctctactaaaaatacaaaaaaattagccaggcgtggtgggaggcgcctgtagtcccagcttctcgggaggctgaggcaggagaatggtgtgaatccaggaggtgcagcttgcagtgagctgagatcacaccactgcactccagcctgggcaacagagcaagactccatctcaaaaaaaaaaaaaaaagacttttgccacctccaggggaccctctcctttcttcttctctgttcattcagtctttgacccttctaagaaggtagatccatcaattaataatttaatcatatatacacacaagtcccattttcctgttttgtttaacaatgttaccactgggtgattctctctgaaaactttccaggagcctaagggagaggacacgatggaagaagggtctgggaaacacacaaggagagctgggaaatgtgtggctctagtaggccgctcctgaagatgagcagaaattcagttattccagccttctccaaatccagaagaaagtatccaaagcttagctgagactctggccttaaccttaaccctacccctgtgagtcagtggatctcagaccagggagaagtcattggacgcaatagaggatgttgctgggccttccccagaggtcacggaggaggcgctttggtctagtggttatgagcttcagccctgaagtaaagcacctggttctgaatcctggctccatgaattatgcccatgggacatta

SEQ ID NO: 700888 - DNA, 1512 bp, Homo sapiens
cttccaaaaagcccctccctcttttccttaaagacttttggccgggcgtgttggctcacacctgtaatcccagcactttgggaggccgagatgggtggatcacctgaggtcagaagttcaagaccagcctggaaaccctgtcactaccaaaaacacaaaaattagccaggcgtggtggcaggtgcctgtaatcccagctattcagtaggctgaggcaggagaatcacttgaacccgggaggcagaggttgcagtgagccaagatcatgccactgcaccccagcctgggcaacagagtaagactccatctcaaaaaatataaaaaataggctgggtgcggtggctcatgcttgtaatcccagcactttgggaggctgaggcgggtggatcacgaggtcaggagattaagaccatcctggctaacatggtgaaatcctgtctcttctaaaaatacaaaaaattagtcgggcatggtggtgggcatctgtagtcccagctacttgggaggctgatgcaggagaatggcatgaacccgggaggcagagcttgtagtgagcggagatcacgccactgcactccagcctgggcgacagagtgagactccgtctcaaatagataaataaataaataaataaataaataaayaaataaataaaataataaacaaaaacgacttttgccagctgggcacggtggctcaatcccaacactttgggaggctgaggcgggtggatcacgaggtcaggagatcgagaccatcctggctaacacagtgaaaccccatctctactaaaaatacaaaaaaattagccaggcgtggtgggaggcgcctgtagtcccagcttctcgggaggctgaggcaggagaatggtgtgaatccaggaggtgcagcttgcagtgagctgagatcacaccactgcactccagcctgggcaacagagcaagactccatctcaaaaaaaaaaaaaaaagacttttgccacctccaggggaccctctcctttcttcttctctgttcattcagtctttgacccttctaagaaggtagatccatcaattaataatttaatcatatatacacacaagtcccattttcctgttttgtttaacaatgttaccactgggtgattctctctgaaaactttccaggagcctaagggagaggacacgatggaagaagggtctgggaaacacacaaggagagctgggaaatgtgtggctctagtaggccgctcctgaagatgagcagaaattcagttattccagccttctccaaatccagaagaaagtatccaaagcttagctgagactctggccttaaccttaaccctacccctgtgagtcagtggatctcagaccagggagaagtcattggacgcaatagaggatgttgctgggccttccccagaggtcacggaggaggcgctttggtctagtggttatgagcttcagccctgaagtaaagcacctggttctgaatcctggctccatgaattatgcccatgggacatta

SEQ ID NO: 700889 - DNA, 635 bp, Homo sapiens
ttacaagcagataatgatccctttaaagttctctgctcaagagaaccgtgccatagcagaagtaattcttccccaagcgttcagctgtcctgtgttctccagggaaagcctagcattgggcgttgggcatgcttgcctctaaatgggaaggccagttcattcttaagcagatggagagaaagcatttgtcattctaaatccgggaagtagctcaattcaattcaattgcataattcttaaaaacatattttgcgccactcctgaaaatggtattatagaagaaaagtatggtttctacctttaagaagattgctgaccgggctgggcgcagtggctcatgcctgtaatcccagaactttgggaggccgaggcaggcagatcccctgaggtcaggagttagaggctagcccgaccaacatggcaaaaccccrtctctactaaaaatataaaaattagctgggcatggtggtgcatgcctgtagccccagctactcaggagactcaggcatgaaaatcgcttgaacccgagacacggaggtggtggtgagctgaaattgcgccactgcattccagcctgggcgacagagcaagactctatctcaaaaaaaaaaaaaaaaagaagaagaagaagattg

SEQ ID NO: 700890 - DNA, 1583 bp, Homo sapiens
gaaaattgtgccaaaaactcccactgatgagaattcataggtgccccacactgtgacaaacacttatatgattctcctctttcctgtttactgcaaattctgccttaaggcttcttttcaagactcagaagccactaattataaaggaaagggcagttaattggcacatttttctcttgtgaaagcagttctttcagataagaattaatgtaaatctgcttttgtaaattgcaactttaaatttcgctgactcaaatttacaacagctttgtataccagaagaggttttggtaagggttgaacatttttacactgcaactttaaaacatcaccaatagattgtggattatttcacgtgcacaaacatacacacacacacacacacacacacacacacacacacacacacacacatacacagctaaattagaaaccacaattttaaattttatataattactagttattaatgggtaaaattcatttttcttttaatatcttaaaatattatttatgccccgaaatatgctaataaaagttaaagattgtgtattatgcctagattcaaagtttttggcaaacttcaaatacttttgattgacatgtacattagcagttattagttgacttttactaaaacatgcacctttacgatggtgtttttgtagaaacataagtagtcaaatagtaacatttattgcagttttgtacagtatttgagtatagtgcataaataggtatgttcataaaatcaataaaaggagtatctatggaaataagcaaaatatyagcaaaaattgctattcctttgcctcatttaatttttaaaatttctttgtttccatgtgattctattatatgctttgcatgcttgtataaaaccaaggtcacaaatgcaacttattaacggaatttgccaagaagacagccttgacattaaaaattccctcacaagaggtaatccataatccttaataaaataaaattgttacatgagccaataaatgtatttctttaattcccttccagtaacactttctttgtcacctagttttaaaatgtgcactttattcatacattgaaatagaagatatcctattttcttatacatttaaatatagcatagctcttctgtatagtttaggggatgtgtgcaattgtataaggaagtacacaatgccagaaggcaagcaatgaaattgctctatatggtatgcattattagatactttaagaatatttgtcttgtaaagtccgcattgcccccttaatgtctgactataagttataaatttataaatatgtgtatatgtaaaaaccgttgtaaataacagtttctgtatgacaacagaaaaggcttatctatactttgggcaaagagctgctactatattgatggcaccagtattattagcatttatggcagattgaccagaaaacttatcactgttattcttattttaaatttcatgtggtaaaattttatttgagtgcaatgacattctggcagttcagatttttcagtgctagggatcagaattctttgttatttctttaaactttgatgtactttttacatattt

SEQ ID NO: 700891 - DNA, 1583 bp, Homo sapiens
gaaaattgtgccaaaaactcccactgatgagaattcataggtgccccacactgtgacaaacacttatatgattctcctctttcctgtttactgcaaattctgccttaaggcttcttttcaagactcagaagccactaattataaaggaaagggcagttaattggcacatttttctcttgtgaaagcagttctttcagataagaattaatgtaaatctgcttttgtaaattgcaactttaaatttcgctgactcaaatttacaacagctttgtataccagaagaggttttggtaagggttgaacatttttacactgcaactttaaaacatcaccaatagattgtggattatttcacgtgcacaaacatacacacacacacacacacacacacacacacacacacacacacacacatacacagctaaattagaaaccacaattttaaattttatataattactagttattaatgggtaaaattcatttttcttttaatatcttaaaatattatttatgccccgaaatatgctaataaaagttaaagattgtgtattatgcctagattcaaagtttttggcaaacttcaaatacttttgattgacatgtacattagcagttattagttgacttttactaaaacatgcacctttacgatggtgtttttgtagaaacataagtagtcaaatagtaacatttattgcagttttgtacagtatttgagtatagtgcataaataggtatgttcataaaatcaataaaaggagtatctatggaaataagcaaaatattagcaaaaattgctattcctttgcctcatttaatttttaaaatttctttgtttccatgtgattctattatatgctttgcatgcttgtataaaaccaaggtcacaaatgcaacttattaacggaatttgccaagaagacagccttgacattaaaaattccctcacaagaggtaatccataatccttaataaaataaaattgttacatgagccaataaatgtatttctttaattcccttccagtaacactttctttgtcacctagttttaaaatgtgcactttattcatacattgaaatagaagatatcctattttcttatacatttaaatatagcatagctcttctgtatagtttaggggatgtgtgcaattgtataaggaagtacacaatgccagaaggcaagcaatgaaattgctctatatggtatgcattattagatactttaagaatatttgtcttgtaaagtccgcattgcccccttaatgtctgactataagttataaatttataaatatgtgtatatgtaaaaacmgttgtaaataacagtttctgtatgacaacagaaaaggcttatctatactttgggcaaagagctgctactatattgatggcaccagtattattagcatttatggcagattgaccagaaaacttatcactgttattcttattttaaatttcatgtggtaaaattttatttgagtgcaatgacattctggcagttcagatttttcagtgctagggatcagaattctttgttatttctttaaactttgatgtactttttacatattt

SEQ ID NO: 700892 - DNA, 3487 bp, Homo sapiens
tgaatagatatttaacttacaatcagcagaaggtgtttagtgtcaaggctgccaggttatctgtaataaacatacaaatgtttttaaagattgatgataaatatatataaaataaaaaatccagactatttgaatataaattttgtatgagttctttacaatatcactttaaggattcaaaaatcatacattatgtaagttgaggttgtcaggtgataaaagtattctacgagttattttgtgtaaataaatattgtgtaaataaataaataaatattctgtatgagcrtatgtgtatgcatgtgtatattggagggggaaagtcaaagataaacaaaaatgctaagacctgcctggaatgaggcttgaaaactgtccagcctcatccttcactgttttctgaggtttttttttttttttttgagggtgagcagcatcattggattattgcatagaagtttcttaagaaaagtttctaccttctttaaatttctcactttaaattgacaggttcataaaccctctccctgatgaaagataattaaatctcctgcacttcccctaagtccaaagctttacgttgtgggtaatccacacaagttttaataaaaaaaatactactctttaattttttaattaattttaatgaattttttttaaaaaattaatatgctctagaagacagatgtcaaatttttcaacctctgaggtctttatggcgttcatgctgtgaatagaataatagaacagagcaaataagacagtaggcagagaagttaaaattagaatgtgtatgccttgatattagagactttgctccattatattgggtttcagctattcattttctggtatatttcatttatctcatggatatttggagccagcctgatttctttcaaagatatccttgtattttgcaaaagtaaaagcctcctttcatattctctgtttatccaattcattcaatagcaacagatacttactaagtgctatttacatccttgaacaaaaagtaagcccagctcccttcatggtgagatttttgctctctgttgacaatataagaaagcacttgggaaaacttttaccttaggtgttatgctttcgaggttcctgagactagacaatgcattaacagtatacaaacctcattttgttatacatacatatagcttaacttgtgaagttatggcttctgaactttttaaagaaccttatataaaaaacataattgtgatgaatagtattatctctatatttaaagcaaaatcacttattaagttttggataagtttatatgaattatgaacttgtatttttttttaatattatattgagtatataacagagttttttttttttttttctattaagaactcaaatcaggccggacttggtggctcatgcctgtagtcccagcactttgggaggctgaggtgggcagatcacaaggtcaggagatggagaccatcctggctaacacggtgaaaccccttctctactaaaaatataaaaaattagccgggtgtggtggcgggtgcctgtagtcccagctactagggaggctgaggcaggagaatggcatgaacccaggaggcggagctggcagtgagccgagatcatgccactgcactccggcctgggtgacagagtgagactccgtctcaaaaaacaaacaaacagaaaaactaagaaactcgaatcaaacaataacatctgttaggctgtagatttttggtgagtacagagagttcaaatgcatttcgtttcatacagaattcaaggtacatttgaagacattagctacttcttttatatcaattttagagtaattcaaactccaaaagggctatgtttggattgatcatttttctccttagttctacagatagccctgattcatttcgactttttataccagaaaacccaaatacagttgtttgaatgcataatacttttcttttcttttcccatgtggaataagtccacaagtagttggtccaaggctagtacggcagcaccatgggcatcaggcattcggtgtctattttcctgttttgatgtccttaatttatggttttgcttaattcgtgggttaaaatggctgttgatactccagtcattatactcatattacaggaaagaggaagaataaaatgaggaagggtaaaagacttcttctgctctcagtttgccataaaatgagctttccagatgtccctcttaataatttctgtgtgtcattagcctagtgtggtcttacaactggagaatctgagaaatcgttattcttaaataaattcagttttctactctcacgggttgactatctatcagattgatagctagtagtttctgccacaataaaaataagttgttataaaggccataaggtgattaagagcacatacttggcagccagagtatcttggttcaaaacctggcctttttactaccaaactatgtggcgtctggcaagtttcttaacccctctgtaccttagtttcatctctttgtaaaactgggttagtaacaatgactttcttataaggtagtttagggaattaaaacacaaacttgtgtgtacacactcacatttattcatatacggaccacttagtggaattctgggcaaatagtaaacgctatgcaagtatttgctattattattattgtttattatcggatactaattctctacttcatgtcaaaaacacgtttaaaggatggtctgatctttagtgtgaataacaataatcattttgcaaaatggccatttcagaagctatggacctctataaacttctgggaaaaacagatctgggcaggaatccagcttctttgacatcatatcattagtgtttgattttgtttgaagggaatttcagaatctttgtcattctgttatttaagcaaattatgctagtgtgggttcagttttagtaaaggctgtttcaattgtagtggaataaaatccatgtaaagttgtcttatacctgtctgttaattttattcttattagtcacaagtttgtctaagtatgcacaagaaacaccatctcagatatgtctcccgtcccaaagtcccattcttgggtcttgttggttagacataggacacatgctcttccctgatacagtcgtcctggctagttatacacttattagcaagacttgggtcacaggccactccttgagccagtgggaattgtcaaattcaccctgaagagggaagaggaatattcctccaatggaaaggagaataagaggttgtcattagaaggattatcatgcaccctcactctgctatttgtatatattttctttgatgatgaacttgctttgtacttcactgagaaaattgaagcaactagaagagaaccttcttcaaattccacagcctcatgtttccaagctcctatgccgacatactctgcctaatcatgtgtctgcatattgccaacccttccgtctgtgcaccagga

SEQ ID NO: 700893 - DNA, 3487 bp, Homo sapiens
tgaatagatatttaacttacaatcagcagaaggtgtttagtgtcaaggctgccaggttatctgtaataaacatacaaatgtttttaaagattgatgataaatatatataaaataaaaaatccagactatttgaatataaattttgtatgagttctttacaatatcactttaaggattcaaaaatcatacattatgtaagttgaggttgtcaggtgataaaagtattctacgagttattttgtgtaaataaatattgtgtaaataaataaataaatattctgtatgagcatatgtgtatgcatgtgtatattggagggggaaagtcaaagataaacaaaaatgctaagacctgcctggaatgaggcttgaaaactgtccagcctcatccttcamtgttttctgaggtttttttttttttttttgagggtgagcagcatcattggattattgcatagaagtttcttaagaaaagtttctaccttctttaaatttctcactttaaattgacaggttcataaaccctctccctgatgaaagataattaaatctcctgcacttcccctaagtccaaagctttacgttgtgggtaatccacacaagttttaataaaaaaaatactactctttaattttttaattaattttaatgaattttttttaaaaaattaatatgctctagaagacagatgtcaaatttttcaacctctgaggtctttatggcgttcatgctgtgaatagaataatagaacagagcaaataagacagtaggcagagaagttaaaattagaatgtgtatgccttgatattagagactttgctccattatattgggtttcagctattcattttctggtatatttcatttatctcatggatatttggagccagcctgatttctttcaaagatatccttgtattttgcaaaagtaaaagcctcctttcatattctctgtttatccaattcattcaatagcaacagatacttactaagtgctatttacatccttgaacaaaaagtaagcccagctcccttcatggtgagatttttgctctctgttgacaatataagaaagcacttgggaaaacttttaccttaggtgttatgctttcgaggttcctgagactagacaatgcattaacagtatacaaacctcattttgttatacatacatatagcttaacttgtgaagttatggcttctgaactttttaaagaaccttatataaaaaacataattgtgatgaatagtattatctctatatttaaagcaaaatcacttattaagttttggataagtttatatgaattatgaacttgtatttttttttaatattatattgagtatataacagagttttttttttttttttctattaagaactcaaatcaggccggacttggtggctcatgcctgtagtcccagcactttgggaggctgaggtgggcagatcacaaggtcaggagatggagaccatcctggctaacacggtgaaaccccttctctactaaaaatataaaaaattagccgggtgtggtggcgggtgcctgtagtcccagctactagggaggctgaggcaggagaatggcatgaacccaggaggcggagctggcagtgagccgagatcatgccactgcactccggcctgggtgacagagtgagactccgtctcaaaaaacaaacaaacagaaaaactaagaaactcgaatcaaacaataacatctgttaggctgtagatttttggtgagtacagagagttcaaatgcatttcgtttcatacagaattcaaggtacatttgaagacattagctacttcttttatatcaattttagagtaattcaaactccaaaagggctatgtttggattgatcatttttctccttagttctacagatagccctgattcatttcgactttttataccagaaaacccaaatacagttgtttgaatgcataatacttttcttttcttttcccatgtggaataagtccacaagtagttggtccaaggctagtacggcagcaccatgggcatcaggcattcggtgtctattttcctgttttgatgtccttaatttatggttttgcttaattcgtgggttaaaatggctgttgatactccagtcattatactcatattacaggaaagaggaagaataaaatgaggaagggtaaaagacttcttctgctctcagtttgccataaaatgagctttccagatgtccctcttaataatttctgtgtgtcattagcctagtgtggtcttacaactggagaatctgagaaatcgttattcttaaataaattcagttttctactctcacgggttgactatctatcagattgatagctagtagtttctgccacaataaaaataagttgttataaaggccataaggtgattaagagcacatacttggcagccagagtatcttggttcaaaacctggcctttttactaccaaactatgtggcgtctggcaagtttcttaacccctctgtaccttagtttcatctctttgtaaaactgggttagtaacaatgactttcttataaggtagtttagggaattaaaacacaaacttgtgtgtacacactcacatttattcatatacggaccacttagtggaattctgggcaaatagtaaacgctatgcaagtatttgctattattattattgtttattatcggatactaattctctacttcatgtcaaaaacacgtttaaaggatggtctgatctttagtgtgaataacaataatcattttgcaaaatggccatttcagaagctatggacctctataaacttctgggaaaaacagatctgggcaggaatccagcttctttgacatcatatcattagtgtttgattttgtttgaagggaatttcagaatctttgtcattctgttatttaagcaaattatgctagtgtgggttcagttttagtaaaggctgtttcaattgtagtggaataaaatccatgtaaagttgtcttatacctgtctgttaattttattcttattagtcacaagtttgtctaagtatgcacaagaaacaccatctcagatatgtctcccgtcccaaagtcccattcttgggtcttgttggttagacataggacacatgctcttccctgatacagtcgtcctggctagttatacacttattagcaagacttgggtcacaggccactccttgagccagtgggaattgtcaaattcaccctgaagagggaagaggaatattcctccaatggaaaggagaataagaggttgtcattagaaggattatcatgcaccctcactctgctatttgtatatattttctttgatgatgaacttgctttgtacttcactgagaaaattgaagcaactagaagagaaccttcttcaaattccacagcctcatgtttccaagctcctatgccgacatactctgcctaatcatgtgtctgcatattgccaacccttccgtctgtgcaccagga

SEQ ID NO: 700894 - DNA, 1143 bp, Homo sapiens
caaaaaaacaaaaaaacttagagagggctgagaaagaaggtcactcaaggaagagcagaagagaagaaattttatttacttttttttctgagacagggtcttgctctgtcacccaggctggagtgcagggtggggccatcatggctcactgcagtcttgacctcccaggctcaagcgatcctcctgcctccgcccccccaagtggctaggactataggcatgtgccaccagccttggttaatttttaaattcttcgtagagatgggggcctcactatgttgcccaggctggtctcaattcctggggtcaagccaccctcccaccttggcctcctaaagtgttggaattacaggtgtgagccactgtgcctggccaggattttaaaatgaatataaatgagcctagtgaaggagttggggaggaggtgatgggagacactcacgtgcttaataaagagctgtgccaatctgtcttgctcctggatacacttttccagttccgccaggaaaaaactaaaaggagaaaggggataagagaaggaagccacattattcagaactgtattatttctcaataataagatgaattacagaagactctcccctaagccctactccttgagtcagatgcaggaagaggactcaagtcctggattcccaggacactggatcctcggggcagcattaacacttactccttatgccagtcataaatctgatgaatatttccaaacacgattttgtcctttcctcgcatatcctcagggacacccttttcttctattctcttcatgaagccctgcagcagcaaaggcaatggttagtagcatattttcacaggaaagctttctgggccatgccacacaccacagcacccctgcaagcccacactctctgcgtgagtttgcggacaaatgcttctgtggtttctcactattcaaccaggtctttaacccctggtgcagagcaatagagaaaacttttatgagtttcaggatccccttctttgtctccagtccccttaagaaagcagagcacagaagaaaacaataagctgtccctcttccttctcccaatccaarttaatcaggtctataaaggctcagaactagatacatctggcctagaaataagtcttaatatg

SEQ ID NO: 700895 - DNA, 1340 bp, Homo sapiens
tgagggcagaaaagcagaaggtaggggtgggtcgagttcaagggctgaggcagaagacccccggggagggcctgatccgagggatttgggaaagaagagattcggtctcccaaggggctcacacgccccttccctgggcatctatcaggaagcagcagcttggggccatggagaggcctaaagcctgcattccactcctggccccaccaccggccacagtggggctgtgcacaccgctcctaccgcaggagtagggcggactgacaggaagatgagtccctgcgcccggagctcaccagagcccggataagccgaagtcggcaaatggatgggacaggcaagtgtactggggcaggaagggcctttgggatcttctcatttaacagaggctgcatcatgagttccgtgggacccttagcaccttcgtcttcatgggcctcttcctccacgcacacaaattcatatttaaatcctattttatggccaagcaaggtggctcacgcctgcaatcccagcaccccagcactttgggaggcagaggtgggaggatggcttgagcctgggaggcagagattgcagtgagccgagatcatgccactgcactccagcctggaaaacagagcagaactcttatctctctctctctctctctctctctctctctctctctctatatatatatatatatatatatatatatatatttatatatttatataatttatacatttatataaatatatgtatataatgactgctttggtatcaagatgaatgtattaatattatatattaaaaatattttcctcaaccaaaaagcgtattctttctcttctgactttaaaagaaattaaaacatttttgcatgcctgctgtgctcatggataagtgggccctgaatcccacctcctcctgttgcagatgaggaaactgaagcccagagacaggaagagrctgttcaatgtcacacaggggctgtggcagggctggggccagaacaagtcttcaggcttccaggctagggctctttccattacccatttaacctttttcaagaggtggaaaaatccctgccacctgctgctcaggcccaggaagagccccctcatctagcccacccatgccctggaaactctggctgggatctgctattccgccctccctggtggcagccttccctcccccagccctggccctgcagccaagtcaccaccaccaccgaagctctttggcctgctgtcttgttaattcctaatttccaatttgcaagaagagagagccttaaacctccatctcaccagcccagcaatcacacagatgatccaagtatctctggacag

SEQ ID NO: 700896 - DNA, 968 bp, Homo sapiens
gttggatctgcagatacaggatcagccaatgcagagggccaactctataagtaaaagcagcactggaaagtgagtcagtaggagcctgtcttccaggaaggtccctgtttctcaagagttcttttcctgcagggggagagagggttggatgtcaaggcaggaatgtgtggagtatgctcacatgtggtatccttgaattcacctaacaaccctatgaacaagcattttagagaggaggaaatcaagactcagcaagcctcagtaacttgccccatatcccatggttgctaaatagcaaaatcatgattgaaatctcaacctgcctgattgtagaacctgaactcttcttgtcatccagccgctctctcccttcccaccatggggacccctcagcaccagcaaaaatgagggtgaggaggcagggaggatggaaccttcttaagcataggtaatttgtcagttgaaaatcgcacatggataaatgtctttaaaccctatgtagatagggaaaactcttgatattactgaaaagtaatatcgacgtagcaaaccttctgaagagagggctagtcatggaacccctcatttggaaactattagaacaagtgaattatttttaaccatcttttagaccattcagaaacagagtgaattgtccaggacargattgtttattttttgaaaatgtatccagttttgtctgttttttaaagatcttcttggtagaatgtggcagaattctactacaaaagctcctttgttcacgtagtagttccagtgtttccagccattcctagagcccaggagccatgccaaggcctggagctcccgttcacatctgtgcagttacacacagagaagcttcctcttctatggggttgtaatcgtttatttacttgtcattagggatgtcgcaggtttcctgttttgggaagaggtgttcagggttagaattttattgagggaga

SEQ ID NO: 700897 - DNA, 660 bp, Homo sapiens
tctaagaacaaacgcactgaagagacagctgtaactattagccaattagtttcatgttacaactactagcggaggcctgaaacggattcgtgatacctgactaatagatgcttaaaatgactttaattcccccagtattcttagcccatatgactgactgctgtaatgctttgcggctaataaaatttcagattgactaatttactgggtagctttaccaaaacatccaagtaatccgtacatactcattagagacaggtccagaacactttcccttaggactgatttgaaaaacctcactgggatcagcctcactgagctttagatgcactggcacaaatcaggtgaaggatcttctayggttttagtgcagcaatttatctgagttttgtggttaaagtttgagcatgaggtaattagagccctccaagcttgaaattcatgaaccttattccccctttaatagactctatacaagcttgccaagctcagtgtttgactgatatatatggaggctttgttaaaagcctctggtcaaaatgtagttttaaaaaactcaaaatcagtttttctttatttttagctcttacaggtgtaaacacggaagattgcctcatgttataactgagggccagtcagcagtctgttgtgccctttgga

SEQ ID NO: 700898 - DNA, 1463 bp, Homo sapiens
attttgctttagtgttttaaaatattaatattcacagtatactcattctatatggaatcagaagatatgtaaatagataattgtcctttagatgtaattattcaatgactaaaagtaatttttgaaaattgtactttatgatttagtcgaccaccaacttgtcatcatacaagtcaagaaaaacatcgctgtcactttggttcttgtccaccatgtcatcaaccttgccaaaaagttttggagaaatgtggtcacttgtgtcctgctccgtgtcatgatcaagcrttaataaagcagactggcagggtaagggaataatactattagagaaatagtgcattgctgtgggttgtactttcttgcttttacttagtttttcaatgagcaatgattaagcacttattgggaagcactgtgcttggagcagggtacaaggtaatcaagacttgattttgttttaagcaactcacagtgtaggaaaggagtgaaaccattgtttgcaaatacagtgtgatagttacattatgatcatgatacaggtgaatttggcagtcctccttcatatattgtggtttagggttatagatatctcctataatcttattttaaagatttattcactttttaatattttatttaatatttatttatttttagttatttaattttttttttttttgagacggagtctcactctgttgcccaggctggagtgcagtggtgtgatctgggtcactgcaacctccacctcccgggttcagtgactctcgtgccttagcctcctgagtagctgggattataggtgcctgctaccatgcccagctaatttttgtagttttagtagagatggggtttcagcttgttgatcaggctggtctcgaactcctgacctcaagtgatctgcccgcctccgcctcccaaagtgctgggattacaggtgtgaggcaccacgtccagcccagcctcatgaacatttattgagcccttactaaatatcaagcttttttttaggtgctgaggaacaacagtgagtaaaatgatggagattatattcaattgctagatgttggagtttccaattgtttttctcatttccttattggaagtaaaggaggctacactgcctttgttctaccatttataaactggattctgtctcagttattaatatcaaatgtctgtggagaggaacaatttcatttaatacagataaaatgaaatatttcagtaagcacaatttattgattatttgaaaaaatttcaacctgcttgagcagaggatacatggaactattttcttagattcttaaaatggccatatgatttaatccctctgacttaaaattcttatgtattttatttgtagcaccagcctacaggcccttgggaacagccttctgagccagcatttattcagactgcattaccgtgtcctccatgtcaagttcctattcctatgtaag

SEQ ID NO: 700899 - DNA, 708 bp, Homo sapiens
  misc_feature 608, 609, 610, 611, 612, 613, 614, 615, 616, 617, 618, 619,620, 621, 622, 623, 624, 625, 626, 627, 628, 629, 630, 631,632, 633, 634, 635, 636, 637, 638, 639, 640, 641, 642, 643,644, 645, 646, 647, 648, 649, 650, 651, 652, 653, 654: n = A,T,C or G
  misc_feature 655, 656, 657, 658, 659, 660, 661, 662, 663, 664, 665, 666,667, 668, 669, 670, 671, 672, 673, 674, 675, 676, 677, 678,679, 680, 681, 682, 683, 684, 685, 686, 687, 688, 689, 690,691, 692, 693, 694, 695, 696, 697, 698, 699, 700, 701: n = A,T,C or G
  misc_feature 702, 703, 704, 705, 706, 707: n = A,T,C or G
gcgtgtctgcctggagggcccgtgggagttctgcgctgcgccctgcgctggctcccggggatcgagcaccgcgagaggttgggcgcccggggccgcgggggtgggcgttgggcaagtctgggccgcccacgtctctcctcttccttggaaatgaaaaggtctccaaacccatgagcctgtctgactcgctgtgcagtcactctttggctgcttaaggcgagrgccgtactggagaggaaacctggaaccgggagcactcgtttgcaggctcttcttactgcttctcacctgagccccgtgaaatctctgggcgaggctccttgcccttcgccaagtgttcgcaacactggcgggttttctgcagtctccatacagaaggccccggataaaagtagggaagggggtagggggagcgactggaaggatgtagatacattgaaatgatggttttcgccgtaccaaggggaaagcagctttttaatttacctgataatgcagtaaaggggaagggaggcagtgaaaggcatggtaagaactactatatatatacacacatatatatagttcccttacacacatatatatatatgtatatacatatacacctnnnnnnnnnnnnnnnnnnnnnnnnnnnnnnnnnnnnnnnnnnnnnnnnnnnnnnnnnnnnnnnnnnnnnnnnnnnnnnnnnnnnnnnnnnnnnnnnnnnng

SEQ ID NO: 700900 - DNA, 1606 bp, Homo sapiens
tgcctggttaatttttttagaatttttttgtagagacagtgttttcctgtgttgtcaaggctggtcttgaattcctggctacagagaattctcccacctcagcttcccaaagtggcaggcgtgagccactgtgcctggctgagagttaatcaagtcttcagacagaaggatcgatrtatttcacctttcccttcccaacacataaccttggtgattagatagttgcctgagtatattgataggatcatgaagatagttgtacatcatcaagtaggtttctaaggaatttaccatatctgctaaggaattaagattaggaagtttggctgagaagtctaggttggcaaggtaagaattgataaaaagtaactctaaggttagagggtttcttgtttctgaaggaccttatagaaaataatcttaagaagttttctgctttgagaggaactcacttaaaccattctagatagagtcattttattttaaaatagaaaatgcaataatgtctttcagtctagtatgtagaaaacatttgtcatttgtaagttttattaatttttaatctggttttaatcttaaaagtgttatggtaatttttttatgctgtgttttgtataaaatccattagtatatgattcccattcctttgcctctaccaatgtaagaaaatctgatcacttgatttaagaacatacattccagagtaatgggatggttcccaccttaacattagtgaattgaagaccaggactttaccaaaggagttcatttttatttgagcacagcctttgcatttttgtgattcttctctcaaatttcaaacttgcatggccaacttcctgatgagtatctctatcttgctggcacgtggacccatcaaactgctgttgaaagagaacttatttattcttgtgttttcttaatcttaagagcactacagttttctcagtcaccctcccaagccagacatctgggagcagagatggcatatgcatgtcatttactgcaattctccctctgcccatgttagctcagcagacacagccctctttccttctgaatcttgacatgaacatcagcttttaaaacagacacaatctcattgtcaccaagtcctcctaagttttacttcctaaatttcttaaatctacccttactctgcctgtgtactgtcattgcctacttcaagcctttacagctgcttaacatgtggattaaatccatatgataattgtgaggtagataactgttactactagttttacagatgacaaaactgagacacattaggtaacttgctcaaagtcattttttgcttaatctgctgtaactgtctcttaactggtacttccagctttcagtcttggcctccacatactcatttttctttagttgccagagtcatctttttaaaatgcatgacttcaaatagcatgctatccgctgtgatgtgctgggcagtacattttattgatgcagccaaactttaatacatgtttcaaagaaatcttacataaatttttaaaatataaggttggtttttattttgtaaaagcctgttctatcttcttcttaaattctgttttttgagttagctgttaaatta

SEQ ID NO: 700901 - DNA, 1057 bp, Homo sapiens
ttttttaatttttttaacttttatttgacgttcgggggtacatgtgcaggcttgttttataggtaaactcgtgtcacaggggtttggtgcacagattattttctcacccaggtgttaagcccagtacccaatcgttattttttctgcttctctcccttttcccacctgccactctcaaatagaccccagtgtctgttgttagaggggaagacttttaaacttttggttgtataataacttaattagaacatcgggagaaactattttctttgacctatgagaaaaaaatgttgccaatagtggaaaaagatcaaggatttaatgtcttttagatggtaaacatctcactcatccaagaccaagcacaacttcctaaagcrttttgggtacagatagtcaatacgaacctggtgatcgatgtgtttcacccaacatattttgattttagttttaggccatttatttttttaatttatttaaagatttttttgtacaaatttatcgggtacatgtgaaattttgttacttgtatataatgcatatagtgtgattaagtcagggtatttagagtgtccatcacccaagttcaatacatttttgttaagtatagtctgctatcaaacattgaatttattccttctgtcttactgtatacttgtacccttcaacccacttattcttattggatgtttttactaagctgactagtatcatggaaaggatgttggaattcagaagtgtgaggatcgaaatccaaccactcagggaaaatatcgggagagccatggttaattaaaggactctaaggacctctcctagcctgagtgtgctgtgcttctcatcatgataaagaaaatatacaaagagaacttttacttaaattggcccccatttcttttttatttatacaagtgtttctttttttatagagcatgttttgatgaacttcaatctgattacctagaatattggctcattttggattacgtatcagacatagtctatttaatcgatatgtttgtacgaacaaggacaggtaaatatgttcagttttgaa

SEQ ID NO: 700902 - DNA, 1790 bp, Homo sapiens
gggttagaagtagccaaactgttaataccactgggatccaaggacaagaagaggaatttagtgtggccctggatagagggggagttatgcagaataactatgaggaacagtgacttaacgttgaagaacacagccagcacaaggcaagcccacgggaacagcatagctagggtactcaataccctgatctcaccaccacctcccccaactccacaactgacaaaattatctcctgctaggattactgctcacacctgtaatcccagcactttgggagactgaggcaggtggatcacctgaggtcgggatttcgaggccagcctgaccaacatggtgaaaccccatctctactaaaaaaataaaaaattagttgggcatggtggcgcatgcctgtaatcccagctactcgggaggctgaggcaggagaaccacttgaaccagggaagtggaggttgtggtgggcagagattgtgccattgcattccagcctgggcaacaagagcaaaactccattaaaaaaaaaaaagaaagaaaacaagatttcaccgttgtctactgaattattgccctttcttctgccacagtctcaatctcccttcctccctccctctgcctttcttcctacctctggtaccttgttatttttatattttatatactatatagtatttcatctatgggacctctttttggaaggaaaaaaaaggtattggaaatccttcaaaaatacagtatgaggccaagtgtggtggctcacacctgtaataccagcactttgggaggctgaggtgggcagatcacttgagatcaggagttcaagtccagcttggccaacatggtgaaatcccatctctactaaaaatacaaaaattagctggaaatcgcttgaatctgggaggtgaagactgcagtgagccgagatcgcgccactgcactccagcctgggcgaagagcgagactccatctaaaaaaaaaaaatacagtatgctaccatttgtaggaaatatacatatatatrtaaatatctatatttgtgtgtgtgtgtgtgtgtgtgtgtgtgtgctgtgcgtaaaggagtggtgagaatctctctggaaaaatgcaacaagaaagtggtaacagtgattgcctctgaggaaggggaagtatgggactgggcaattggagtggaagggaaaatatctttcactgtatatattttatacattttgaatgttgtatcatgtaaattaattacttagtgaatatatatactgaccccccatttcaaaatgcaaaacagcatatcattatatatgaattatgaaatattcatatattcattttatatgaactataaaatatgaattatatcattcatatttctgccaccaggaattaacaactgttgacttctgtcaaattggctctcagtccttttatggcatgtgaaaaaaataaaactttatatttaaagttcttttaaaaaaccgtggccaggcacggtggctcacgcttgcaatcccagcaaactttgggaggccaaggtgggcggatcatttgaggtaaggagtttcagatcagcctggccaacatggtgaaatcccgtctctactaaaagtacaaaaattagccgggcatggtggcatgcgcctgtagtcccagctactggggaggctgagacaggagaatcacttgaacctgggaggtggaggttgcagtgagctgagatcatgccattgcactccagcctgggcaacagagcaagactctctgaaaaacaaacaaacaaacaaacaaacaacaacaac

SEQ ID NO: 700903 - DNA, 877 bp, Homo sapiens
gggtgagcattttttaccctacagtttttgattcacatttactagtgaagttagacaaactctcatgtgtttattaatcatttggatttattctctgtgaattacatgtttatattcttggtctgcttttttgagttgggttctttaattcattcaacatttaacacatatttaagaaatgcctactaggtgtcaagcattattattgtcccacaagtaactatgtacctctgactatggtcctctgactattaactacaatttaattttacctttctgaagcataaaatcctgccatctactaaagtcatttgtgtactttactaacctgtaaatcctgtaagccatttcacaacaaatatttgtttaccaatttatggctcacatataggttgtattacatcacccaagcagtaaactacttttggataaaattacaaactgaattgagaaatccagtctgaaaggctgatatagtacacagactttaaagcaccatctttttttttttttttttttgagagggagtcttgctctgccgcccaggctggagtgcagtagcactatctcagctcactgcaacctccacctccccggttcaagcaattctcccacctcagcctcccaagtacctgggattaaaggcacccamcatcatggccagctaatttttatatttttgtagagatggggtgtggggatggttcaccattttggccaggctggtttgaactcctgacctcaggtgatccgcccgcctcagcctcccaaagtgctgggattacaggcgtgaaccaccgcgtccggtctaaagcaccatctttaaacaaggatagttatatagtatgcagctcagagcactcacacaccactgagg

SEQ ID NO: 700904 - DNA, 650 bp, Homo sapiens
agacagagtctctctctgttgcccaggctggagtgcagtggtgcgatcttggctcactgcaacctctgcctcctgggttcaagcgcttctgcctcagcctcccgagtgagtaactgggattacaggcatgcaccaccatgcccgggtaggtttttagtaaagacggtgtttcaccatattggccaggctggtcttgaactcctgacctcaggtaatccactcgccttggcctgccaaagtgctgggattacaggcttgagccaccgtgcctgacctaaactcccaagcttcatcttccatcttcatgtataaagagaatctctaccaacctttatttagtttcgttcatatgttttgtttccattttcccatgattctgttcttgacgatgtgagttagcatttaaaatggctatatgaattatctttaatgccatcaaagttttttccacttcttttcatatgcatttactgattttgtttttattacattgcttaggaagcaaaaacgttcaaaaatatcctttcagttagggtaagaataagcaaaactatggagaaatttgaaagtttaataaagtttttacatacccagtggcaaataggtaaacaccatagtaagaagtacctacaaccaraaaactcctttac

SEQ ID NO: 700905 - DNA, 651 bp, Homo sapiens
caatgaaagcctgtgcaaatttatcaaggtgttttacctgtgtctttgcycactatgaagccttgcacccgactcccctttgtgggttcatttcccttcctactgaagtaagggactgtagctagtaaactctcttaacaacctgtgtatgcttgaaaatgtcatttctcctttttgcttaaattatgtcagcgtgtatttagttataaattaaaattattttccttgaactctctgaagatgttaattaattgcattctgtttgctttagaaagcgtgttgtcagtctaattgctgtttcttcatagtaatctggtttttctctctagtggctttaactttttcacttgtttgtggtgttctgtagttgtgttaagatgtttttgatatcattgttttttaatcctgcctgacacttgatatgctgtttcactcattttatgtattctttcaacaaatacttattgaacatatactgcatgccagatgtttcctagataccaggaatacagagctgaacaagggagaagttctgttttcaaggacctgaagtactcttggaagagtttatagtcatatgctcagattttcaatctcaggactcatgcatttctgtagttctagaaaattatcttttatctctttattgcc

SEQ ID NO: 700906 - DNA, 874 bp, Homo sapiens
tgaaaggcgaggagcaagattagaaggtttaaaaaggaaactagataactaaggaagaaaagtcccaccaagcccatatttctctctcactggagcttgtgaaagggccagattggcaggaatgaaaaggaaagtccttttttattaagctcacctgtatagtattatctcttcagaggtgtttatgaaaacattcacacacagtaaaacatgcctctgtagacccagtttttattgaatttcctcagctctccatcaaattttaaaatccttgtctattactccatctctacataaatcataccccatgtccattagattctggcttagctgcaattctctccagctcctggtaatttgatatagaattatgtatcacgctgaaaaggcacctctatcctggcctttcaaatcacttggggatgcatgrcaattgtcttgtttcatttcatgggggaaaaacaaaaacagaatctagaggaaaagaaaaaaaatcgcttgcaattttattacctcagagtctcaattactttggtgctaatgacccatcctcctacttaaacaccatcttgatcctgctgctgacagtactcagaggctgccttggccttctgtgtggctgatcttcacactctcaggaaagaggagccgggcaatcacagaggtggggtgatggagcattatcatagtgagtgagggagtcaaacacagtgactcaaaggaggtatcactatggaattcagaagctgagagttgaaggcagccctggatatcactccctagtgtcatgccctaaaccagattttatcatgaagggctttgatggtacacaatgggctgctagtcttcaaagttttacaaattaaaaaaaaaa

SEQ ID NO: 700907 - DNA, 1855 bp, Homo sapiens
ctgagtgatgtgagcagctccatggattccagcccttattagaattcaccactctcacgggctgcaagcatcatcacaagcatgtatttatccctgacctcccaacgtggatattagtttagcgtgctggacaagttggtcctttgcaaaagatgaaattgtgggctcactgatgtgagttactgctgatgtccctgtgtcaaataaatactgaagagacattggcgctctgaaggcactcaacacgtccttctggaagatacgaccccggtgctctgaaggcactcaacacatccttctggaagatatggcccattggaaatgtccctctgacatcttccttcagtcccagtgaaaaatgggcctccctgaatcttgcaagccacctgtcccggggcttgtcatttacaatcagtgcatgacaaatgacgttactgtgcacacgtgggctgaagtgacggtcaactgatcatcagccggcagaaatatttcctcaatgtcctgacttggggttggctgtgggaggaattccagaccaattagttattctgaatcatggagggttagaggatagtggtgctattgacctaagaataagctgaggctcttgttactcaaacataaagagcccatagaaaagtaaacggtgtcaagagaggacatctgaacctttaaactcatcacagtgctgcgtggcgcagaccaagctttgtcttctcgatccctgcaatttggtgggattcactcccctgtaagaaggcttgttccctgcaggacatctgacgccatcgttcatttcttgaacacatattcctagaactcctcctggcacctggcacctggatactggggaaccaagtacctggatactgggggaacgaagtacctggatactgggggaacgaagtacctggatactgggggaaccaagtacctggatactggagcaatgaagagggcattttcccgctttgttgggattcagagttacaggacagggctggtgtcattcaacatgcacatgcatgtgcttacagaggtggcatgtgctctgcaggaggaggatgaggacgtatgaaagagacccacagggctgtgatttgagggtggccctaggggagaggctctgagggagagacccctgtgctgaaagcaggaggagcagaagccagcccattagaggttgggaggaatctaccccaggcaagagggcatgcagaatggctgaggcccaaacagactgttccctaaacattgtagggaaaggctgtgtgtgtggtcggagcggggacagggaggtgcgaggtgaggtccccgattcctaaggagataaatccacattcctttcatggttagattttagggttcctcccacctcatttctgtacgaagaggctgcagacttctgcaattctgattgcgaacttcccaaatgcctaacaccaggccttagtcttaatcgctgctggggaagcgctggtccatcggagccgtgtggggttgtggaagcacctcggacagaggccctscaccctgggtctcggacaggccttaccgccaacctgcagcgggtctcagttctccccaggtctctggacagccgtgatgctacggtcccctccagctccgataccgggactttctgtgcgatgtggccctggccaagaagcctcttggtggctcgtgcacagtgccacaggcggcgctccggctcagccacctttccctccaccgcctccttcccaggccgtctgtgcagcttcctgtccctgccactcgggaacgaacctcccccagcctaacttagactactgagtatttatgagacatcttctatgtgctgaagctggggaat

SEQ ID NO: 700908 - DNA, 1182 bp, Homo sapiens
gcaaatatattaaaaagtatttttctatgacattttaggcaatttttatggttgatgagaaatccaaattttttattattttccaaagtatatacagttacattaccaaccttgtaatattgtaataacctggattttttttattactagcttgggcattttggaattattatttcctgagataaaatgagaaagygcgctttctgtctttcatccattttcaagcttagcttttgctgaaatagtcaattttctctacatcaacaacattaaatgtagagatagtttcttggaatcaaagaaacaagagcatctcaggaagaattatcatgtagctttccttcatattttatctggcaaagcctaggcacaacgcacatagagcaagtcctctcttttagttacagaattgggctgtgaataaagagtaggagtgccaagttgtcatacagttttatgaaaaaaagcatatcataaaaacactgggaaaatatgctaaagtctccttatttttgctctgtcaataaaaaaaagcagtcagagaaaaacagggtaagtaggcccccctttccatggttgcagttacctgtggtcaataggtgagtacagaaagataaggtaatttgagagagagagaatgagagagagagagagagacaacactgacaaagcttttattattttcttataattgttctattttattattagttatagttgttaatctcttactgtgcctattttaaaattaaactttatgtaagtatgtatgtataggaaaaaacatagtgtatataggcttcagtattgtttttggtttcagtcatcccctgggaatcttggagcatatcccccacagatatgggaagactactggctaagacttaaaaaatcatgataatagaaactgaagaaagcttaaataatagagttataaaacatatggtgaataaagagtctcagtaaagaaatgaatatttagcaaataagtttaatcatataaaaagaaaactaggggtgattgttagatttggccactgataatctctgtgtgggaaagtaaggaaaaaatggaaatttactaaggtgaaagtggagattggaaaaattgaacatgtatattttacttttctttgtttcaggatctaaaacgacagtagtggtggatgtgtggggtgtgtg

SEQ ID NO: 700909 - DNA, 1182 bp, Homo sapiens
gcaaatatattaaaaagtatttttctatgacattttaggcaatttttatggttgatgagaaatccaaattttttattattttccaaagtatatacagttacattaccaaccttgtaatattgtaataacctggattttttttattactagcttgggcattttggaattattatttcctgagataaaatgagaaagcgcgctttctgtctttcatccattttcaagcttagcttttgctgaaatagtcaattttctctacatcaacaacattaaatgtagagatagtttcttggaatcaaagaaacaagagcatctcaggaagaattatcatgtagctttccttcayattttatctggcaaagcctaggcacaacgcacatagagcaagtcctctcttttagttacagaattgggctgtgaataaagagtaggagtgccaagttgtcatacagttttatgaaaaaaagcatatcataaaaacactgggaaaatatgctaaagtctccttatttttgctctgtcaataaaaaaaagcagtcagagaaaaacagggtaagtaggcccccctttccatggttgcagttacctgtggtcaataggtgagtacagaaagataaggtaatttgagagagagagaatgagagagagagagagagacaacactgacaaagcttttattattttcttataattgttctattttattattagttatagttgttaatctcttactgtgcctattttaaaattaaactttatgtaagtatgtatgtataggaaaaaacatagtgtatataggcttcagtattgtttttggtttcagtcatcccctgggaatcttggagcatatcccccacagatatgggaagactactggctaagacttaaaaaatcatgataatagaaactgaagaaagcttaaataatagagttataaaacatatggtgaataaagagtctcagtaaagaaatgaatatttagcaaataagtttaatcatataaaaagaaaactaggggtgattgttagatttggccactgataatctctgtgtgggaaagtaaggaaaaaatggaaatttactaaggtgaaagtggagattggaaaaattgaacatgtatattttacttttctttgtttcaggatctaaaacgacagtagtggtggatgtgtggggtgtgtg

SEQ ID NO: 700910 - DNA, 1182 bp, Homo sapiens
gcaaatatattaaaaagtatttttctatgacattttaggcaatttttatggttgatgagaaatccaaattttttattattttccaaagtatatacagttacattaccaaccttgtaatattgtaataacctggattttttttattactagcttgggcattttggaattattatttcctgagataaaatgagaaagcgcgctttctgtctttcatccattttcaagcttagcttttgctgaaatagtcaattttctctacatcaacaacattaaatgtagagatagtttcttggaatcaaagaaacaagagcatctcaggaagaattatcatgtagctttccttcatattttatctggcaaagcctaggcacaacgcacatagagcaagtcctctcttttagttacagaattgggctgtgaataaagagtaggagtgccaagttgtcatacagttttatgaaaaaaagcatatcataaaaacactgggaaaatatgctaaagtctccttatttttgctctgtcaataaaaaaaagcagtcagagaaaaacagggtaagtaggcccccctttccatggttgcagttacctgtggtcaataggtgagtacagaaagataaggtaatttgagagagagagaatgagagagagagagagagacaacactgacaaagcttttattattttcttataatygttctattttattattagttatagttgttaatctcttactgtgcctattttaaaattaaactttatgtaagtatgtatgtataggaaaaaacatagtgtatataggcttcagtattgtttttggtttcagtcatcccctgggaatcttggagcatatcccccacagatatgggaagactactggctaagacttaaaaaatcatgataatagaaactgaagaaagcttaaataatagagttataaaacatatggtgaataaagagtctcagtaaagaaatgaatatttagcaaataagtttaatcatataaaaagaaaactaggggtgattgttagatttggccactgataatctctgtgtgggaaagtaaggaaaaaatggaaatttactaaggtgaaagtggagattggaaaaattgaacatgtatattttacttttctttgtttcaggatctaaaacgacagtagtggtggatgtgtggggtgtgtg

SEQ ID NO: 700911 - DNA, 1182 bp, Homo sapiens
gcaaatatattaaaaagtatttttctatgacattttaggcaatttttatggttgatgagaaatccaaattttttattattttccaaagtatatacagttacattaccaaccttgtaatattgtaataacctggattttttttattactagcttgggcattttggaattattatttcctgagataaaatgagaaagcgcgctttctgtctttcatccattttcaagcttagcttttgctgaaatagtcaattttctctacatcaacaacattaaatgtagagatagtttcttggaatcaaagaaacaagagcatctcaggaagaattatcatgtagctttccttcatattttatctggcaaagcctaggcacaacgcacatagagcaagtcctctcttttagttacagaattgggctgtgaataaagagtaggagtgccaagttgtcatacagttttatgaaaaaaagcatatcataaaaacactgggaaaatatgctaaagtctccttatttttgctctgtcaataaaaaaaagcagtcagagaaaaacagggtaagtaggcccccctttccatggttgcagttacctgtggtcaataggtgagtacagaaagataaggtaatttgagagagagagaatgagagagagagagagagacaacactgacaaagcttttattattttcttataattgttctattttattattagttatagttgttaatctcttactgtgcctattttaaaattaaactttatgtaagtatgtatgtataggaaaaaacatagtgtatataggcttcagtattgtttttggtttcagtcatcccctgggaatcttggagcatatcccccacagatatgggaagactactggctaagacttaaaaaatcatgataatagaaactgaagaaagcttaaataatagagttataaaacatatggtgaataaagagtctcagtaaagaaatgaatatttagcaaataagttyaatcatataaaaagaaaactaggggtgattgttagatttggccactgataatctctgtgtgggaaagtaaggaaaaaatggaaatttactaaggtgaaagtggagattggaaaaattgaacatgtatattttacttttctttgtttcaggatctaaaacgacagtagtggtggatgtgtggggtgtgtg

SEQ ID NO: 700912 - DNA, 1182 bp, Homo sapiens
gcaaatatattaaaaagtatttttctatgacattttaggcaatttttatggttgatgagaaatccaaattttttattattttccaaagtatatacagttacattaccaaccttgtaatattgtaataacctggattttttttattactagcttgggcattttggaattattatttcctgagataaaatgagaaagcgcgctttctgtctttcatccattttcaagcttagcttttgctgaaatagtcaattttctctacatcaacaacattaaatgtagagatagtttcttggaatcaaagaaacaagagcatctcaggaagaattatcatgtagctttccttcatattttatctggcaaagcctaggcacaacgcacatagagcaagtcctctcttttagttacagaattgggctgtgaataaagagtaggagtgccaagttgtcatacagttttatgaaaaaaagcatatcataaaaacactgggaaaatatgctaaagtctccttatttttgctctgtcaataaaaaaaagcagtcagagaaaaacagggtaagtaggcccccctttccatggttgcagttacctgtggtcaataggtgagtacagaaagataaggtaatttgagagagagagaatgagagagagagagagagacaacactgacaaagcttttattattttcttataattgttctattttattattagttatagttgttaatctcttactgtgcctattttaaaattaaactttatgtaagtatgtatgtataggaaaaaacatagtgtatataggcttcagtattgtttttggtttcagtcatcccctgggaatcttggagcatatcccccacagatatgggaagactactggctaagacttaaaaaatcatgataatagaaactgaagaaagcttaaataatagagttataaaacatatggtgaataaagagtctcagtaaagaaatgaatatttagcaaataagtttaatcatataaaaagaaaactaggggtgattgttagatttggccactgataatctctgtgtgggaaagtaaggaaaaaatggaaatttactaaggtgaaagtggagattggaaaaattgaacatgkatattttacttttctttgtttcaggatctaaaacgacagtagtggtggatgtgtggggtgtgtg

SEQ ID NO: 700913 - DNA, 1182 bp, Homo sapiens
gcaaatatattaaaaagtatttttctatgacattttaggcaatttttatggttgatgagaaatccaaattttttattattttccaaagtatatacagttacattaccaaccttgtaatattgtaataacctggattttttttattactagcttgggcattttggaattattatttcctgagataaaatgagaaagcgcgctttctgtctttcatccattttcaagcttagcttttgctgaaatagtcaattttctctacatcaacaacattaaatgtagagatagtttcttggaatcaaagaaacaagagcatctcaggaagaattatcatgtagctttccttcatattttatctggcaaagcctaggcacaacgcacatagagcaagtcctctcttttagttacagaattgggctgtgaataaagagtaggagtgccaagttgtcatacagttttatgaaaaaaagcatatcataaaaacactgggaaaatatgctaaagtctccttatttttgctctgtcaataaaaaaaagcagtcagagaaaaacagggtaagtaggcccccctttccatggttgcagttacctgtggtcaataggtgagtacagaaagataaggtaatttgagagagagagaatgagagagagagagagagacaacactgacaaagcttttattattttcttataattgttctattttattattagttatagttgttaatctcttactgtgcctattttaaaattaaactttatgtaagtatgtatgtataggaaaaaacatagtgtatataggcttcagtattgtttttggtttcagtcatcccctgggaatcttggagcatatcccccacagatatgggaagactactggctaagacttaaaaaatcatgataatagaaactgaagaaagcttaaataatagagttataaaacatatggtgaataaagagtctcagtaaagaaatgaatatttagcaaataagtttaatcatataaaaagaaaactaggggtgattgttagatttggccactgataatctctgtgtgggaaagtaaggaaaaaatggaaatttactaaggtgaaagtggagattggaaaaattgaacatgtatattttacttttctttgtttcaggatctaaaacgacmgtagtggtggatgtgtggggtgtgtg

SEQ ID NO: 700914 - DNA, 1259 bp, Homo sapiens
tgttatggtaatgaaagtaaatattgccgtaggtatataaataaaataaatattcccttgttaaagatgcagacttcacctgtactaacgtactatggggaacaagttccaaatggctaggtaaattacaaaaagcaaagttataacaagaaaatgcactaaaaattccaatgttagaatatcagttggctaagtaacataataaaacaaagttatttcagtcttttgctaagtttactccattaatcttctactcagaaaatgtaacagaactgatcaattcactcagaaacatttacgatctcttcataccatacactatcaacagattgtccattaattgcctctagtcactaacaatctattttaaacataatttcaatgtctattactgaatcactgaattctcttttatgttattctactgtatttctctttttgggtcaatatatttcttgaagatgtatgtcaaagctactttgagaaaattttgaaaaaaaatctatggtagaaaacacatgttgatcagtatcgtgtgtccaataaagaggtcacatagatagacacccttaaaaagaacaatcagaaaaattaccacaactctattttttttatctttcatgggttctgaaaaatatgcagcatttttgtctacatacttccagcgcttattctgttaaaaaattatcctcccatctgtgtatcttttcttttctcactgtgataattgagtattttaaagtatttgttttatgctctagttcagcagtgataatgcacactctcaaaaattctatgtatatattctattcaggttgaaagcatttgttattttaactaagcaytttagaaaacaattgagatcagttttctctgaattagaagctatgaactgaagctgggatcttatataaactgagatttttgttccagctcctacaggtgaaaaaatgtcataatagtgacaataacaattttggaaaagaaatgttagtttaaagccagtgcttttaagagatggcctctttactcccaaatgaaattatgctcaaaatgagtttgatgttccttcctacttctatataaatgtcttttcctgggggatgggaggctgcgggagggatagcattaggagaaatacctagtgtaaatgacgagttgatgggtgcagcaaaccaacatggcacatgtataactatgtgacaaacctgcacgttgtgcacatataccctagaacttaaagtataattaaaatattt

SEQ ID NO: 700915 - DNA, 912 bp, Homo sapiens
ggcaaagcaggcaacattatcctcattttacagrtaagaaaacagaggcacaaaagtgaacttcccccaaggtcacaaaggcaagtgacagaaccaggttacaaactcagacagtcagcttccaaaatctatgctcttatccaatatgctacacttcctctacttagggttttatattatttaaggcatttatttctatgaatgtcaggggaaaaaacattagcataaaaaaattaccaactactctctcctcaatgggactattctgtagcttaaaaaaaataagataccctacataagcaatgacaaggtaaccatttatgaatgcctgactggtagcctggctgtggggcttcatcttttattaatatggaaggggaacactgctttcctttgtatggccttataaagatttacttaaaaagaaaactgcttcatatactaatatcggaataagatttggtaaagttcaatcataactcttgggacacagacttctccacatgattggcacagaaggaaaagtgccaattctgcttttttgctaatgtatttggtcaattcctgagatagtcattgtgctctgtttcacgaggagcaaagtttttatgctttatagcagatcaaagactctgcccttttcctctaactttcctgctcagccaattattttccactttctgtcatttagtggtaagcacacgctgagcaagaacttccatatagaagcaggcctagctgcactaaatatactggatgtactggcttctctacctacatcttaaggggtagaaaagttaaccacctgtgttcatatggctagttgtcataataaatgtaaagagaatgtccctccccatttctattctggaaaatggcaatttattttatacctagctcaacatcattaaa

SEQ ID NO: 700916 - DNA, 912 bp, Homo sapiens
ggcaaagcaggcaacattatcctcattttacagataagaaaacagaggcacaaaagtgaacttcccccaaggtcacaaaggcaagtgacagaaccaggttacaaactcagacagtcagcttccaaaatctatgctcttatccaatatgctacacttcctctacttagggttttatattatttaaggcatttatttctatgaatgtcaggggaaaaaacattagcataaaaaaattaccaactactctctcctcaatgggactattctgtagcttaaaaaaaataagataccctacataagcaatgacaaggtaaccatttatgaatgcctgactggtagcctggctgtggggcttcatcttttattaatatggaaggggaacactgctttcctttgtatggccttataaagatttacttaaaaagaaaactgcttcatatactaatatcggaataagatttggtaaagttcaatcataactcttgggacacagacttctccacatgattggcacagaaggaaaagtgccaattctgcttttttgctaatgtatttggtcaattcctgagatagtcattgtgctctgtttcacgaggagcaaagyttttatgctttatagcagatcaaagactctgcccttttcctctaactttcctgctcagccaattattttccactttctgtcatttagtggtaagcacacgctgagcaagaacttccatatagaagcaggcctagctgcactaaatatactggatgtactggcttctctacctacatcttaaggggtagaaaagttaaccacctgtgttcatatggctagttgtcataataaatgtaaagagaatgtccctccccatttctattctggaaaatggcaatttattttatacctagctcaacatcattaaa

SEQ ID NO: 700917 - DNA, 1467 bp, Homo sapiens
gtaattttggcttctgagaggttcccattcactgtatttgtcagcagacgtagaaacaaagaaatggttaatagcgctctgcagactctctgtaacctcatgcaggctgtaggatgtagcaaacctcctgatggctggtgacaagggcacgtaattgacctccagaacaacttttttaaaaaattatatttatttattgagacagggtctcactctgttgcccagggtggagtgcagtggcatgatctcagctcactgcaactttcgcctccccaggtcaagcgattctcatgcctcggcctcctgagtagctgggattacaggcgtgcaccaccacgcctagctaatttttgtatttttagtagagactgggtttcaccatgttgactaggctggtcttgaactcctgacctcaactgattcactgcctcagcccccaaagtgctgggattacaggcgtgagtcaccgaacccagcccagaacagtttctattttttctgtttttttctatgcatcatagcctgctgcttcccagaagtttaggatctaccctttgtggcagtggttcacaaccctgcctgcacattttaatcacccaggcagcttttaaactatactagtgcttgggcctcacctcaggctaataaaatcggtatctctgagggctgtggctgtactagaatgccagacagaccatcatcctgatggctttgtgactgaaagaacagcaccctaggaaacgggcgttatttgttgtaactttagttctgctgcgtatgaaccatgcaaccgtagacaagttccttacttaatagagtggaatggttaataatatgattcccagaatccagtaagcccggtgtgcatcctggctctgccacttacaagctgcgtgaccttgggcacgtgatttaacctcttccaaactgtgagcgttaataacattgtctactcattaaagttttgaaaggattcaatgggataatgtatgtaaagtactacagtgactgagtaaatactaaatgttaaaaatgtcttaacaattgttgctcatttactttattttcacatggaagtgagaataataataaaacctacctcatagggtggttccaaaaattaaaggaaatgaaagattcccaacattatacgtagcccatagtaaacactcaaaaggctgcagttgtgattactcatgagcatatgaaaagcagcaaaatgcggccgggcgcggtggttcacgtctgtaatcccagcactttcggaggccgaggcgggcggatcagcaggtcaggagatcgagaccatcctagctaacatggtgaaaccctgtctctactaaaaatacaaaaaaattagctgggcgttgtggcgggcgcctgtagtcccagctacgcgggaggctgaggcaggaraatggcttgaacccaggaggcggaggttgcagtgagccgagattcttccac

SEQ ID NO: 700918 - DNA, 651 bp, Homo sapiens
tagatatctaaccagcaatgaacaactttcccatgagcatttctaagcatccttcactgtaattgtattcaatgcattcttattcaattattaaactgaatatgaaacaaatattcataacgtcaatcatgtaaaaatgctttttgtgttggcttataagaattgattaatgaggctgggcgcggtggctcacacctgtaatcccagcactttgggaggctgaggctggcagatcacttgaggtcaggtgttcgagactagcctggcccacgtggtgaaactttgtctctactaaaaaaatacaaaaactaaccaggtgtggtggtgggtgcctgtaatcccagctacttgggagtctgaggcaggagaatcacctgaacccaggagacagaggttgcagtgagtcaagatcatgccactgcactccagcttgggcgagagagagactaagtcttaaggaaaaaaaaaaataaagaattgattaaatgactgcacacctctccttaattttttagttcagattttaacaagttgcatttaagaagtagtaaatatataygccaattcatcactgtctttatacgtatacggtcatccctcggtattcatgggggattggctccaggaataacagaagctatgaatgctcaa

SEQ ID NO: 700919 - DNA, 1327 bp, Homo sapiens
aaccttcacttggaatgaactggaatagtgagaaggggtattaaactgaggcgccaagacaataaaatttagtttgaagaaaatctagttttctggatggttggtctactcactgcttggaaacatttgggtgattcaattttgtggctctccacctcaaattagccgtcatgtggccatcatctcccacagagttcttcaggtcagtgcaggcccagcaatcacagaaagatatattgcagccgttcaaagagcagtgcaatcattctgaggctgtaccttacagctgtcacacatgtcgggaagcacagaaggcagtttctgtgtattgctcaaggtcatctggaaaaccagtagatgaagccacatgtctcccagaccattaggccgtcagacatgaaattctctgcatgatctccccattgagtcacccatgtttgtttgtttgttttatatttctttgtttgttggtgtcttttctttagtagacaagaacattttaaagagttttcagcagcttctggttctaaatgttaaggacattgaggttctatttatgaccactctcarttggacaaaaggacaagctagggttgcctttcaccacttttcataatattgatgtcatctgctcaatgtaacatttgccaggtataggcaaatatacaacatgcacttggtagaggagagaggtagtagcatcatgatgcttgtcagctaggaaagaagcacacagaaatactgcttgggaaaggggtgcttaatgcctaggatgaataacaaaaatctgtagtactttataatgatgccttaaatcccacagctctagcctgccatgaaattcaagcaacaagtactgcttctgcaatactcaagcaacctaaattgtactcaggactagtacacagaacagataattgattacaaatctgatttgagagttttagtatgcaagcaaaaatttgactggcttttgtccttggttcttgggaggtagcctctaaacccttgaaattttcagagtgataagagtgtctttgttattcatggtgggcctctgagccggtgcctgatagtttatgcaaatgaagtgactcaggaagggaggggactggctatgccaggaagaccaactatgtgattaaagggtgggagctccaagccaggtgatatcaactccatctctggggagggcagcaggggctggagatcagagatcaaccttctgatctcttatccaatcagtcttgcctatttaataaaaccccattaaaaactctggacagtgaagcccaggttgaatgtccatggttggcaaatcgctgca

SEQ ID NO: 700920 - DNA, 1832 bp, Homo sapiens
tgaaaactgaacacactatgtgaacacatagcttaaaggtgataaatgaagttacaactcttagtataacatctgctcagactaaataacaataaccttcacgtttgtatgaccttccytccttctgttctactttcttccataccttctctctattttcccctccttactccctttctcttacatgttaatttatcttttcatgcatttatctgttctgtttttttttttagcatcttcaacacatcaggcagagtgctaggtgctggagatgcaaagataaaattactactctcaaagtgcttacattttagttggggagagaggtgagccacaggtaagtgatagtgcaggatgatatactttatgacagggacatctcatggagtaccatcatagcaccagggctgagtaggcagcctagtcttagagaggtacaagatgctcttacacatcttatttttaatataatgccttatacttaatattaatctcaagcatggttgaaaaacagttaatagatggaagtcatgcttatgcaacctactcctttccccaagtccacaggatcaccagcaatggctgaaacatctcagttgctgtaaatatgggctggctaggtgcttctaagtactttcttagctcatcaattcttgcagtcaaaaatcctttgaaaaacaaatctagctatcaactaatatctcaattctgttagtcacatattcttgcaatgtctaaatgttcaaaggatagaaagtgaccagcacaatgttgccagacatttcctagaagcctgtgggctgcctctcagcagcagagtcagggaggagtgaagactcactacaccactacagcttgtcacacaagcgggctctgcctcacattcacttgtaaagttggagtttgagttgacagaccgataaactgtagtgctcacaggttctagctaaggagtagcaccttccaactaaagacctgcagctagacatataataagctgcctctgaatagacaactgtacagacaagtaagaaagctactatggcagacagctcaactcccaaggccaacagaataaaagaaaacatattctgtgggaaataaacaaaacaccctgtaccagatagaatccacttggctgcagtgacttccaacagaggcttcctcttggcatctgaaggaggagattcagcagggaactcacatctaactgtgtagaaaccttttctattctacaaagattaattagctaaactcatgggtgctaccagatgccacatatgacttcagcagagacaatctttaggcagctggttcctaggaaaccaaagtggccccagactcacaagactgaaattggcaaagatctagcttaccaggcatgacatcaaagaatcagaatttctaaaatcaattatctgtacaaacatagaacactttccattagaagttctgtgacatatattgatttatgatctgtttttctctcctcttcatttctcattgttgtcctgagaggagtggccttagcattccacattgcctgagaggcaacggaagctgagaaaggtcaaatgatatgttcacactcacattgaacactgcctctcacttgtgactaagcgccacactgcatcacagtatttatccttgaggaagtggccttgcccaaagcagctcctaaactagtaacttttatatgaagctgctgtcttcttgtctgtgaaatatttttaaaagcacagtaacacttggttaatgggcaaactctcttggcagatacttccatgtttaacatacaatgatgattaatgttcaaaatgaggattgcc

SEQ ID NO: 700921 - DNA, 595 bp, Homo sapiens
attattgttaaacttgtacttaggtaattcatgtttcttggtgttattgtaaatgttacttttaaacattctccagttatttattgctagtgtatagaaatataattgatttttatatactgaccatatatgcataggactttcatggcttggatgcttggtgttgagtgtgttttttcaggggaagagttgtaaagtgaagaatttatttatttcttctggattcccagaaacaaatgtgacactttgggcaagttgcctcagcctttgggtgtgagtttcttgtctgtaaaatggaaggcaatggagaaaactggattcaaagacctggtgaggtcccatcccgcttgggcactgatgttcacataaactgyaggatgggagatttggaggagagccgagtccttgtcatggggaatcctttcctcattttacagaactgacagggcagggcacttggcctgcagttgcacagaggctgatgaaaggacaggtctcctgtgcccgagctggggtcctgcaccctgatttggactgggaaaggcaacccagcatggtgactgggaggcgactccacagccgggagggagggaga

SEQ ID NO: 700922 - DNA, 2631 bp, Homo sapiens
atgtgtccccactctcttattccagtattttccccaaagcactctatgcttcctctttactgggcttgtcccaattcaaaaccgtacaatcttttatctgttcccctctacctttgggatgtaagctccacaagggatgagatggtgaaagtagcaggcccaggccacccacagcagcgtggaggcagtggagtcagaaacaggccatttgatgccattctgcctgtgccattgaaaagctaaatcacataagacagcacttgccccatttcttcttcctggtccctaattcaatgcctgtcacatagtgggcactcaataaatatttgtagagtggttgaaataaaatcccccacttaactgaactccatacttatccctgtgccaagcacatcagtatttcatcatatccccccaacaacacagtgaagmaggttttattcttcctagacccatatttttagaggaggaaacagagaggttaagtaatttgttacagatcacacaccaagtaggtagcagagttgagagttgaacccagagctgcgtgagatgtgtgtgcatcttcttaacacctagtcctagaaaagaaaaccagtcccttgcccctgggaaatgtctcacactactgggaaggcacaaggcatgaaacagtagaaatcatgcaagggaaaggttgcttctgggtggtggaaaaggagcagtatttacgggctaccgcttatgaacagagacatcacagaggggatctgggccacctctcgctataggcaggtggattggcagggagactgagtcatcatgacccacttcataagagactgatggataaaccagggtcccacttattaactcttatggcccaaattttttagactatctgtaggcccaagtggctaagtggtattgtctccccctttggagggtaaatctgcttggtcaacattgccccaaatgggagagttgggcacccttgggcagtggtaaacaacccttttgaagctctgatgaatgctctagaccctctctaccttggaaaatgcatatgtgaatgaatggaactttgtgttcattcatttaacacaaattacggagctcctactgggtgccaggccctcctataggtgctaggccctcctatagatgctggccatcctgcagtaagcaaaacacaaaaattcctagctcaaggagtctaagggggaaatcatagcaaaataacctggtagccagtgtattgaaggtaaaggtgccaaggtcaaaaataaagcagagaagaagagaaaggaatgttgggagacggcaggttgtggtttaaaggaagtgatcagggaaggcttccctgagaaggtgacatttgagctaggtcttgctggtggggatagagtggggaggaaattagctatgatgctatctaggggaagaatgtcacagccacagagaacagcaagtgcaagggccctgaaataggagcagacctggcacgttccaggaccatcaaaaaagtgatgagatcggagtaatattgggggcagattgtaagttcgtataggctattgttgggtctttggctagtcatctgagtgacttgggagcccctggaggttctgagcagaaaaggaacaggatctcccttctgtttcaagaggctcccttgaactgccttgtgaactgactgcaatggtggggtgggagcaggacctggtaggaggctgtggcagtggtccaggccagaggccatggtggcttggaccagggtgagagcagtggacgtgggggagcagaagttggatcctggacattttatatatcctaaagatagagccagcatgatttgctgtcacatctttgaaagtataaaagaacatctgaacagtatactcatgtcattgatgcttaatcttttgctggtaatagtaataataatattaggaggttgttttgaagatcaaaatgcttagcgcagtgtctggcatctagtaagggctcaatcaaaagtagtttttattagtgaaatgagcatggagtcagtcattttcaagttaagccactgaactaacagcaaccctgcaaactatttaacctctgtgaccctcacttccctcgcctgtaaagtggaccaactggaccaaggtgggagttaaatgaataaagttctggcacactataggactcagcagctcaataatctgattaataaagttactaagcttcggtacctatctcatatggtcattgtgagagttgactgagataatacgtgcaaagcatttagagctgccactgttattctgctccttgtgtacccataggggagggcaatgccctggacattatcagccttcaaaaatattgcatggatgaatgaatgaatgaatgaatggaaacatgagtgagcaaagtgcagtgagtttcatggttgttaaaagggatggaggcagttgtacagaggccagggtgaggactgtgagcctgcattacctaaatccatcctcctcaaactgggctaatgtggggacttttggaatcaagggatttttctgcagagcttatttcattcacagatgttgggggaatttatttatttattttattttgttttgttttattttatttttgagacggagtttt

SEQ ID NO: 700923 - DNA, 1053 bp, Homo sapiens
acactcaatttttgtttcaccagtgaaagcagaacaagaaaacttatcatagcatcattttgatggttagataaactaacatatttagaatgtcttccatgggatttcaatcttttattgactatatatatttttggcagtctggtgaagcctatggacccctagaacaattacttttaaacttataaaacaaaatatgtggaattacaaaagcaacactatgatacatttatcaaaaggttttggtaaaataaatgtgttagaatgtaatgtttctttgttcatgtattaaaaaataagagatcaagctgagggtctgataactactataatttgaggtaaagaagcacataaatgatattttgatttacctgccaaactgtaatactgtacatggaaatatttgtcatttctattgttgacaaaatcacattgtgggtttataacctacgtttgtaaatgaagaaaatgccgaatacttgttaaagaagagtgaaaataaagatggattttattccttccaagtttatggaaccctgaacctcttgtctaatgaaaaacacttgataatagctcattccctttcttctaattttctctttctgatgccttctcttamatagttctcaaattcagacccaaggaaagggtctgacatcaggcatttggcctgtggggtggataagtgtatttccttgctttccttttcaagaactttcttcattgtggaaaaaattgaaggaatttcagcataggaacaaggtggacctccccagcccccaggcaaaaatcataaagggagcagatgaaatactttcccaaacttcaggctggtctcaaggattggctgtcgacttgatttctaaccactatcctaggtggcttggcctttctcctgagtgatcagggtgcagaagcccagagaaatgggaccctgcttcttttggtcctgctttggttcctgctctgttcctgctgtactagggtaaaagcccattaagtgtatctcttcccaactctgttccatggtgtcttatttgtaacttgaaacca

SEQ ID NO: 700924 - DNA, 628 bp, Homo sapiens
ctttttgtagttttccaagttatcartgagaactattctttctcagaagttatgttaaataactttcttttttatgttaaataactattctttctcagaagttatgttaagtaacttctctcctagagaaaactgatctttccttgtatgctaccaaagcagaatgactgaatattcaaaattaagatctacaattccaacaagtttatagaatggacgatttgtgggtattttcctacgtaacactcaactccaggactatagccttcttcaaatcactgaccaggatacagaggcgccaatcaaatccagaccaggtttttgccaagggccagactggaatggggtggaatgggaacagctaaccggacatccgagtctcatcactctgagacagaaaatgggcaacccggcagtgaggacacctggatgactttgacccaatcctttcccatctttgtgcttccagtttcacagtctgaaaaacttctttgtatcacttattatgcttgtagttacacatctgtatgattatttaactaatatctatccactacacggtaggccccatacaacatgaactgtgccttgctcactataatcactcagtaactagcacaattaagct

SEQ ID NO: 700925 - DNA, 604 bp, Homo sapiens
attcggctgtgaatccatctggtcctggactctttttggttggtaagctattgattattgccacaattttaacccaaatgtccaacaatgatagactggattaagaaaatgtggcacatatacaccatggaatactatgcagccataaaaaatsatgagttcatgtcctttgtagggacatggatgaaattggaaatcatcattctcagtaaactatcgcaagaacaaaaaaccaaacaccgcatattctcactcataggtgggaattgaacaatgagatcacatggacacaggaaggggaatatcacactctggggactgttgtggggtggggggagaggggagggatagcatcgggagatatacctaatgctagatgacgagttagtgggtgcagcgcaccagcatggcacatgtatacatatgtaactaacctgcacattgtgcacatgtaccctaaaacttaaagtataaaaaaaaaaaaagaatcaaaacgaatagcatgaaagcccctgtggaactgtctggctcctcaaaactgttgtggacatcagaaaatcatgttgggggagagtcgaatgtctcttgccaatttcattctttt

SEQ ID NO: 700926 - DNA, 1074 bp, Homo sapiens
ttcttttcttcatgaatattttggttgtttcaagttttaggctactatgaataatactgcattgaacatttaaaactgtttctgtgtacacaacatttaaaatgtgccttctgcacacattttttgtagcatctctctttagcagtgaagttaccagataacacagtaggcacatgttcagttttagaagatagtgccaaacagtttccaaagtacttttatcaattcacgctcctgtaagtagtatatgagaattaactttctatatcctcaccaatgtttgatattgacagtttttttaaagtttattcattctatgagcatttaatggcatattattgaggtttggtgattaatgaagttcagcacctttttgtatattaraaatttattttctttggaagtgcctgctcttttgctcatttttctatggcttttctatgttgatttgtagttctttatacgttcgcttatgatttacacagatgtaccattttgtggctttgtattttattattattatttttaattagagacgatgtctcactaaattgcccagactggtcttgaactcctgggctcaagtgatcctcccaccttggcctcccaaattgttgggattacaggtgtgagccgcagcacctggcccatattttattcttaatggagtttttgatgaaaagcttttcatcttaatgtaatccattttatcactgttttccttcatgactaaggattttttggtcctgtttaagaaatcttaaccatacacctagattttgaagatgttctaagtaatctctttgatgtgttattttgcctttcagtttacagttaaaatccacttgaaatacattttttatatatagtgtgcggtaagggttttcttttatcttacatgattacccactgtaccactaaaatttatggaaaagaccatccttttcacactgaagtgtcacctttgtctaggggccaagtcattgcagtttgcctgggactttcttggttttagctgaaatttctatgtcttgggaacagcctcagtctcaaacaactaggatggtcacatta

SEQ ID NO: 700927 - DNA, 610 bp, Homo sapiens
ccagcctatgatgggacttgtcagcctccaaaattgcatgagtcaattctcctatcaacagtcatcccttggtatatgtggaagtttcagggtcagccctgcataactcatatacatatatatatatatatatatatataaaacattggccctttctatacatgggtttcatatcctgtgaacactgcattttcttatctatttatttatttattgatagtcttgctctgttgyccaggcaggagtacagtggcatgaccataattcactacagccttgaactcctgggctcaaatgatcctcctgcttcagccttcagattagctgggactacagatgtgtagtcccagctaaaaataaaataatttcatgtttttatttttttggtgggggagtcttgctatatttctcaggccggtcttgaactcctggcctcaagtgatcctcctgcctcagcctcccaagtacctgagattacaggcatgaacagatactgtatttttgacctgcttttggttggaaaaaaaattgtgtatatggaccagtgcagttcaaacctatgttgctcaagggtctattatgtgtgtgtgtgtgtgtgtgtgtgtgtgtg

SEQ ID NO: 700928 - DNA, 645 bp, Homo sapiens
acagacgtacttaggatgtatgtggtgattgtggttcagtgtcacaatgcatttttcttttcttcatgaaggtgaatgaaggcaaggaggagcctggaagacctgcaggggaggtctccaygggatgccttgcttctgagaagggaggcaaaagcagcaggtcaccagaagaccctgagaaacttccgatagccaagcctaataatgcctatgaatttggtcagattataaatgctctcagtaccaggaaggataaagaagcctgtgcacatcttttagccatcactgcaccaaaagatttgccgatgtttttaagtaacaaacttgaaggggatacattccttctcctcattcagtctctgaaaaataatcttattgaaaaagatccctcattggtgtatcagcatcttttatacctgagtaaagcagaaaggtttaaggtaagtggctaagtattttattagtagaaattggttttattagggtttctgtaacttaaaaatgttacttatgctaacatagttggttttttgtttttttttttttttgcttcttttagatgatgttgacactaattagcaagggccaaaaggagctaattgaacagctgtttgaggacctttcggacacaccaaacaaccattt

SEQ ID NO: 700929 - DNA, 1442 bp, Homo sapiens
tgtattattatttaaaacaagataaatgaaacatagaaatggagttgaggcctactttgcaccttcccctagtgcaccattcctttcttccctcaagtaactgctatcctgaagttttacctatctggttcacttttttttttttttttttttgagacagagtctcactctgtcatccaggctggagtgtagtggcacaatctcggctcattgcaacctcccgctcccaggttcaagtgattgtcctgcctcagcctcctgagtagctgggattacaggcacacaccaccatgcccggctaatttttgtatttttagtagagatgaggtttcaccatgttggccaggctggtctccatctcctgacctcaggtggcccaactacctcagcctcccaaagtgctgggattacaggcgtgagccaccgcgtccaggctttttttttcttttttttttttcgagatggagttttgctcttgttgcccaggacggagtgcaatggtagggtcttggctcactgcaacctctgcctcccgggttcaagcaattctcctccctcagcctcccaagtagctgggattacaggtgcccgccaccatgcctggctaatttttgtatttttagtagagatggagtttcaccatgttggccaggctggtctcgaactcctgacctcaggtgacccaactacctcagcctcccaaagtgctgggattacaggcgtgagccactgtgcctagtctatctggttcacatttttatacttctacaacataagtacaaattcacaaataacatattctattgttttatattttaaatagtttttactaagcaaaattttacataaatgattttatactgaatgtatcattttatagcctttattttttaaamaacaacaacaacaacaaaacactattttcaagatctacccatgttgatacatggaaatttagtttattcattttgactgcaatgtaaatacacattttcatacatgtatcttcttgctcatgcaggagagtttctctaggttatatgcctagaagcagaattactgaagaaaaccttttaaaagttgaaaaatactataaccaacctctatccccatactgattatacttgtaggtgctaatattcactgggtggaaaaataacaggtgcatttggattctcagagcccttccagtacaaggtctaaaatgactatatcagggtgatgaatgcccatacatcaaggtcctttaggcctgttttctcatttttataatgaaggtaataaaaataccttcttcatagggtttctatgtggattagataaaataatatacataaagcatttagcacagtgtctggcacttagtaatagctcaatacaggcataccttgaagatattgtgggttcagttccagaccaccaaaataaaacaaatattgcaa

SEQ ID NO: 700930 - DNA, 1442 bp, Homo sapiens
tgtattattatttaaaacaagataaatgaaacatagaaatggagttgaggcctactttgcaccttcccctagtgcaccattcctttcttccctcaagtaactgctatcctgaagttttacctatctggttcacttttttttttttttttttttgagacagagtctcactctgtcatccaggctggagtgtagtggcacaatctcggctcattgcaacctcccgctcccaggttcaagtgattgtcctgcctcagcctcctgagtagctgggattacaggcacacaccaccatgcccggctaatttttgtatttttagtagagatgaggtttcaccatgttggccaggctggtctccatctcctgacctcaggtggcccaactacctcagcctcccaaagtgctgggattacaggcgtgagccaccgcgtccaggctttttttttcttttttttttttcgagatggagttttgctcttgttgcccaggacggagtgcaatggtagggtcttggctcactgcaacctctgcctcccgggttcaagcaattctcctccctcagcctcccaagtagctgggattacaggtgcccgccaccatgcctggctaatttttgtatttttagtagagatggagtttcaccatgttggccaggctggtctcgaactcctgacctcaggtgacccaactacctcagcctcccaaagtgctgggattacaggcgtgagccactgtgcctagtctatctggttcacatttttatacttctacaacataagtacaaattcacaaataacatattctattgttttatattttaaatagtttttactaagcaaaattttacataaatgattttatactgaatgtatcattttatagcctttattttttaaacaacaacaacaacaacaaaacactattttcaagatctacccatgttgatacatggaaatttagtttattcattttgactgcaatgtaaatacacattttcatacatgtatcttcttgctcatgcaggagagtttctctaggttatatgcctagaagcagaattactgaagaaaaccttttaaaagttgaaaaatrctataaccaacctctatccccatactgattatacttgtaggtgctaatattcactgggtggaaaaataacaggtgcatttggattctcagagcccttccagtacaaggtctaaaatgactatatcagggtgatgaatgcccatacatcaaggtcctttaggcctgttttctcatttttataatgaaggtaataaaaataccttcttcatagggtttctatgtggattagataaaataatatacataaagcatttagcacagtgtctggcacttagtaatagctcaatacaggcataccttgaagatattgtgggttcagttccagaccaccaaaataaaacaaatattgcaa

SEQ ID NO: 700931 - DNA, 1442 bp, Homo sapiens
tgtattattatttaaaacaagataaatgaaacatagaaatggagttgaggcctactttgcaccttcccctagtgcaccattcctttcttccctcaagtaactgctatcctgaagttttacctatctggttcacttttttttttttttttttttgagacagagtctcactctgtcatccaggctggagtgtagtggcacaatctcggctcattgcaacctcccgctcccaggttcaagtgattgtcctgcctcagcctcctgagtagctgggattacaggcacacaccaccatgcccggctaatttttgtatttttagtagagatgaggtttcaccatgttggccaggctggtctccatctcctgacctcaggtggcccaactacctcagcctcccaaagtgctgggattacaggcgtgagccaccgcgtccaggctttttttttcttttttttttttcgagatggagttttgctcttgttgcccaggacggagtgcaatggtagggtcttggctcactgcaacctctgcctcccgggttcaagcaattctcctccctcagcctcccaagtagctgggattacaggtgcccgccaccatgcctggctaatttttgtatttttagtagagatggagtttcaccatgttggccaggctggtctcgaactcctgacctcaggtgacccaactacctcagcctcccaaagtgctgggattacaggcgtgagccactgtgcctagtctatctggttcacatttttatacttctacaacataagtacaaattcacaaataacatattctattgttttatattttaaatagtttttactaagcaaaattttacataaatgattttatactgaatgtatcattttatagcctttattttttaaacaacaacaacaacaacaaaacactattttcaagatctacccatgttgatacatggaaatttagtttattcattttgactgcaatgtaaatacacattttcatacatgtatcttcttgctcatgcaggagagtttctctaggttatatgcctagaagcagaattactgaagaaaaccttttaaaagttgaaaaatactataaccaacctctatccccatactgattatacttgtaggtgctaatattcactgggtggaaaaataacaggtgcatttggattctcagagcccttccagtacaaggtctaaaatgactatatcagggtgatgaatgcccatacatcaaggtcctttaggcctgttttctcatttttataatgaaggtaataaaaataccttcttcatagggtttctatgtggattagataaaataatatacrtaaagcatttagcacagtgtctggcacttagtaatagctcaatacaggcataccttgaagatattgtgggttcagttccagaccaccaaaataaaacaaatattgcaa

SEQ ID NO: 700932 - DNA, 2495 bp, Homo sapiens
ccctattttttttaatcaaagttttaatctaaagtatctataagctaaagtgtagtctttgttttaaaacaataaygtcagtgaaaaggattctcttccaaactttttctctacctaccttttattgaaggaaggaagaaggaaagaggaggggcagaatggggaaatctgtgtatgcaggagacaatgccaaaactgttttctgaagttggttacaatttacaaaggcagcaaagaagttttagcgtggccagttcaaattctacttccaccacttaatacttgtgtaattttaagtaaattacattatctcccaacaactaagttttcccatacataaaacaggcattcactttagtttggcttagcctcagtattcagccaaaataatctttggctttggccttggcctttagaatgccaaataagcacatagctgctttgataacatttctcatagttctgcacttgtgcttgactaatgaccatttgatcatacaagtgactatcatttctacataagtaatataaataatgtgttattaggattgaatattaatatctgaatactcaaaataaatattggttggcattttagacataacaatagaaatcttttatatggtaacattttactggataactgagtcacttaagtataaatgtccagtatgttgcaagagtaaaatgctataatctttgtgatgactgtaaaagccaaatttaggtacatgcttaactttcaaataattaaataggaaaacaatttacagctaatatgaacactgagagtgctttatctatataaatttaggaagaatatatcgtttctaagcaaataagtatttataaaaatatacaaggcagattaatagaaattagattacatataattctaacctttgtagaaggctgctcaatatactagtattcatagcactacactaactttaaagaactgacctaatttttaattaatgatttaagtaaaaaaaattaatgaattaagttttaaaaaaaagtacttcttcttgacaagaagaattaaaagcagaacatcaacctcgccgtttaaaaatttcatgacaagttccaaaatctggtacaatttccataaaaacatgaaggggtttggcaagaaaacagagaaaaccgtggacctaaagcatattttcttctcaaatttttccttgtatttctaactctgttcagatcttctcaataattaaattttaaaacagcttcataaattgctttcagatgataattccttacaagttctgagtctagagacttaaactcatgaaaatggctgcttatagagaacaagatttttgagatttatccaaactttataccaaatataatgttcctcctataaaatatattactataaaactttttcctgaattatatcaatagtgatattaaagtgaatatttagaatttttaaaatacacagtataaaatatacatatatacacacggtatatttattaggagcaaactaatagctggtagtgtaggggaaattactaatcctgcattaccacgtcaaacatttaatatttgattgccaggttttgttttgttttgttttgtttttttaagcagaatcttactccgtcacccaggctggagcacagtggtgcaatctcggcttgctgcaacctccacctcccaggttcaagtgattctcacgcctcagcctcccaagtaactgagattacaagcgtgagccaccagacctggccaatttttgtacttttattttttatttacttttgagatggagtctcactctgttgcccaggctggagtgcagtggcacaatcttggctcgctgcaacgtccgcctcccaggttcaagctcagattacaggggcgcatcaccatgcttggctaattttttttgtatctttagtagacacggggttttgccatgttggctaggcttgtctcgaactccagacctcaagtgatccgcccacctcagcctcccaaagtgctggaattaccagtgtgagccaccacacccagcctcaattttttgtgtttttagtagggatggggttttgccatgttagtcaggctggtctcgaactcctggcctcatctgcccaccttggcctcccaaagtgctgggattacaggtgtgaaccaccactcctggcttcatttctgatttcttttcatttttcataacttcaatctcttaagatagctatcttaaagcactgttatctctatactccctatgattacttataatcataattcctccactttgataatgaagctgaagttaaaagaaatacagtgaattggccagtcattaaggggcagggctggatttgaacaaatctccattcagtgcccggcccttgattgctagtttttaaaaattaactaaaaatttccatttattcttgtatcccagaagttcatcatactatgacggagatacctgactttggccacctggcatttggtca

SEQ ID NO: 700933 - DNA, 2495 bp, Homo sapiens
ccctattttttttaatcaaagttttaatctaaagtatctataagctaaagtgtagtctttgttttaaaacaataatgtcagtgaaaaggattctcttccaaactttttctctacctaccttttattgaaggaaggaagaaggaaagaggaggggcagaatggggaaatctgtgtatgcaggagacaatgccaaaactgttttctgaagttggttacaatttacaaaggcagcaaagaagttttagcgtggccagttcaaattctacttccaccacttaatacttgtgtaattttaagtaaattacattatctcccaacaactaagttttcccatacataaaacaggcattcactttagtttggcttagcctcagtattcagccaaaataatctttggctttggccttggcctttagaatgccaaataagcacatrgctgctttgataacatttctcatagttctgcacttgtgcttgactaatgaccatttgatcatacaagtgactatcatttctacataagtaatataaataatgtgttattaggattgaatattaatatctgaatactcaaaataaatattggttggcattttagacataacaatagaaatcttttatatggtaacattttactggataactgagtcacttaagtataaatgtccagtatgttgcaagagtaaaatgctataatctttgtgatgactgtaaaagccaaatttaggtacatgcttaactttcaaataattaaataggaaaacaatttacagctaatatgaacactgagagtgctttatctatataaatttaggaagaatatatcgtttctaagcaaataagtatttataaaaatatacaaggcagattaatagaaattagattacatataattctaacctttgtagaaggctgctcaatatactagtattcatagcactacactaactttaaagaactgacctaatttttaattaatgatttaagtaaaaaaaattaatgaattaagttttaaaaaaaagtacttcttcttgacaagaagaattaaaagcagaacatcaacctcgccgtttaaaaatttcatgacaagttccaaaatctggtacaatttccataaaaacatgaaggggtttggcaagaaaacagagaaaaccgtggacctaaagcatattttcttctcaaatttttccttgtatttctaactctgttcagatcttctcaataattaaattttaaaacagcttcataaattgctttcagatgataattccttacaagttctgagtctagagacttaaactcatgaaaatggctgcttatagagaacaagatttttgagatttatccaaactttataccaaatataatgttcctcctataaaatatattactataaaactttttcctgaattatatcaatagtgatattaaagtgaatatttagaatttttaaaatacacagtataaaatatacatatatacacacggtatatttattaggagcaaactaatagctggtagtgtaggggaaattactaatcctgcattaccacgtcaaacatttaatatttgattgccaggttttgttttgttttgttttgtttttttaagcagaatcttactccgtcacccaggctggagcacagtggtgcaatctcggcttgctgcaacctccacctcccaggttcaagtgattctcacgcctcagcctcccaagtaactgagattacaagcgtgagccaccagacctggccaatttttgtacttttattttttatttacttttgagatggagtctcactctgttgcccaggctggagtgcagtggcacaatcttggctcgctgcaacgtccgcctcccaggttcaagctcagattacaggggcgcatcaccatgcttggctaattttttttgtatctttagtagacacggggttttgccatgttggctaggcttgtctcgaactccagacctcaagtgatccgcccacctcagcctcccaaagtgctggaattaccagtgtgagccaccacacccagcctcaattttttgtgtttttagtagggatggggttttgccatgttagtcaggctggtctcgaactcctggcctcatctgcccaccttggcctcccaaagtgctgggattacaggtgtgaaccaccactcctggcttcatttctgatttcttttcatttttcataacttcaatctcttaagatagctatcttaaagcactgttatctctatactccctatgattacttataatcataattcctccactttgataatgaagctgaagttaaaagaaatacagtgaattggccagtcattaaggggcagggctggatttgaacaaatctccattcagtgcccggcccttgattgctagtttttaaaaattaactaaaaatttccatttattcttgtatcccagaagttcatcatactatgacggagatacctgactttggccacctggcatttggtca

SEQ ID NO: 700934 - DNA, 1847 bp, Homo sapiens
acccacaataggatcaaaagaaagctctgtcctttgttctcctttaagacaaatgttactctatttgcaggaatatttggacaatcagaaagacaacttagttggtaaaaaacatagtctggtagaataaacaaagacagtttacccatctggtttcaaatatatatttcactagttactagctgatgttatctaatttaaataaaatcacgtctcataagatattaatacctagtctattacaatgttttgaatttctggctaaatcacatttactaatgtaaagttaggaatcagtaagtgacaaatgtaatattattgaggaaaattttgaaataaatatttcatctttatgccagttataactatgattgaattagcagtggattaagattgcatagtacactcatgtcacataatttatccagcttggaatctcattatgtccaaattttaaagcaaaactttaggtaatgttagagaaaagcaaatgagatgccctggactattatagatcttataatgctcatcaagaagaaaacagagatgtgactcttctattgttctgtggacatcctactcattttcttcacaactattgaggcttatattagtctttctcttcaaaataagtttttgccatcatggaagtccatatgaatgactagctttgacagttttgcttcaattttttttttactttcgtatatatggggagttttatttccaattaatattagctattcatgtttatgcatgcatctagaattatgttttcctgatgtacttatttcaaacatcttataatccagtattctctgaaataaatcattgtgatctcatttcaataatatcattctttgaacaactatcagcttcaacctccatacgacaataaataacttgcttttttctactaacttttcaacttaggcctgctttcattggcttcccttcttagtgacagtcccatataatctaaatgctcattttgttatttaaggttaaattgttttagggattaaaataatctaagatgaagtcatttttaccaaatacactatatttctattagttgtagtttcaataaaacagagaaaaagttagttaattttatattttataattcttctcagttcacactcactactataggaacaccatcaaagttctttgcaaaagacattttgatcccaactttctctaaatgtgtaaaccttgtagaagtctataggttcaaataaatgttgactgtatctctgtaaatattcttcacaggttttcaaacttgaagaatcaactcccaaactaactcaaagtattccataaaaattcagtaatttccacatcacagtttaatctgatttattaacttttmcaaatgtaaaatatcattaattttatatacaggaaattaaaatgcctctgaatatcattattttaattagtagtttaaaaatatagcaagtgaatgttcttcaggttctattttgaaagaaatgtcagaaattgaatattttacacgttagtcaatgctttccttaacttttaattacaactattattcaaatagttacatgcacatttcaaaaatatttgccataatgttgtattttcttagtttgtatgttcatatctttttcttgcaataaaggaaaaatgctacttttagaaagatacaagtgagtgttttcccaccagagctaaaatttctgttttaacacttagtcatacagtaaaaaagatggatgcatttcctgtgcagccatttaccatctggttaagcaaatatacttaaagatacttctgcttttgtgatcaagtgacaacagatctaagagcagaca

SEQ ID NO: 700935 - DNA, 1847 bp, Homo sapiens
acccacaataggatcaaaagaaagctctgtcctttgttctcctttaagacaaatgttactctatttgcaggaatatttggacaatcagaaagacaacttagttggtaaaaaacatagtctggtagaataaacaaagacagtttacccatctggtttcaaatatatatttcactagttactagctgatgttatctaatttaaataaaatcacgtctcataagatattaatacctagtctattacaatgttttgaatttctggctaaatcacatttactaatgtaaagttaggaatcagtaagtgacaaatgtaatattattgaggaaaattttgaaataaatatttcatctttatgccagttataactatgattgaattagcagtggattaagattgcatagtacactcatgtcacataatttatccagcttggaatctcattatgtccaaattttaaagcaaaactttaggtaatgttagagaaaagcaaatgagatgccctggactattatagatcttataatgctcatcaagaagaaaacagagatgtgactcttctattgttctgtggacatcctactcattttcttcacaactattgaggcttatattagtctttctcttcaaaataagtttttgccatcatggaagtccatatgaatgactagctttgacagttttgcttcaattttttttttactttcgtatatatggggagttttatttccaattaatattagctattcatgtttatgcatgcatctagaattatgttttcctgatgtacttatttcaaacatcttataatccagtattctctgaaataaatcattgtgatctcatttcaataatatcattctttgaacaactatcagcttcaacctccatacgacaataaataacttgcttttttctactaacttttcaacttaggcctgctttcattggcttcccttcttagtgacagtcccatataatctaaatgctcattttgttatttaaggttaaattgttttagggattaaaataatctaagatgaagtcatttttaccaaatacactatatttctattagttgtagtttcaataaaacagagaaaaagttagttaattttatattttataattcttctcagttcacactcactactataggaacaccatcaaagttctttgcaaaagacattttgatcccaactttctctaaatgtgtaaaccttgtagaagtctataggttcaaataaatgttgactgtatctctgtaaatattcttcacaggttttcaaacttgaagaatcaactcccaaactaactcaaagtattccataaaaattcagtaatttccacatcacagtttaatctgatttattaacttttccaaatgtaaaatatcattaattttatatacaggaaattaaaatgcctctgaatatcattattttaattagtagtttaaaaatatagcaagtgaatgttcttcaggttctattttgaaagaaatgtcagaaattgaatattttacacgttagtcaatgctttccttaacttttaattacaactattattcaaatagttacaygcacatttcaaaaatatttgccataatgttgtattttcttagtttgtatgttcatatctttttcttgcaataaaggaaaaatgctacttttagaaagatacaagtgagtgttttcccaccagagctaaaatttctgttttaacacttagtcatacagtaaaaaagatggatgcatttcctgtgcagccatttaccatctggttaagcaaatatacttaaagatacttctgcttttgtgatcaagtgacaacagatctaagagcagaca

SEQ ID NO: 700936 - DNA, 586 bp, Homo sapiens
cgattttttaaaaaagatgtgcaacatgtatacctatgtaacgaacctgcacgttctacacatgtaacccagagctttaaaaaaatgtgcaaaataaaattgtgttgaggaaaaaaaaagtctaaggaaaatgtcttcttttccttaaaatatatctaaattgtccatgtctctatgaagaagataaaaatagcatgatctaacccactgagtcatgctgtgcttcctcacatctgtgttctgttgctttatcaatgtgtaaggaaataagctctagtttattaaattttttaaacagaaaaaaggaaaaaaaaagataacccacataaacaaatgttttgtcttgttttttgaagtcctcaataattttttgttgttgttttgagatagggtctcactccatcactcaggctgsagtccagtggtgcaatgttgattcactgctacctctgcctcccgagttcaagcgattctcccactacagtctcccaggtagctgaaactacaggcacgctccaccacacccagctaattttggtattttttggtagagacagggtttcaccacattggccgggctggtctc

SEQ ID NO: 700937 - DNA, 1798 bp, Homo sapiens
ttagaggctcaaactggatttcttctatactttttccactgtaagctttcagttttcatgatctggaatttgtccattgcctttcaacttccaacattttgttgttgttgtctcccctcaaattctctttgtccttgagaatgtatgcccttaaaaacacctttactttcattttagtatggtgtcagtgaggaagctgtggtaatcatatatgttcagttcatcaactttagttgaaaagcccccattaaactgtgacgtaaatataatgwctttcttggagtcatccatataatggaatttgaaagtgttggaaataagcttctatcataaaaattcattcaaacaacatcagtgacagagaagtgttcacataaaaatgatatttatgtatatgttgttctaaatctgctctaagtaacaggaaaaaagatattctctatagaggtaaaaaggcatttgtttatattgactagtagctaaggaaaaagtgaagtatcttccttttgtccatgtctactgagttttagttcagattttttcataactagatatagctggttttctatcactaccaaatggagaaagcccccgagagagagaaatatcaaccaaagctaggaacctgagtctccacaataaatccaaaggtaatattaattgagtttggattatgtgggtgattaggccacatggagtgccatgatgctcatctccccaacagccatgacccccgacccctgctgcacagcagcccgtgcttcaaagggcattggcgccaccaacatctccgaaaatgcaagtcaagggaatccctttgaacttgtcacagggctcaggtgactgaggccataagactgccaacacatggcattataccggccacaagaattggcactaaactcaaatcacttccctgataaattgaagaaaggcatttcttctccttgggcattttcaagaaagcaaacagcccagcttacttttggcagcatctctagacctgcgaagaaagccagcactgggtggaagacaacaatttggatggcagagcagagaagcaagaaaaaaaaacaaagaaagaaataaaacaactagattcttgatcaaaaatacagaagcctggtctacctctgtatttttcaacatatgactcaataagccgctgtgtttccaaagttagattaaattgggtttttcctctactgataaacctcatcatatgtctgtattatctagcttgtctactaccattatacagtgtattgtggtgggaaaatatgttctggagcttgcctacatttagttaaccagttattcagttaaccagctataacagttacccagttataagagtgttaaaacgggtctgagactaaaattcaaaacttactaatacattcaccacagggacttatttgcagttgagtaaactcctcattttcaacagttatttttattttatgaaaataacaaatatatgtgtgtgtgtgtgtgtgtgtgtgtgtgtgtattccgcccaaccccccagagacagcatttcctttcctctctgtccttgctgatagtagctatgcttaggcataacctttaaaagccatttactatatcaccaaaatgaggactgtcaagtcataaccatcagaaaaagaggaaagaattctcatattccaacaaagcacacttaatttaagaaaataaacacagatgcagaatattcctccacccagagaattgcttgaaagcatttttgaacattactgtcctaaagatgagtatgttattgattaaataacac

SEQ ID NO: 700938 - DNA, 1798 bp, Homo sapiens
ttagaggctcaaactggatttcttctatactttttccactgtaagctttcagttttcatgatctggaatttgtccattgcctttcaacttccaacattttgttgttgttgtctcccctcaaattctctttgtccttgagaatgtatgcccttaaaaacacctttactttcattttagtatggtgtcagtgaggaagctgtggtaatcatatatgttcagttcatcaactttagttgaaaagcccccattaaactgtgacgtaaatataatgactttcttggagtcatccatataatggaatttgaaagtgttggaaataagcttctatcataaaaattcattcaaacaacatcmgtgacagagaagtgttcacataaaaatgatatttatgtatatgttgttctaaatctgctctaagtaacaggaaaaaagatattctctatagaggtaaaaaggcatttgtttatattgactagtagctaaggaaaaagtgaagtatcttccttttgtccatgtctactgagttttagttcagattttttcataactagatatagctggttttctatcactaccaaatggagaaagcccccgagagagagaaatatcaaccaaagctaggaacctgagtctccacaataaatccaaaggtaatattaattgagtttggattatgtgggtgattaggccacatggagtgccatgatgctcatctccccaacagccatgacccccgacccctgctgcacagcagcccgtgcttcaaagggcattggcgccaccaacatctccgaaaatgcaagtcaagggaatccctttgaacttgtcacagggctcaggtgactgaggccataagactgccaacacatggcattataccggccacaagaattggcactaaactcaaatcacttccctgataaattgaagaaaggcatttcttctccttgggcattttcaagaaagcaaacagcccagcttacttttggcagcatctctagacctgcgaagaaagccagcactgggtggaagacaacaatttggatggcagagcagagaagcaagaaaaaaaaacaaagaaagaaataaaacaactagattcttgatcaaaaatacagaagcctggtctacctctgtatttttcaacatatgactcaataagccgctgtgtttccaaagttagattaaattgggtttttcctctactgataaacctcatcatatgtctgtattatctagcttgtctactaccattatacagtgtattgtggtgggaaaatatgttctggagcttgcctacatttagttaaccagttattcagttaaccagctataacagttacccagttataagagtgttaaaacgggtctgagactaaaattcaaaacttactaatacattcaccacagggacttatttgcagttgagtaaactcctcattttcaacagttatttttattttatgaaaataacaaatatatgtgtgtgtgtgtgtgtgtgtgtgtgtgtgtattccgcccaaccccccagagacagcatttcctttcctctctgtccttgctgatagtagctatgcttaggcataacctttaaaagccatttactatatcaccaaaatgaggactgtcaagtcataaccatcagaaaaagaggaaagaattctcatattccaacaaagcacacttaatttaagaaaataaacacagatgcagaatattcctccacccagagaattgcttgaaagcatttttgaacattactgtcctaaagatgagtatgttattgattaaataacac

SEQ ID NO: 700939 - DNA, 606 bp, Homo sapiens
ttttttttttttgagacggagtctcgctctgtcacccaagctggagtgcagtggcacgatctcagctcactgcaacctctgcctcctgggttcaagcaattctcctgtctaagcctcccgagtagctgggactacaggtgcatgccaccacgtcaggcaattttttgttatttttagtagagatggggtttcaccgtgttggccaggctggactcgaacccctgatctcaagtgatacacctgccttggcctcccaaagtgcaaggactaccaaygtgagccatcacgcccggccctcatttttgagttaagttccttgacacaccaattaaaaacattttaaggagtggccatttccctgatttaactcattaattcgacaaatatctattgagcagctactatgtaccagatactgtactaggcattgcagagtcaacagtgcacaaagagatatggtcactgtcttcacaagggtcaggtgggagacaccaacagcagcaaatcaaatcaacaaacatcacacagatggagatgaatgcagtgaaggaatgtacgtggcactacaggcacacgtggaagtggcttgagctacatctgatgggc

SEQ ID NO: 700940 - DNA, 1694 bp, Homo sapiens
cggtggctcacttctgtaatcccagcactttgggaggccaagatgggtggatcacctgatgtcaggagttcgagacaagcctgaccaatatggtgcaaacccgtctctagtaaaaataaaaaaaaaatagccaggcgtggtggcgcgtgcctatagtcccaactactcaggaggctgaggcaggagaattgcttgaacctgggaggcggaggttgcagtgagctgagatcgcaccattgcgttccagcctgggcaacagagctagactccatctcaaaaaaaaaaaaaagttaccataaaatatttatattaaaaattgtgtagctacttttaaatatccaaccctctgcattatcctttgctatggactgagctgtgtccctcccaaatccaaatgttgaggccctaacccaccgtgtgattatatctggagatagcatctttagggggtaaagtcaaataaagtcataagaatggaaccctgatccaacaggactatggccttataatagaaagcaagagaaagatccctctctctctctctctctctctctctctctctctctctgccatatgacaatacagtgagaaggggtctatctgcaagccagaaagagagccctcactacaacccaaccatgctggcactctcatcttaaacttccagctcccagacctgtgaaaaactaaatttccattgtttaatgcatccagcctatggtattttgtcatggcagctaagctaatacttcttagtctattctgaagcttgggcttagaatttgcattattcctaaagctatcaaagaaaatataggaatatgatttctggcctaacagccagggaaacgccctcactttcctagaagaatattactttagaagcagaatattatatgctctatatctcactgtccaaattctgtttatcttcttttcatgttttaggttttcatttcctcaggaaagcccttctcatctagtactaacaaaagtcattacgtgctcagccttgagactttgagccttcctcttgagcagctgtttgtaaaagaaattatgaagagaaaggatgaaaatgctgttggcacagatataaaatgagataaattcaataacaaagccatttagaaagatttttagacaatgtgaggactgaaaatattcacaacaatattaatacaatataattgtccttttctgttttacgttatcataaaaaatcagttcctgccctgtgtttatagcaacagagtatttgagagcacctgggctgcagagattactgctctatcccatgaaacaaaacattaagagtataaaagtctgacttaartagtcaaactgattgccccagacaataaggttcaaatttgcatttctgttttctgaaagtttaaacaggtatttctttgttagcttggagagcttagtaatttcccttttttccagtcacatctaggttaaataatgtgatgaatctgctagtcttcttagtttgaatcaatgagttttactgtcacattagaaatcaaatggagaaaaagcaacaccaaaactcttcagctcctcatctatggagttaaaaccttacttcctgccattccactatcctttgaggccttgaaagaaagagtccagtctgagcttacacttcccattcttacactttagataaatgtacacatacaaaa

SEQ ID NO: 700941 - DNA, 1581 bp, Homo sapiens
caaactaataaaatataaactacatgaaaccaataaagtatatactataggaaaagagcaaaaaaacctcattggttgttaagaaactacataaattaaattttgcaaacactaacaaaattaatattttcttgattgaaaaataagacttgtgaaagcaaattctaatgcaaccttaaaatgcctgactgctggcctgtctccaagaatatagactcttctcaatgttccttgaaatagctctgtgtgttgataatgctacatgatgttaatctgaaatatgttacaatctccataatgacacttagactcacaacacaagcagatcagagaaattattccaacaaaaatagtctcatctatttttaattttctttcgttaaatcttacctcatactatttaaatgtatctttttcattctcttctgtcctattctccataaaaatacatgaatgtattcattcytcactcttgaacaagaatttgactgcatactctccaagctgatgtcatgcctcttccacatcatgcctctccctccatgatagaaggccttataagattgggttatttgttttatttgttattctatttatattcatcaattatctcaagcagaataagtgtagtcaaaaatctcaatcacactgttagtttttaaatgttttttaaatcttaaggatatgggaaatagaacatttgcctaatataggactattaattaaagaatggtgatgtaaattggttgtcagtaacatgtatgcatgttacttgaaacagaatccttctgatctccatcaacactttatttaattttataagctaagatactgagataataaaaatggggacgaggaagaaaaagccagcgccatgtaacaaaagaacaaatttcctaacacagttctaagaattttgaggatatagacatgtatcttcattgggcttcatcatttatgtttggtataaactgtgataaacaagatataaaaatatgtgtcagaggtgttaatacttcattatacattcctaaatatgttttgcttgacatatatgttcttttaatttgtattaaaaattggccctcttgagatattcatttcttaattaatcaagacaaacatcacatttcccttcctagctatttctatctatgtgtgaaaaataaatgtcatgcttcaccaaaatgaagtacttcccaaagtgcatttagctctattaattctacactatgtcaatagatgcctaaaaaactgtaaaattaatgcctaaggttgatttaaacaaagttaagttttctttcattctggacttttaagaaagtaagttttatatggtaagatgcattttgaatttaagtaggaaggcattatgtatggcttctccaacattatttgtccaaaaaacccctcccatttgaagttttcttactttactttgaaatatatttctctacttctttttgttctttaatatgtctcttctgagcttttgtatgagaatatgaagtgttatataatgaatgattaatttatttaacatactttttattttgtacatactactggtcctgcatattg

SEQ ID NO: 700942 - DNA, 1581 bp, Homo sapiens
caaactaataaaatataaactacatgaaaccaataaagtatatactataggaaaagagcaaaaaaacctcattggttgttaagaaactacataaattaaattttgcaaacactaacaaaattaatattttcttgattgaaaaataagacttgtgaaagcaaattctaatgcaaccttaaaatgcctgactgctggcctgtctccaagaatatagactcttctcaatgttccttgaaatagctctgtgtgttgataatgctacatgatgttaatctgaaatatgttacaatctccataatgacacttagactcacaacacaagcagatcagagaaattattccaacaaaaatagtctcatctatttttaattttctttcgttaaatcttacctcatactatttaaatgtatctttttcattctcttctgtcctattctccataaaaatacatgaatgtattcattcctcactcttgaacaagaatttgactgcatactctccaagctgatgtcatgcctctyccacatcatgcctctccctccatgatagaaggccttataagattgggttatttgttttatttgttattctatttatattcatcaattatctcaagcagaataagtgtagtcaaaaatctcaatcacactgttagtttttaaatgttttttaaatcttaaggatatgggaaatagaacatttgcctaatataggactattaattaaagaatggtgatgtaaattggttgtcagtaacatgtatgcatgttacttgaaacagaatccttctgatctccatcaacactttatttaattttataagctaagatactgagataataaaaatggggacgaggaagaaaaagccagcgccatgtaacaaaagaacaaatttcctaacacagttctaagaattttgaggatatagacatgtatcttcattgggcttcatcatttatgtttggtataaactgtgataaacaagatataaaaatatgtgtcagaggtgttaatacttcattatacattcctaaatatgttttgcttgacatatatgttcttttaatttgtattaaaaattggccctcttgagatattcatttcttaattaatcaagacaaacatcacatttcccttcctagctatttctatctatgtgtgaaaaataaatgtcatgcttcaccaaaatgaagtacttcccaaagtgcatttagctctattaattctacactatgtcaatagatgcctaaaaaactgtaaaattaatgcctaaggttgatttaaacaaagttaagttttctttcattctggacttttaagaaagtaagttttatatggtaagatgcattttgaatttaagtaggaaggcattatgtatggcttctccaacattatttgtccaaaaaacccctcccatttgaagttttcttactttactttgaaatatatttctctacttctttttgttctttaatatgtctcttctgagcttttgtatgagaatatgaagtgttatataatgaatgattaatttatttaacatactttttattttgtacatactactggtcctgcatattg

SEQ ID NO: 700943 - DNA, 1516 bp, Homo sapiens
tgagaggttattaaaatttctcaaagttgagctagatgctgtggctcatgcctgtagtcccaactgctcgggagactgaagagggaggatcacttgagcccaggaggtccagactatctaaatatgtggtactatatactaaatacatggtactatatttaaggctacagtgagtcataattttgccactgtccagcctgggcaacagagtgagatcctgtctaagaaaagacagagaaagagaaagagagaaagaaagaaagaaaaagaaagaaagaaaggaattacacaaagtaataattgagaacatctccaaactgttaattgcaatgagctaaagtatacctattttatattttgaaaactgaatgaacatctttttttatttatatatttattttattttttttttgagaccgagtctcactctgtcaccgaggctggagtgcagtggtgcgatctcggctcactgcaagctccgcctcccgggttgacgacattctcctgcctcagcctcccgagtagctgggactacaggcgcccgccaccacgcccggctaattttttgtatttttagtagagacggggtttcaccgcgttagtcaggatggtctcgatctcctgaactcgtgatccgccctcctcagcctcccaaagggctgggattacaggcgtgaaccaccgcgcccagcatcttttttttttcttttttttttttttttccattaacagatttggcttctctagttacctaaaatggagcaatgatgcaaaggtatagtgatggaatgagtcacgctaatgagttccttccaggcaataactccattttatttgactttatttctttagaactaatgggtcactggctaagaaatacaagataaaaactaaatgtttaaataatgatattgaactgagtactaaggaacataatcgtccgagccagacagccttatttcaatttctggagccatcatttacatgttgagttgtctagaaaaaagttatccaatctatcagagccttattttccctttctttaagataagaatgccccaactttctcaggttgttgtaaagattaaatgaggttatgtaaatattgaataaatgttggcataggagcatatggtcagtacttcactagtgacagctgttgtgagtaaactcctctggtttttaggacgctcctactccccaggactactccctaaacctcaactaaaatgccacgtgccccaggaaggctatgtcacctatccctaggctaaattgcttctcttctctagtcactttaagaccattaattttatttagagtaattattattgcacatacttgcaatttttatatttttgcttttgtgcagtaaaccaccatggcacacgtatgcctatgtatcagacccgcacattctgcacaagtatctcagaactcaaagaaaaaaaaaaagaaagaaaacaaacatatatttaataatgcaatatggtgactacagtcgataataaytgta

SEQ ID NO: 700944 - DNA, 2326 bp, Homo sapiens
tcttaatgttgtgggattttacttaacttaagaatcctggctgggaatttttttcttttttgcttttttactaaaatgtacttattatttcactgggaaaaagtgtacattaatatagcaaacattgtgctctaaagctgctaaataacgatttcaaactactgtgtgaataggggaaaatgtgtttccctattaatcacccttaagttataaagaaagatattttatatatttccattgatatgacaatcaatgggagtatttcctaatgttttaattgaacaccttttgttcaattaaaaggagacaaaaaggtatctgactctgtaagatttcaaggtaaggaggctaccttctgtgcagaatagacttttctatagatattttaaggatcctcattagggagtgcacttgagaacaatacctacaaaggtgtaagagacacaagacagggcagaggaagaaggtgaactctgatgcccttatgccagccatgccaaccaatctaataaggagttgacctctcaggcattacctcaaatgagccacagggatttggcatttgtgtgtttgtatcagcaagtccctggatgcaagctgctcccaggtaaagggactaaccttgggaaaggtattccctttggtcagggcaatttctggggaaattgccttgatccttcaatatctaaaatgatttttaagaattaaaatgatttaagtatacttttatttgatattattgtcttgtagtgaatacaactcctcttaagtgttttccaggagtcttatcctgggatacgctttggtgataaagagatgactcaggcattgtgatttttgctctcaagaaagaatgctgtaagaagaaatgttatgcttctatgcaaataagtgcaataaaaatgggcttaaatgagtaatttcagccacagagatgactttcctccttgaggcacatggcaaaatctggagacatatttgcttgttgaaatttgatgggatgctactaccctgctagagatcagagtcctgagatgtggctaaccgtcttcagtgagcgatccctccaaaccgctcaatcaacagtccctcaaaataaaatttttctaaacccaaatgtcagtagcgctaacgttgaaaaccctgacctagattctttgactaaagtatgtattggacacagtaaaatagacagaaatattgagttttgtttaaaaatgactaatagaagaagtaatagaaaggtgttctttatgtggggaaggtgggggatagaattccaggtatagcaataaggacaaagatgcatgaaatagtcaatgtgtctggaatgctgtgagcagaagagtagttcaggttgatgtcataggcttattcaacgccagagaaataaatttagatttcattctaagtgttgaacaaaggtatgggttggtttaatgctagttggcctgctttccttaacctagtaatctctatgcacacaacatttgccttcttttattggatgttctcttatctcctttatttttatttttttttaagcaaaagcaagtttcttagagaagtaaagaaacaacaaaaacaaaaaatgactactcyatagaacgagcagtaatgagggctgcaggttgggatgatgatctcttatctatcgcattcaccctactccctggcttctgattaggcattggacatttccattctggagtagagtctggtatgatgtctcttttatagctcctcagatctgaaatggatagaagaagaaagaaaattattgacaagtcagaaacattcaatgtaagagaaattaaccagttacttgtgggttagtgtcataactctcttatgctgatgtacgttgaatcaaagactacttccgtctttaaaaatttgtatggagagtcacattttgacaggctaaactttctctcccattccccttacgtcttcattaactttggtatctgaactggcacattattttttaaagcccacttaaatcagtgagtgttagtattctaaatagataactatcatcatccctctgaactagaatgtgttgcttccttatcaatagtgtattacctttaaaaagcattactccttggtatgcaggtcaactgcagaatttctatcaggaaagagaggagacatctgggtctaaagaatcactgaaatttattccattggtttgtatgtatcaacaaattatttaaaatacttacaaattggtacaatcttctgatgataatatatatataagtcttgcctgacttttattttttgaccaccaagcctacttggaatttcttgtgaaata

SEQ ID NO: 700945 - DNA, 797 bp, Homo sapiens
ctttaacatgtggcctcagtagggctaatattaaatatcatgttaagaaaaatttggctcaattgaattaatgacattagatacatggttgtcagcttggttgataccaaattattggctagtgtgggactcaagctttttaagatatcttaccctgggtaaccatttgtgtatccttgaataattgatacatgaaataacaggaaaacgtaacagaaaaaaaaatcactatgcatttagatatggcggtaaataatgagcaataaggaagctgacctgtataaaacattttactttaggaaaaattatgctataagtgaatcaggttttgaaaatttatcaaatatattttaaaatgttgttatatttacttatttttctgagttctctgccaaaactggtatctgcatattatgaaatttggtttgtgatgaaaattataaygcttgctacatttcaatattaaagcacttagttttagaaaataaaatacttttctgcagccttcagaaacaattacttttcatgagtcgacagagtttttgattgagtctgtcagaaaaacttgcaaagttatcttgctgtaataaatgggatactcagattctaatttccataaaaatagattttagaaaataacaattctgggatttattgaattttctagcaaagacttgtaattatctcatacataaaccaaaagtagtgcttattacaagtgacaattttaatcatttgctgattttgttgatgtttaaagctgtatttgcagtttacatttaaatgacaagatttta

SEQ ID NO: 700946 - DNA, 797 bp, Homo sapiens
ctttaacatgtggcctcagtagggctaatattaaatatcatgttaagaaaaatttggctcaattgaattaatgacattagatacatggttgtcagcttggttgataccaaattattggctagtgtgggactcaagctttttaagatatcttaccctgggtaaccatttgtgtatccttgaataattgatacatgaaataacaggaaaacgtaacagaaaaaaaaatcactatgcatttagatatggcggtaaataatgagcaataaggaagctgacctgtataaaacattttactttaggaaaaattatgctataagtgaatcaggttttgaaaatttatcaaatatattttaaaatgttgttatatttacttatttttctgagttctctgccaaaactggtatctgcatattatgaaatttggtttgtgatgaaaattataacgcttgctacatttcaatattaaagcacttagttttagaaaataaaatacttttctgcagccttcagaaacaattacttttcatgagtcgacagagtttttgattgagtctgtcagaaaaacttgcaaagttmtcttgctgtaataaatgggatactcagattctaatttccataaaaatagattttagaaaataacaattctgggatttattgaattttctagcaaagacttgtaattatctcatacataaaccaaaagtagtgcttattacaagtgacaattttaatcatttgctgattttgttgatgtttaaagctgtatttgcagtttacatttaaatgacaagatttta

SEQ ID NO: 700947 - DNA, 797 bp, Homo sapiens
ctttaacatgtggcctcagtagggctaatattaaatatcatgttaagaaaaatttggctcaattgaattaatgacattagatacatggttgtcagcttggttgataccaaattattggctagtgtgggactcaagctttttaagatatcttaccctgggtaaccatttgtgtatccttgaataattgatacatgaaataacaggaaaacgtaacagaaaaaaaaatcactatgcatttagatatggcggtaaataatgagcaataaggaagctgacctgtataaaacattttactttaggaaaaattatgctataagtgaatcaggttttgaaaatttatcaaatatattttaaaatgttgttatatttacttatttttctgagttctctgccaaaactggtatctgcatattatgaaatttggtttgtgatgaaaattataacgcttgctacatttcaatattaaagcacttagttttagaaaataaaatacttttctgcagccttcagaaacaattacttttcatgagtcgacagagtttttgattgagtctgtcagaaaaacttgcaaagttatcttgctgtaataaatgggatactcagattctaatttccataaaaatagattttagaaaataacaattctgggatttattgaattttctagcaaagacttgtaattatctcatacataaaccaaaagtagtgcttattacaagtgacaattttaatcatttgctgattttgttgatgtttaaagctgtatttgcagtttacrtttaaatgacaagatttta

SEQ ID NO: 700948 - DNA, 2626 bp, Homo sapiens
tttttttttttttttgagacattgtctcattctgttggccagggtggagtgcagtggcatgatcttggctcactgcaacttgcgcctattgggttcaatcaattctcctgcctcagtctcctgagtagctgggattacaggcacgagacaagcaccacaacacctggctagtttttttgtgtttgttttttgtttgtttgtttgtttgtttgttttgagacagagtctcgctctgtcaccccggctggatggagtgcagtggcgtgatctgggctcactgcaagctccgtgtcctgggttcatgcctttctcctgcctcagcctcccgagtagctgggactataggcgcccaccactacgcccagctaatttttgtatttttagtagagacggggtttcactgtgttagccaggatggtctcgatctcctgaccttgtttgctttttgtatttttagtagacatgtggttttaccatgttgttcaggctggtctcgatctcctgatttcatgatcctcctgcctcagcctcccaaagtgctgggattacaggtgtgagccaccgtgcctggcctggttaccagaattctaagttctgttagggtctgttgccaaggaagtgaggttgcttctttaaagttccatcccctcagcctcctccttccagaagacctactcaggaccccagtgggctgctgactgctcatcctccccacaggtcaactccttacctgtacacagttatgtccacccagggcctacttggacacctgcacctgatgttcaccaggggcctaggaatccacttggggcctgggatcctacaggggcctaatgttaccctgcagattgagtagccacctggggaccaggtatcaacctggggactgtggttgacctgtgggttaatgtccacctggggactggttattcagctgaggcctgatgcgtacctggggccgaatgtccccctcagggtgaattccacctcagacctgtatgtccacctggggcctgatgtctgccttagatctatgtcccactggggccttgtgatcaccggggactggtatccagctgtggcctgatgacctactgcatcctgttgctcacctacggcctggtgtctacctggggcttggtgatcgcctgggaactggatatcaacctggggcctgggtgtccacttaaggcctgatgtgtgcctggggcctgactgtccacctggggactggatgtccaccttgggtctgatgactacctgaagttaggtatctacctaaggcttggtgtctacctgtggcctgatgtccacatgagtctggggttcagttggggcctgctgtacatctgggaccttggtgtctatctaaggcctgatgtctacctggtgactgccatcctcttgaggcctgatatccacctgggaatggtttatccatggaaatggttatctccgcctggggctggatgttgcccaggggctagatgtccacctgtggccctgtgttcacctagggcctgatgtccacctggggcatggtgttcacctgagacccgggtatttacatagggcctgatgtccagctggtgcctaggtgcccactgggggccttgtgttaacctggggactggtatccagctgggtcctaatgaccacctgggttgaattattcacctagagtttggtattcacttagggcttgagtgtcagccttggacatggtgtccacctgggccttggttatcaaacaaggggtttggtatccagttgagacatcatttgcacctggggtctgagtgttcgcatgaggccagatgaccactgggggcctgaatgtcaacctggtgtctgaaattcactggaagcctaggtatctagctggggcctgatgtccacctgggactaggtgtcaacatgtggcctgatgtaaacctctagttgagtgtccaccttgggcctgatgtccactgggggactgatgttcccctttgatctgatgtctacctggaaactgtgtattcacccatggcctgatggtcacctggggttgaatgtccaactgtggccagatgtgcacccggattctgggcatccacctggggcctgatgttcagctggggcctggagttcgcctgaggcatgatgcctacctgaagcttaatgttcatctgagtgctggatgttcacttggrgcctgatatccacctggacccttctcaggcctgatgtccacaggacccttctcaggcctgatgtccacaagttggcctggtattcatctggggccttcgtgttaacctgtggcctaatgtactcctgggttctagtgtcctcttgggacctgatgtctaccaggatccaggtatccacctggggctcggtatccacctagggcttgatattcacctggggcctaggaatccacttgataactggtgccatcggggtcctgatgttcaccttgggactgggtaaccacctgaggcctgatgtccacttagggcataagtgtttatctggggtctagtgttcacataggggctgatgtcaaccttgagactaggtattcaccaggggactaaaatccagctggggccagatgttcgcttggggcctggtgtca

SEQ ID NO: 700949 - DNA, 1337 bp, Homo sapiens
tttacctcactagggatatatatttacatttcaagagaagatgagacccagtagatgcatcccagaagttacaaagccggagagtctagtgttatctttcccctagagagatttatttttatccaaatggttagagtaagaactcagatttttttccgttttgtgactatggagacacactcagaagggggtcagagcaactgggtcactcttccacaaaaatgctcaggttcttttttccagagttctttgcctacagcagatccccttacatgtaggacatctggttctcaccacatcaccaccacggtaagaattagtggaaaggagagctaggttaagggcagctgtttctttccttctctgcagcctctggtaccaagtactgcatgacatgtgtctcacaacattcctgcctctgcacctctgtgctacgacactggatgaatctatggagtgagcaatagaaagtctctgaactgccagaaacaacttcattttacatggaagtggctttaaatcaagcacattaacctcaatgaactgaaattaaatatgtctctattcaacttccccttagctgaaactaaaagtgctgtaggctggacccgcactacctgacagggagataaatgactaaaggcaaatgggagtcaaaacaggtgtggcttttcttatttttagttaagcatcttacatagcaaattttgcaaaactcttatgaccccgagaaaggcccatacacattaaaggtcttaaagatttaactttcttatctttaacgtaagctttccactggattttcccattacactcattccataaagaaatgaaataatcatgtatctcattatataattatactaaattgatctcaacacattttcttagcaatatataccaacattgtttccaatattgtttattacaaatgatgctacagttgaaatctttatatctgaacgcttgtgtgtgtgtgtgtacctattctgtgtataacactgattttatttatttgtataggcctggaagtggaaatactgtgacataaaatagaggcacagcaaattattcaagatgtygacaaacagcattgtttccaagtttttgttcccttacaatccttgccattggccaatctctcagaatcccgtgttgcttaacatttagtagcttagtaaatattttaaatctcagagattttacctaactgataccagggtttttaaaatttgtttatatagattaagcatctttgaagaaataacaatatgcaaaaaatatggttgggattcttcatgttaaaactatcttaaactcttttccagagggaaaaa

SEQ ID NO: 700950 - DNA, 2527 bp, Homo sapiens
taacatcctcaaacaagacagaaactctcaatttaatgtctttagttctcagggtttttgtgctggttttcttgtctgctttttaaaaatcttcctagttcctgtagccaattaaattattgaccccaattctttacccccgtccctcatacttatgccctttgccaagtgactttgcaaacttctacaggagagccttgaccctgggcttagccatgtgacttgctttgtccagtgagatgttagcaaacatgayttaggcaaaaacaatgtgcttccttgcatgggcatgctttcttacacttctactgtaaccatgccccaggcagtccactgatgtaaggagggtgaaaggttagtggagtaaacccggatccaacctggagtcaggcctgttggacctagatagcccaccccagcctattgtcagatgcgtgagtgagaatagataattcttgattgaaggcactgagtttgaggtgttttattacacagtaggtgattcatacagtcccctacaatttgtataaacatccctaagtctgtcctctctaaaactccattagcctccctctggaagcccgaacaaaaacatgactgcactttaagttttttgaggggagcctaccccttggggaactattgcaaatctggtatttttactaacagattgagctgtccttctgttctctctttgtctggtaaagttgctgtctcagctaccttctgcactccctccaatgaagtggcacaggaattcttctaggctctttcctggagaagtccagggaaggaacttaaggtctagagcaacacatgcctgcattcaaagtatgactctggtgtttattagctgtgtgaccctgagcttcgaggtaatttaaagtctctgaatctcattttacttatctgaaaaaattaggctattactcatctcaaattaagcaatattatctatgtaaaaatcttggctctgggctcaattttggtattcaataaaagttgtatggtgttttttgctttgtttaatattgttttataactgtcattaattttgtggttttgttttgtattcttagctatcaccaacctttactgtgtctggagaattatcagaattaaagaagtaaaaagaggctttcctacactttctagaagagcacgaaaacttggggggaaatgccttatatcaccacttcacaatctcaaaggaagcaatcaacatatatgactatgtaaaaatagagttatgtcagagcttcagggtaaagatggcaaaaagtagacagacatggtctccctctcttgtgtctgatgaaataatccaaaattagtaaacaatagtaataccagcaaaaaaaatgcatcaacaacaaccccaatacctacaaacttcaaaaagtggtgaccaagaagttaatcaagtttttagtgtgactctgtaagttccacactacaaagtaacattgcgcttagctcctagaaaacaaactggggaaaaggtgaaacaaaaaaatcctgagacttcctccaacagcctccagtgtaaagggaagaccagggtctgagccaagtaaatatcatggtaaaactctcaagatatcaataaaagccctgtagcacccagaggggaatcttgaggtcccaaagaaaaaggaaaatggctttccaaggtgccatgctgaattttgaggacaatctgaagtctgaatcttccctaggaaacagacacactctgactagaacatgtaaacacagaacggggtacttaataaaattccagaagatagcctagaacccaggtcatgcagccgcaggagaattctcctctacccaccaccctagatcctgctctgtgctgttgggaaaatcgaaaagtgaataaaattgcaattgcccagccttcaatctgtagctgaggcgaaaaacagatctcagttatagaggaatggagccaaggagaattgagacacaccggatcagagaaaagaaaggaatgaacagagctgcccacatcaacaggaataacaaaagaaaaagggcccaggagcagtggcttatacctgtaatcccagcactttgggaggccgaggcaggcagatcacaaggtcaggagttcgagaacagcctagccaatatggtgaaactccatctgtagtaaaaatacaaaaactaggtgtggtggcaggcgcctgtagtcccagctactcaggaggctgaggcaggagaattgcttgaacccaggaggcagagattgcagtgagctgagatcatacccactgcactccagcctgggtgacagagcgagactccgtctcaaaaaaatagagcaaaaggaaaaaggaaagaatgcccatgggtaggaagaatcaatatcatgaaaatggccatactgcccaaggtaatttatagattcaatgccatccccatcaagctaccaatgactttcttcacataattggaaaaaactactttaaagttcatatggaaccaaaaaagagcccgcatcaccaagtcaatcctaagc

SEQ ID NO: 700951 - DNA, 1809 bp, Homo sapiens
ccctctcctgcccactccccagcattactgggaccacaggcaagcactttgcctatgccaggcctactcccacttactttgaacactcagccagttcttaagctctttgacaaatatttccctgatctaagcactctaggagggtaagatggctagggtgactggcttccacagggccctacgtttatttatctcacagccctcatcacattgggttgtcaatatacttttcacatccatctctttttactcaactatgagctcctcaagaacagggactatggattatgtgctctgtaggcccagaggtcaccatggtgccaagcaggttttagttcttaataaatctgtattaaatggatgggtagtagatggacttttatataaaaatagaaaaatatgatcaaacatgttttctaattcactaattactacttttgtcaaacaactcaagtacgtaattttttatcattacatcatttgttattgaggtataattttcatgtaataaaatatacagatattaagtttacagttccatgagtacggacaaatatgttgatgtaacagaattaaaggcctcaaaatagggcctacgtatatggtcaattggttttttacaaaggtgtcaagaaaattcaacagggaaagaaaacattttcagcaaatgatgctaaaacaattgaacatataggtgaaaatgaaccccaactcttaaaaattagacattatacataaaaattagagatgaattacagttctaaaagtaaaaaattaactataaagatttttttaaatatataaaataaaatcttcatgaccttggacaagacacaaaaagcattaatcacaaaagaaaaaaaaatcaataaattgtgcctcatcaaaaatttttaatttattcatcaaaggacactattaagaaaatcataaaggataatgacttttaagacttgaaaagcatgcagtttttctacaggtactttcagtaaatttcaactgtcactctcagacctaataacccttcattctaactccctctgtgagttgtaaatccaggccccctgtcttccagtcttgctcaagacccttttggctaagggcaactattttttccttcctttgcctttggagattagaagataaaagcacaatggaagataaactctgtcattctccctgacttcttaaaactcatgtttgtctctcttccagtcaagtaaaaggtaacacttggcaatcacatttttacactactatctcctctaactcatttgactgtttcacctcttttgaagattcctatatgagaacaaaatgattcataccgacagattaaaccatttttaactaactatgctccataaaatctgtcttaaaggaatatacatatttccttttgaatattttgctaaaataattctgaacataaaagaactgyttttacaccagagttattccacgcacagttttagcatgagtgaaactgagtatttttattttaaaaattgtgaagatcaaaatagatattgtatgtgaaagtacattgtaaactccaatatacaagagacacattccaacttccagaaatatggcagagcagatattctgaaaggctctcattctaaatacaagtagatcctggataaactacaataaataaacattttaattagttgctggactctccagaaagttggagaaatccaaaagataattttttaaaaagatagcaaattggccgggtgcggtagctcacacctgtaatcccagcactctgggaggccaaggcgggtggatcacgaggtc

SEQ ID NO: 700952 - DNA, 1534 bp, Homo sapiens
tttcctttcagaagacgtctgatgatcctgtagaatcccttttcatttttttctgtattttaaggcagcatcaaagctcactcctgagcccattagtgaaggttaatgcatgacagtaagatatttaggtgaattgcatggaacgtcttcaaaaaggtggtttattgttatttcaatagaacatttcagtcagaaaattcctggatgtgggatctttcttgtcctcataaatttatctttgcaagtagcagaaaaggcccttgtattagtcagtagcctttaagttatggtgggggtggtggggggaccggagtcaaattggcttaggcaggggaatttattggcccatttaactgagaagtccagggatagctctggatttgagctcagttgtatctatgtgaccaataactgtcaacagaacttctttgatgcagtttcttagctttgcttcttttctctcttgatttcattcttttctttcccataacagactagcttttcccttcttaggtaaggaagatgggtgctggatcttacaatcttactccctcccagtattatgacccaaaaggcaagaattatttcttacaagctctaccagaaaagtcctagcaaagaatctaactggtctgatccaagtcacatgatcatctctgaagaaatcactgctatggtttgggggggtgcgtgggaattcagattgatcagactgggtttcaagcccatgcttgtggtggttggcgagaaggaggaggaaggaggaagtaccctgtaatagcccctcaggtccacatagactagggaagaggtgtctccagagaaagaaactgtccaggcaaataaaacaggatgctttattacacagaacttttctatgttcacagtcgttgacctgttttattagtattttttttttttctagaggactctttcattaagtgttttcttacaggtaatacattttctaccaactgatttccactgttgtcttctacttggaatttactgatcttttaattggaattaaagagcctcctaacctttccccaatatttaagttctagtgttgatcacccagtggattccttgggaatgtgtctgtaaggaaaaaatgtagatmaaacatcatcagaactctgtggatcattagttgctcatcttttaaacattttctccagggttgaaaaagcatgttaaatagagccttaggctttgcacaggtagtgaagagacaaacggtggtccttctggggagcccgtggaagagcctgtgacttttaaaacatgatcttgtgccttggcaaccaagcaggaggaccaagaagaatatatcccgctctataatgtaaacttggtgagactcgaatcttatatttgttgtcgtgaatcagatttggtgttgcatgttgcatagcatgaccagaaactcaggtgtgcccaaatcctgccctgacaaccacccctattcctcaggacagcacaagtggctgatgtgcccaggtagggttctccagaaatggttgggttgaag

SEQ ID NO: 700953 - DNA, 683 bp, Homo sapiens
tcatttattcaacaaacatttataaggaataaagtcagagggagctcactatactatgcataaatcaaaggcagcaatagggaactttgttctgtttaagagagcctcatccttcaccccactataccatctgagttgggaaaagcagaactcttgtattattgtccttttgctggtcttgctctgaatggagaggtaaaagagaaaaccaattcttttaacattttgtcttctctttaaatacagacatctggaactatttcttaattacccatcattttatttctatgactcraggtttgcaaatatcatctttaacagtaaaccaacaataacaacaaactccataagaagttctgatttgcttttttggtagttgcctttatggaattgttttccctgtaaaaagtattaaggatacgtgtttttcttctaagcaatttaggacctgttcaaaaccaagtacaaaattgtgcacaggcgctgacatcctcaccttgaagatgttgaccctaacgtaatccaacccctgataaaagagagaatttttattttgctttctaattcttcttgaattaaaaacaagtccaaggtaggtagttaagctgtaatcgcttctaatgactgtgacatttaagaacaatgaccctctacaatgaaactatttggtcattcataattag

SEQ ID NO: 700954 - DNA, 903 bp, Homo sapiens
ttctaaacgaagtgtgttaatacacatttgcagggaaatatgtccagagtttaagatttcatgggtctcttaaccacactctctcyccatcagcaggcaaaagaaccaatcttaatagttcttacattgcatagttcatcttccagaaatataaatgatctctgctatgtccctgaaaactgttcctgtcattcgttctcagtctagctgccttggttttgtgactgttcaaccagaagaataaaatcagcctgtaaccagaaggcagaggactcttatattttttgtataacgtgattctacatttctcattcatgcaatctcttaaaaagagaataggtcaaggcctatcctgccactccctgaggatctaaagatgaagagtcaacatctttaaactggtccctgttatgaacaattcctttgcctcacaaaccataatttcctgccccacctccctttctgcgttgagctcatcatgcgggaagtcactttcagactgaattcaattttccccatgcctttcccccgactcatccccacgttctgttgtgaatagtaatagggcactgggatctgcactaatacgttaattatgagacatctaaacaacatatgatgagtaagtacctacgtggtaaaaaggcctttgctgctgagtattccaggaaataaagacatacaagaaagagcatgcataattagagaaaatttctgtaagcaaaaaacagaaaataacactttaaatcctagtaaaaattattaaaacaaaagtataattttataagccattaaaatatttaaatcacttggctcaataagcctcttcagtttattctgaagaaaaattcaactgtaggatgacaaagaaaaactatgtttgtgaaggtggtcattcaaaga

SEQ ID NO: 700955 - DNA, 2016 bp, Homo sapiens
cacttttcttagtagatacatgtgacttatggagaaataagtaaattttttcccttaagctacacaattagttggtgaaaaagctaagactagaattcatattgtactactaataatattgtaataattctattacaagttccaattctttagcattcattagttctcacaaagtaaccccagtataaccttccaaatttatatcctgcttctttgcaatgttagacaggaatgccctttttcccctccctgctagtcttgcctgttttcttgagctctccatccttaccctaacaccctacacactcatactgtcttcttctgtctgctcctcttctagtagtagtgtgttagaatagctttttcaaatgatcatatttggaaaaaaacaaagtggattttagttccaactattctgtttgcttgtcttactttgtgcatctactcaattatgctctgtttcatatattatgagaaaaactgcatttaatcatacagatgagggaattcagaggtagtgcccattaatgtacggaaagtatgttctgatggatcttggctggctgtgttgaggaatgaggtgtataacaatatgataacatgagcaaaataagtgtcaaatcctcttgaactaaaagtgactctacagttgtgaagtagtcacaggctttcacaaaatacctgtcaattgtaattgtgtttaatctcaatttaccagaataaataaatttcttactaatttgtgaaattccctgtctatttccaattatcttccacaagtcatactattggtttgttgattccctcaaacttgtttaacaagttagattttaattaacatgagatttcctcctttgtcctcaactatagatcacacgtaatacatgagagtcattcatttgagtgggaatctcaaagcagttgagtaggcagaaaaaagaacctcttcattaaggattaaaatgtataggtaagtcctgtttttgtctttgtagctttaaaagttttactatatcttacagtatgggaaaaatataaagaagcttagcaaattttgactgtgtctagcaatcttctagttacttctctgaaaacttcatcgaaactcttagatattgtttagataatatgcttgatattattttcataaggtacatagttgcttaactgaattttttataaaacaaccacaaaaatacttagcttagcgttatgacaacatatctttaaataaggaagtggttttgtttctcatgtgcaacatttcgaaaagtggtgtgtggattttaaaattgcaatcagtaaacaattcttgtgttgtttggaacttttcgaggattctgtgttttgacttccattacagttttattgctagctattaaataaatatgccataaatcctaaagtacacttttagaaagtaaagacggtatttttctactttttatatagttgtagaattattttcaagaaagttcttgctaacatttaagagaaaataatctctctctggttttctttttagttaatgaataagtattttcctatactttcacataaagaaagmaaaaagttgtgagataatcaagtcacacgttaacatctcaaaacaatgaaataattatgtaacttggtatgtttatgtgtgcacttaagtgtatatattatgcatattatttttctatgactacaggaaaacatgatactgataagtcatgctgaaaggatcaacaaaagcatgaacaatgtgttagctataataagtgcagctgaatttattttaaatctcctgaacattggaaaattcaatcaaaagtcaaaccattttaagtaataaaaatatatatacagttatatgcacttgaatatatatatatgagtgaaaagtggatagctgtctaagcttccaatgatagaagaaataaaatcatttcatattcatgtaatagatacaagaaatgtattaaagtagcttaaaaacctatgaagtaatttacatactgagtttgttcttat

SEQ ID NO: 700956 - DNA, 2016 bp, Homo sapiens
cacttttcttagtagatacatgtgacttatggagaaataagtaaattttttcccttaagctacacaattagttggtgaaaaagctaagactagaattcatattgtactactaataatattgtaataattctattacaagttccaattctttagcattcattagttctcacaaagtaaccccagtataaccttccaaatttatatcctgcttctttgcaatgttagacaggaatgccctttttcccctccctgctagtcttgcctgttttcttgagctctccatccttaccctaacaccctacacactcatactgtcttcttctgtctgctcctcttctagtagtagtgtgttagaatagctttttcaaatgatcatatttggaaaaaaacaaagtggattttagttccaactattctgtttgcttgtcttactttgtgcatctactcaattatgctctgtttcatatattatgagaaaaactgcatttaatcatacagatgagggaattcagaggtagtgcccattaatgtacggaaagtatgttctgatggatcttggctggctgtgttgaggaatgaggtgtataacaatatgataacatgagcaaaataagtgtcaaatcctcttgaactaaaagtgactctacagttgtgaagtagtcacaggctttcacaaaatacctgtcaattgtaattgtgtttaatctcaatttaccagaataaataaatttcttactaatttgtgaaattccctgtctatttccaattatcttccacaagtcatactattggtttgttgattccctcaaacttgtttaacaagttagattttaattaacatgagatttcctcctttgtcctcaactatagatcacacgtaatacatgagagtcattcatttgagtgggaatctcaaagcagttgagtaggcagaaaaaagaacctcttcattaaggattaaaatgtataggtaagtcctgtttttgtctttgtagctttaaaagttttactatatcttacagtatgggaaaaatataaagaagcttagcaaattttgactgtgtctagcaatcttctagttacttctctgaaaacttcatcgaaactcttagatattgtttagataatatgcttgatattattttcataaggtacatagttgcttaactgaattttttataaaacaaccacaaaaatacttagcttagcgttatgacaacatatctttaaataaggaagtggttttgtttctcatgtgcaacatttcgaaaagtggtgtgtggattttaaaattgcaatcagtaaacaattcttgtgttgtttggaacttttcgaggattctgtgttttgacttccattacagttttattgctagctattaaataaatatgccataaatcctaaagtacacttttagaaagtaaagacggtatttttctactttttatatagttgtagaattattttcaagaaagttcttgctaacatttaagagaaaataatctctctctggttttctttttagttaatgaataagtattttcctatactttcacataaagaaagaaaaaagttgtgagataatcaagtcacacgttaacatctcaaaacaatgaaataattatgtaacttggtatgtttatgtgtgcacttaagtgtatatattatgcatattatttttctatgactacaggaaaacatgatactgataagtcatgctgaaaggatcaacaaaagcatgaacaatgtgttagctataataagtgcagctgaatttattttaaatctcctgaacattggaaaattcaatcaaaagtcaaaccattttaagtaataaaaatatatatacarttatatgcacttgaatatatatatatgagtgaaaagtggatagctgtctaagcttccaatgatagaagaaataaaatcatttcatattcatgtaatagatacaagaaatgtattaaagtagcttaaaaacctatgaagtaatttacatactgagtttgttcttat

SEQ ID NO: 700957 - DNA, 2378 bp, Homo sapiens
  misc_feature 1552, 1553, 1554, 1555, 1556, 1557, 1558, 1559, 1560, 1561,1562, 1563, 1564, 1565, 1566, 1567, 1568, 1569, 1570, 1571,1572, 1573, 1574, 1575, 1576, 1577, 1578, 1579, 1580, 1581,1582, 1583, 1584, 1585, 1586, 1587, 1588, 1589, 1590: n = A,T,C or G
  misc_feature 1591, 1592, 1593, 1594, 1595, 1596, 1597, 1598, 1599, 1600,1601, 1602, 1603, 1604, 1605, 1606, 1607, 1608, 1609, 1610,1611, 1612, 1613, 1614, 1615, 1616, 1617, 1618, 1619, 1620,1621, 1622, 1623, 1624, 1625, 1626, 1627, 1628, 1629: n = A,T,C or G
  misc_feature 1630, 1631, 1632, 1633, 1634, 1635, 1636, 1637, 1638, 1639,1640, 1641, 1642, 1643, 1644, 1645, 1646, 1647, 1648, 1649,1650, 1651: n = A,T,C or G
gttccttattcccaaagcactttgttcctttaaggctttctatcccactagaactgttttcaaggtcatatgagagacatgtgtgctctttctaagtactgtgaacttccagagagagggagtgttatatgtttgttcatggaagagagaaagagtacgcactcaaaacattagtttaaaagtttaggctggctcagtggctcatgcctgtaatcccagcactttgggaagctgaggcgggtggatcacgaggtcaagagatcaagaccatcctggccaacatggtgaaaccccgtctctactaaaaatacaaaaattagctaggcatagtggtgtgcgcctgtagtcccagctattcaggaggctgagtcaggagaattgcttgaacccaggaggtggaggttgcagtgaggcaagatcacgccactgcactctagcctggcaacagagtgagactcggtctcaaaaaaaaaaaaaaaaaagtttaacagattgtgattgtatcttgattacaaaatgcttgccaataccatcacaaagaaagaaagataatttcttagaggaagggtagtctttgccgaaaatgatgctgaagaaattggacacccataggcaaaaagaaaaaaaaaaaaccatagacacagtatacctttcacgaatactaacttaaaatgaatcataggcctaaatgaaatgtaagactgtaacttctagaagaaaatctaggggaaaatacaaatgatcttagatttggtaatgagtttttatatatatcaccaaaggtacaattcatgacaaaaaaattgataggtgggactttatcaaaatttaaaacatttactctatgaaagacactgttaagagaatgaaaagataaaccacacactgggagaaaatatttgtaaaaaatacagcagataaagaactcgaatccaaaatatacaaagaactcatgaaactcagaaaacaaacaactcagtttaaaaatagacaaaatggccaggcacgttggctcatgcctgtaatcccagtactttgggagtggagtttacagataaacaagggaagaagctagaatgatccatgcgataatggattcgaactagaaacttcaatataaattcatgtttagtttaatataggtacacattgttacacatagaaatatttatggatatatgtatacacactggttagtacacacatattgccttaccctgtcagcgcagagggtctagaggcagtaacgcccagtaacaagaarcacacctagatcccaggtcctggtttctgatagtatttgctaataaaagggtcctgggctccttggacagctggccaattctaacactggggcaggtactactcaagaggagcctgaagtatctttttttttttttttttttttttgagacggagtctcgctctgtcgcccaggccggactgcggactgcagtggcgcaatctcggctcactgcaagctccgcttcccgggttcacgccattctcctgcctcagcctcccgagtagctgggactacaggcgcccgccnnnnnnnnnnnnnnnnnnnnnnnnnnnnnnnnnnnnnnnnnnnnnnnnnnnnnnnnnnnnnnnnnnnnnnnnnnnnnnnnnnnnnnnnnnnnnnnnnnnnaatctttttttagaagttactattagggaaaagcaaatcccacccaaaagcaagcaaaccaaacagaacccatgtctaagtattagaattgggttcaatacttctcaaactaggtttacctgtaccacactttgattaatataggaatttccttctctttcatcttgtaaaacaccaatgttgttgtataattaagtgaataacaaagtgatagaaaaaaatctttagacagttcttttgttaagtaaaagcttcaggcttatttctgccaataaatttgacaatgtaaataaagattattggcacaatccaaattgatcaaaatgtgcaagaagtttgggggaggaagttgaagataagtcttcccttagcttttgttttaaagcacaaaacttttgtttataaacccagccccaatttttcgaataaataatggagctaaatggcatatatttatcaacatctctagtgacatttactgatcatttattttttaaataactaagattgcttttctagaatggttaaaaaaactgtgttaaagttgtttttcaaaaatcattttgagaaactgtgctttgaatacagcaataataggcaaacagacttgaagttactaaaaagctaaactaaagcatttgctcttgagatcatctcattagattccatgttattcaagatagccatcaatgttgagccaacttcaactatgtaattcctgagaaaa

SEQ ID NO: 700958 - DNA, 583 bp, Homo sapiens
gggctttgccagggaccccacccttttctgcctagaatttctctgcctcccatccctatcaccaccacagccttcactcaaagagatcattccaactgcttcaggccttaatgagaacccaaatccaatactgtgccatagaagttacaacaagcatctggaaacacacccacatcctccttctccaagtcatgctccatgttccccagatgccttcacagcctttgaggccctggcatcagccatgccagatactacacaaaataaggcaaggagaactgagtcctggtgctcagtgataaacaaggatggtaaattatgataatgagtgttattgataacaataaggaagattctcaccccagtttcttaaatgttctgtttggtgcttagcaccttagactttattctatttagcaccaataccattctgttattaattcattaggaatctgtttttttttactaggcagtgaacttctgttgatccctrtatctggtaatatctggaacataatgagtgtttaatcaatatcgactgactaaatatgtgcacatctttacaatgttccaggaaacaggg

SEQ ID NO: 700959 - DNA, 583 bp, Homo sapiens
gggctttgccagggaccccacccttttctgcctagaatttctctgcctcccatccctatcaccaccacagccttcactcaaagagatcattccaactgcttcaggccttaatgagaacccaaatccaatactgtgccatagaagttacaacaagcatctggaaacacacccacatcctccttctccaagtcatgctccatgttccccagatgccttcacagcctttgaggccctggcatcagccatgccagatactacacaaaataaggcaaggagaactgagtcctggtgctcagtgataaacaaggatggtaaattatgataatgagtgttattgataacaataaggaagattctcaccccagtttcttaaatgttctgtttggtgcttagcaccttagactttattctatttagcaccaataccattctgttattaattcattaggaatctgtttttttttactaggcagtgaacttctgttgatccctgtatctggtaatatctggaacataatgagtgtttaatcaatatcgactgacyaaatatgtgcacatctttacaatgttccaggaaacaggg

SEQ ID NO: 700960 - DNA, 1930 bp, Homo sapiens
aaaatgcaaatgacacctgagtacagcactagtctcacaatgacatgtttcttagtaattgaasaaaatatgtaactattctcagttgcatttccctctcagtcctatgttcatttatttgtggaacctaaaagaaaagtagaggtttcacccaacagaaaaggagagatatcacccaaacactcaacaagatatacatacccaaataactggttattcagtgagttccaatttactaagtaggtttcatgtagtcaaaacagtcaaatagatttatatatagacatgatctttaatacatttatattagttattaattaatttcactccaaatcattgaggcttaatttaaatgaacccttatgaaaaaggtaataacacttacaagcttaacaaaatgaaaagtttgaactgggtggggagaaaggtttttgttcattgttttctaaattcttaaacaaaaaccatagacatgtaaggaggctttggaaaattttaaagcgaaaagatctgaggaggtttttgaccaaaaaaaacaaacccaatcaattttaatgtaatgcctaagatccaaggatgtaatgacaagagaaaacagaagccatttgtgtagtttgaatttagctattttttcctgagacttactctatttgcagttgatggggttaatgagtgggtctgttggcctggtggttatatgatcctatgcaaaagccacatggcaagagaaaccattccccatatgtcctgatttggatcactcctgtgctgtctgcagtaaaggatcatttcatccaaatctgtggtcagtggcaaaactatttgttgaactatcccaaagcacagagcctcacttattgatgaagtgacaactcagggggccatacaaatggttttgtgtttttttgtttttcccagggaagagaaaattagtgctggaactcaggtgcattcattacggaaactgaagtctaagatgtcaccacaaatatcatacagtgaatgactccaaatctggaggggtggaatcatgaaatgcaaggggaaataatattctgggatccaaatacacagccagaaatgggcttctctcaactgatttgtatgaggtcagagctttgctctggtatttgagtagaaacaaaatcttgggagtatgtttcctttttggaagtccccccagttctgcagtacagttgtctaggaccaaatctccttcaagaaaataaggagggaaattggtttccaattaaatgctgaatgtaccatcagaaccaagcaaagctgcctccaacatttaaaacattcaaaacactaagcaatttgacatactttttcaaggtgttggccttttagaaagcctgaggaatgttattataagacacaaagtgagaagcttatgtaccatccaccctttttaccagacttagaagttcctcccagattcttttaggagcagaagcagaaggcaactgaaggtgacatgaggtggctctactcgtttataagtttagggtctgtgataagggcagaaaaccatagatgatgaaggtacagacctttttctctgtcgtaatcatactcaagctctttgccaagtttagaggtttaagtacaaatgtcaagcaccctctctgaaatgttgccaccaagagcactccacacctccatctggaacttcagaagatcacaggcttttcataaatccctgtatcatcccacgagctatgacatctcagcagctacaaagtctaggccacttgtatatcagtccgtttttcatagtctctccagagttccttttaacctttctttcattgcctctgagaagagctgagttatagactctgcttatatataaactctatttatatagactctaattatatgaataattatttcttcaggggctcttgcaaattaacacaaa

SEQ ID NO: 700961 - DNA, 2278 bp, Homo sapiens
tgtctccattaagcctcttctaatcctcaaaaatatctgtttctgagtctatttctgagtttcaaatggactttgagattatggaactagggagggtaacatggaatgaggctcattctaatccccaaataaaccgtctcgaagtggaaccatgtggagctctcttctcacattctgttctgagccgtgttccctccaactataccaataacccagagatgagctaaacccagyctgaccactctgcttagccaggaactggccactctgtcacggttggaagaagtttaacagaaagtcaaatgaattctcacaaaactgacaagaaactgtcttaaatggatctcagaagatgccccctaaaacctactaaatttaaataattgatctagcaatgattttcaacatgtaaggtcaccaaaccttagaatttactcgttcagcctagaacactgagaaaattcctcccaaatgcatactctttgccccccagccacaagtgtagcagaagaaaaattaattaggaatctccctcaacttctagcagagaatttggatatggtaattttctataaacctggacgctaacattcttttgttaacatagttgtaatggaaaattgaacaaaatgcaaaaccacaaatagcatttcacatggcaggcaatcagaggcatggcacagcagaatagtgaacttagattcaagtcctgcttggccattttctagctctgtggctttagaaaagtaactttacatctctgtgcttcagtttctttgtctgagaaaggttaatacctccccagcacagacttgttttaaaaatgtaacaggataccataagtgaaagcaacttttgaaatgtaaaagctttatcctaatatcctgattattgtattgagtccaaatgaatatattgtgtagttggcatatatccattttctatttgagatgggataagttaggaaggccaacatttaaataattttgaggctctccagaccacaccattccatcaagatgatactcagtgaagccgcacaaaatgggtacctgagacttcataagtaaggtctcaggatctcactagaaaaagtcatttccctgtaatcctgtgctactgtattacacaaccacaacaaaccttacttctctccacgccccattccacttgcttagaacaggggacagccctttgtataatttctacatttgtagtacagctgacacatggatgatctttattttaggtttatattcgtactttgatgatgaccaggcaatttttctctcacctagtccagtcttctaatttttaactgaactctcaagggtaatctgtttttattcctgtctcttgtttttttggcctccctatctctcggtttctcagtctctgttccttttactgtttctctttctcttatgcaaacacacacacacaccctgatccaatccttcagtgtcttaattcaggtcctaaaccttccagtgagatttctgacttagcatctgctgagccacaattcacatgtgacgctctgcacttcttcccaggtacgtttcagctgcaggctctgtattattttggtgtgttatctgtacacagacactcacggcaaaagaaattactcactcgtggaaagagatgccaaacccttaattcaaaaacaccaaatgagtaattctcaaagcatatttttctccttcaaccaggacattttaattatcttgaagtaaacaagaagcctcacaagggttactcaaattgttctttcaaaattttccctcccctatacctaaggatttccacctgccctaaagttcttcatgaagcgagcctttgtttaccacccatgtgataaaaagcccataaaaatggggaggtaaactttgcatccatttctagtcccaaattggcctgaggactaaagagagcccagaaataagcaatgacccatctctttggctaagtgtgcactgacttggcccaaatggtcaggcttcctgcctgtagctacatagttagttgtgataaggagcaaagaaaaccaaacagcttcaaggactaaagcatactttctactgaatgatttgtgctgttagtgttgcagtctgataagcaaaacacatttcccttgccagtggaggcctattaccagagcagaggcacagggagctgaaaacatttcacacacagtagcaaggaggaaagacctgtaggtgggtggtttcaaacacgcatctagcctaactccgaactacagctgccaacaaaa

SEQ ID NO: 700962 - DNA, 599 bp, Homo sapiens
agaattaaacaggaatattttatgtgcttgaatttaaaatctgctcttggagttagtgcaacactggatatctcagatgtttctcagctgacacatgattagtatttctatccagtacactacatactttgtgaggatattgactcttaagactttgttctggctcttctagtctaaactatacctaaatcaatccaaaagaggcaacggaaaggtaktacctggtgatgaactgtcaaattatatcatagattttaaatggtatccacttaacaggtttaaaagatggtgccacagtctccggttaaatattaagatgtaagacatgcatttcctctgctcattctcacaatctgactaaggcacataaaaaagtcaaaaacctcaagaacagataatagaaaaagagacaacaattagtaagtaagtaaataaataaatatcaacaaaattttggaagatgttaagtggatagaaaagcaattaggtttcagctttttctgctatacttgatctgcaaggggaggaagtcagtaagaagaaagccaattcattcatcagaaacctgggaaaagtactgtagacatgaggtaccttca

SEQ ID NO: 700963 - DNA, 948 bp, Homo sapiens
gccctgaaaaacaaagatatccacaaatcatagtatattacaatttttttggaagtcatgggaatagaagcattcacgaatcttggaaaaaacaaaccctgggaaaacacagtctggaaatgtatgtgagtacatagtgggggctcctgattatgtgttataatggttaaatgtcacaatattggaaaagaaaagcttcctaaaaaggtaattttggccaggcatggtagctgacacctgtaatcccaacactctgggaggcagagatgggaggatcacttaaggtcaggagttcaagaccaccctggataacaaagtgagaaaccatctctacaaataaatgaatgaatgaatgaatgtgcatgcctgtggtcccagctacatgggaggctgaggcaggaggctgcagtgagccatgcttgctctactgcactctagcctgtccgacctgggtgacagagcaagatcttgtttaaaaaaaaaaaaaaatggcagggctggggggcaattttaaagcttggactttgacaaaacaatttactgactataagtacttttcttgttctgtaagcatgagagaagactggaactaggcagctaatttagagtagctaatgccacgaagatccttaacccacagatagctctaggaaggtcgtgttcagcaggacaactcccaacatacaagagaaaggcagagacagtgaatgacagtctctcaccatggagggtaagaagtgatcctacaggcagcaaaatcaatcaccaaatttatttttcctgcaacttttgttaagtacttacaaattaattccttatatcctaatagctacaatcctttgtgagaatctgcaattaggattcacytaatgtcacctaaaaggtcatttctattgctcaaaaactatggaaatctggcacaggttttgcgcttgtgtttgtatcaca

SEQ ID NO: 700964 - DNA, 601 bp, Homo sapiens
tccctagagtggagagagccagtagcctagtaactaatgctttgtcccctccttttcctgttgtcacgactctgtgtctgcagctagtcctctattttttactgtccatctagtgagtggctggaccatcactgatgtgctgttgatgccttatcagggttcagtaagtactaagccatgtgatggatgggcagagggctggcaacagtttcctctttctgctacagactaagactccttaactagagatgaggcaaggaaacagatagaccccatctgctgccacagattcatttcctgacttgcatttcttgcctctcctgagggtttgttaactcttcagtctttggcaaaagttccattgggcagcaaccacaaatatcagccatcccccaataagtttactgtctgcaggaaaacgaagattttttttttcctgttattgcttaagaggtgttggaagtcagcagtctcgggtcttgctctwactgcctctaattagctaggtgacattataccagttacttaaagtctataagctatattcttccatgaaagaagaattataaaactccctatcttacaaggttgttttcaagat

SEQ ID NO: 700965 - DNA, 601 bp, Homo sapiens
tccctagagtggagagagccagtagcctagtaactaatgctttgtcccctccttttcctgttgtcacgactctgtgtctgcagctagtcctctattttttactgtccatctagtgagtggctggaccatcactgatgtgctgttgatgccttatcagggttcagtaagtactaagccatgtgatggatgggcagagggctggcaacagtttcctctttctgctacagactaagactccttaactagagatgaggcaaggaaacagatagaccccatctgctgccacagattcatttcctgacttgcatttcttgcctctcctgagggtttgttaactcttcagtctttggcaaaagttccattgggcagcaaccacaaatatcagccatcccccaataagtttactgtctgcaggaaaacgaagattttttttttcctgttattgcttaagaggtgttggaagtcagcagtctcgggtcttgctctamctgcctctaattagctaggtgacattataccagttacttaaagtctataagctatattcttccatgaaagaagaattataaaactccctatcttacaaggttgttttcaagat

SEQ ID NO: 700966 - DNA, 645 bp, Homo sapiens
tctgatataattagcctgagattggatgtcttacaggcccgtaaacaccatactgagggcttagactgcatcttggagacaataagccacagaattattttaagcaagggaatgacatggtcatattttgtttcaggtacaaaactccaggtactgggtgaaatacggacttgtggagaacaagactggagatgggagaggggtcaggagacgaccatcagtatccatgggccgcacgacagaaggagagaaggatgtggaattacttgtaatggcaaattggtagggctttgtctctgactgttatcggggggagcaggctacaaaagaaaggctctggcttgagatgtgtgggttgtgattgcgtttgctgagattaggctgttgaaactagaggaggtttagaatgaagaatgatgaattctgttttagatcagttgggatcaggtgactgataggcacaggaaatgtgcattcccagctggtggtgctggagaaatctggggcttataaagagagaactgggctagtgagatcaggcatcatyatgcctaatggtagtgaaaaccttaaccaagaaaaacacataggaaatagcagtggtccagagctatttccctaggaaatccaaaacctaagaggaaa

SEQ ID NO: 700967 - DNA, 665 bp, Homo sapiens
tgatcctctgtctcttcctaccttccactttcaggtaggccccagtgcatattgttcccctctttgtgtccatgtgttcttatcatttagctcccacttacagtgaggacacgtggcgtttggttttctgttcctgtgctagtttgccaagaatgatggcctccagcttcacccatgtatggagagattcttagatggagtcatcatattgaccctttttgctggtttttggccctcccctaattcttcatttctgacttggctcctgctctttataaattactcacagcttgtttctctggctcctgcttcattagttccctcacaaactttcgtcaattttttttttatttgtctgtctgtctctctgttcacctattttgtttttcgaccctcttctggcttttaggactcaaatctttaataatgatttgtgaagtccctgtgataatagaattggggcaaaaaagtatcaaaagtgtcaaactaaaaattgtacttgataaagttaaacagtcaaggaagactttttcaaggctattgtaatagggaagaaagaccggaacacagtctacattcaaccttctgaaataaaggatgagagagagtttaaggtgtggtatgtgtaatggaaaagaactagagagtgttggaagggaygctga

SEQ ID NO: 700968 - DNA, 1491 bp, Homo sapiens
tggtgatatgaaagtgtcaacaatgatatttgcttactggagtgtgtgtgtgtgtgtgtgtgtgtgtgtgtgtgtgtgtaagtatgaatattttcctcccagaaccactgctagaaacacaaaaatattttggtgggaaaaaaaatgtaagtaaatgttggctggtgagactcagagagggcaggatacggtgaaaascatatcctgcaaagcaaaagaccagtgattgccttgataccctggagactatggaggcaatgggaaaagaagagaggtaaagtgaggaaagaagccagggagatgtgggccacaagtccgtagaggtgattgtcatctgggaatgtcatgaaccctcatgatcctctgaattttcaaaaaaaaaaaaagaaagaaatcacaaaatgcttaagaatggtggatttgaaatataacttgatgagtgagattaagccctgcatccaggctacaataggagaaggaaagagtgttacgacaaggaaaaatagaagcaaaaggaagcatgatgaggtagagcgctgggatgttagggaccatggaattagattccggaaaaggtacgcaatttctgaaaggcagggaggctccagatggcatacagatggatggattggtgggcggacagatggaaagatgagttgatgagaggcagacagatcaatagttaaatggttatcactatattagacttagatgcattggaaattaatgtatacctaagaatagtaagaagattctgaacatcatgaaaagtttccgaatttaagctagggaaggcctgaaagaagtcattcagtttgatagtttgatattagaaggtgttggtgatctcagcacattttgagaaagattggctccgttggtgaggcacccacgatgtcacccatacaccttttcttctgtgggtgtcctttgattaagcaaactacggaacactatttctctttccgtggaacatatctaggccaaagtgattaaaatgaggatagttgcacactagatctcactcctgaagtttcattttcccttccacaaaagaaaaggctaaaattcttttctatgtgaaagttacagcagattttaaaatgtgattctttaaaaaaccatctcattagtcactgacagtaaaaaatcacctcctgttggtctcaatcaaacattttaaaggctatatctgattttacagtatttaaaatctgttcttaaacatttactattgctagcccatagctcttcttttttcttgcatttctaagtaagcattagtgtccagagtaacacaaatgaaaaacagaccaatatcaggggctcatgatcataactggtctcagctgagtatgagcggcctgtgatgcaaatgtaatgagtgcttaggacaagggtgatgaagcagaaagcttaacaaactgcactcagattgcctggctctgcattctagatacacttcacactagtttttgagaccttgggcaa

SEQ ID NO: 700969 - DNA, 1491 bp, Homo sapiens
tggtgatatgaaagtgtcaacaatgatatttgcttactggagtgtgtgtgtgtgtgtgtgtgtgtgtgtgtgtgtgtgtaagtatgaatattttcctcccagaaccactgctagaaacacaaaaatattttggtgggaaaaaaaatgtaagtaaatgttggctggtgagactcagagagggcaggatacggtgaaaagcatatcctgcaaagcaaaagaccagtgattgccttgataccctggagactatggaggcaatgggaaaagaagagaggtaaagtgaggaaagaagccagggagatgtgggccacaagtccgtagaggtgattgtcatctgggaatgtcatgaaccctcatgatcctctgaattttcaaaaaaaaaaaaagaaagaaatcacaaaatgcttaagaatggtggatttgaaatataacttgatgagtgagattaagccctgcatccaggctacaataggagaaggaaagagtgttacracaaggaaaaatagaagcaaaaggaagcatgatgaggtagagcgctgggatgttagggaccatggaattagattccggaaaaggtacgcaatttctgaaaggcagggaggctccagatggcatacagatggatggattggtgggcggacagatggaaagatgagttgatgagaggcagacagatcaatagttaaatggttatcactatattagacttagatgcattggaaattaatgtatacctaagaatagtaagaagattctgaacatcatgaaaagtttccgaatttaagctagggaaggcctgaaagaagtcattcagtttgatagtttgatattagaaggtgttggtgatctcagcacattttgagaaagattggctccgttggtgaggcacccacgatgtcacccatacaccttttcttctgtgggtgtcctttgattaagcaaactacggaacactatttctctttccgtggaacatatctaggccaaagtgattaaaatgaggatagttgcacactagatctcactcctgaagtttcattttcccttccacaaaagaaaaggctaaaattcttttctatgtgaaagttacagcagattttaaaatgtgattctttaaaaaaccatctcattagtcactgacagtaaaaaatcacctcctgttggtctcaatcaaacattttaaaggctatatctgattttacagtatttaaaatctgttcttaaacatttactattgctagcccatagctcttcttttttcttgcatttctaagtaagcattagtgtccagagtaacacaaatgaaaaacagaccaatatcaggggctcatgatcataactggtctcagctgagtatgagcggcctgtgatgcaaatgtaatgagtgcttaggacaagggtgatgaagcagaaagcttaacaaactgcactcagattgcctggctctgcattctagatacacttcacactagtttttgagaccttgggcaa

SEQ ID NO: 700970 - DNA, 637 bp, Homo sapiens
agctcaaattttatgattaagagatctaaaataatagctaatgcatataatgcttactatgtgccaggtattgttcattcagcaattcttccatcaacccttagaggcaggtagtattattaatcccatttttcagatgaggaagttgaagcaagtgatgttataagcaagttttccaaggccccacagctagtctgtgaaagcctagatttggaagtaggtcatctaatcccagggtccaagctaccactgaaatttatcacatatgtcattatagtttatcatgagtattctacccaatctaaaaagtgttattatggaactatatccacgttcagatagaaaaatttcaaccgaacaaatgtttcagtttattggctgctgagaatttacccacaagatacacttgtacataggtcaagatgtatggaccaaatatgtttactataggatttttttttcttttcagtagcagccgagatctcaagatggtctaagtatccactaataaagwattggttaagtaaattatggcctatttataaaaatggagtattctgtagtcattgcaaagaagaagaaagattggtctatggtgatgtcaaagctttggaagatgtaaggaaatttatttgta

SEQ ID NO: 700971 - DNA, 637 bp, Homo sapiens
agctcaaattttatgattaagagatctaaaataatagctaatgcatataatgcttactatgtgccaggtattgttcattcagcaattcttccatcaacccttagaggcaggtagtattattaatcccatttttcagatgaggaagttgaagcaagtgatgttataagcaagttttccaaggccccacagctagtctgtgaaagcctagatttggaagtaggtcatctaatcccagggtccaagctaccactgaaatttatcacatatgtcattatagtttatcatgagtattctacccaatctaaaaagtgttattatggaactatatccacgttcagatagaaaaatttcaaccgaacaaatgtttcagtttattggctgctgagaatttacccacaagatacacttgtacataggtcaagatgtatggaccaaatatgtttactataggatttttttttcttttcagtagcagccgagatctcaagatggtctaagtatccactaataaagtattggttaagtaaattatggcctatttataaaaatggagtattctgtagtcattgcaaagaasaagaaagattggtctatggtgatgtcaaagctttggaagatgtaaggaaatttatttgta

SEQ ID NO: 700972 - DNA, 602 bp, Homo sapiens
acaaattaaataaataaataaataattgtttaaagccwctaagtttgaggattatttgctatgcagcagtaaataattaaatagaaataatacccatgaaattgcaaatgtgattaaatatttttcctagcataaattaaaaattttttaaagtcagtcaatgcatcagataaaactatcttatctaccacttaataatccccttatcagactttggaaaatattggtttaacaagacaacaataataatgataacaagtataatagcaattaataatttagcggctactcttttccagaccttgggctaaatggtttacatacatgacctaatttaatcccctcaacaacactgtcagttaggtgctgttattcccattttgtagataatgaaagatgaggaagctcagaaaggtaggtaatttgtcaaaggtcacatgaaggtcatgtttgatgactcttagaactttttatggagtagaaacttcccatgatctgaaagaaaatgaatgagatccactctttgtataaatgtttctctgccttttagttaagaattgctgatatcattgcttgtattatattcaggggctacttcagag

SEQ ID NO: 700973 - DNA, 602 bp, Homo sapiens
acaaattaaataaataaataaataattgtttaaagcctctaagtttgaggattatttgctatgcagcagtaaataattaaatagaaataatacccatgaaattgcaaatgtgattaaatatttttcctagcataaattaaaaattttttaaagtcagtcaatgcatcagataaaactatcttatctaccacttaataatccccttatcagactttggaaaatattggtttaacaagacaacaataataatgataacaagtataatagcaattaataatttagyggctactcttttccagaccttgggctaaatggtttacatacatgacctaatttaatcccctcaacaacactgtcagttaggtgctgttattcccattttgtagataatgaaagatgaggaagctcagaaaggtaggtaatttgtcaaaggtcacatgaaggtcatgtttgatgactcttagaactttttatggagtagaaacttcccatgatctgaaagaaaatgaatgagatccactctttgtataaatgtttctctgccttttagttaagaattgctgatatcattgcttgtattatattcaggggctacttcagag

SEQ ID NO: 700974 - DNA, 602 bp, Homo sapiens
acaaattaaataaataaataaataattgtttaaagcctctaagtttgaggattatttgctatgcagcagtaaataattaaatagaaataatacccatgaaattgcaaatgtgattaaatatttttcctagcataaattaaaaattttttaaagtcagtcaatgcatcagataaaactatcttatctaccacttaataatccccttatcagactttggaaaatattggtttaacaagacaacaataataatgataacaagtataatagcaattaataatttagcggctactcttttccagaccttgggctaaatggtttacatrcatgacctaatttaatcccctcaacaacactgtcagttaggtgctgttattcccattttgtagataatgaaagatgaggaagctcagaaaggtaggtaatttgtcaaaggtcacatgaaggtcatgtttgatgactcttagaactttttatggagtagaaacttcccatgatctgaaagaaaatgaatgagatccactctttgtataaatgtttctctgccttttagttaagaattgctgatatcattgcttgtattatattcaggggctacttcagag

SEQ ID NO: 700975 - DNA, 661 bp, Homo sapiens
ctgattagtcaaagagacaaaagactgcagtcaacagagatgaatctgtctctccctgtagacacaaagtagacaatatctggaaggactgctctggtctcgttctgaacatccagatggctcctactttggtcactaggttcataaatggcttacaccagtaattaggatgttagccaaaaacactatgtaaattagcaaaatgctcytctctttgaaatgcatgtactaggccaaaaacatgaggactccattgcagaaaaagtcaggtaaacacagtgcaaactaatggtttcacaacttaaacacttcagagaaaacaagccaaggcaatctgttccctccaaacccccacagattgggattcttgaagatactgtaaagaagtgtagatattataaataaagactctggattgtctagccttaagatgcaaaaaggagtaagtgtccatctccccagttcattttttccatgggaacttcccctgtgtgcccacactaaccagatgcatgaagagaattcatcagcccatcgatggccacacaccaccttcctcgtggactcaggggcaatgttccaccacgagcgcctcttactttctgaccatgcttagagcacgaaaaccatacttggtcatctcctacatgacttgacttta

SEQ ID NO: 700976 - DNA, 661 bp, Homo sapiens
ctgattagtcaaagagacaaaagactgcagtcaacagagatgaatctgtctctccctgtagacacaaagtagacaatatctggaaggactgctctggtctcgttctgaacatccagatggctcctactttggtcactaggttcataaatggcttacaccagtaattaggatgttagccaaaaacactatgtaaattagcaaaatgctcttctctttgaaatgcatgtactaggccaaaaacatgaggactccattgcagaaaaagtcargtaaacacagtgcaaactaatggtttcacaacttaaacacttcagagaaaacaagccaaggcaatctgttccctccaaacccccacagattgggattcttgaagatactgtaaagaagtgtagatattataaataaagactctggattgtctagccttaagatgcaaaaaggagtaagtgtccatctccccagttcattttttccatgggaacttcccctgtgtgcccacactaaccagatgcatgaagagaattcatcagcccatcgatggccacacaccaccttcctcgtggactcaggggcaatgttccaccacgagcgcctcttactttctgaccatgcttagagcacgaaaaccatacttggtcatctcctacatgacttgacttta

SEQ ID NO: 700977 - DNA, 1372 bp, Homo sapiens
gcaaatactatttgcaagtcccattttatgtaagggacttgaacacccatgaattttactgtctcaatgagtcctagaattaatcccctacagatccaagagtgactatataccaataactcttacaaagaaaaaaagtcaacaaaacaatagccatatgcaaacatactcaacttcactagaaactgaggataggtaaattaaaatgagatgccatttcactatcagatggataaaaatgtaagacattgatactatcaagtattggcaatggggtggaaaatgggaaatctcatcatctgtttggtaggagcataaattgatatggcctttggatgagcagccaggcagttcaaattttaaatatgtcaaaaataaatgaatagattttaaatatgtctcccctctgcttgagcatctgctcgtaggtaccaagcctagagagggagatacgcatacacacagggagcctggacaagggcatgcttactctcagtatggacctcttaggtttaaatagagcaaattcgtaacaggaaatgctaggagtagatattttttaaaaggtggttctaaatgagtgcctttcaacccttaactacacttcagaattgcctggagcttttaagaaattagaattccagggccctaccttcagagactcagatttcacttgtctaggtggaggaaaggtgatggtaatttttaaaagctcccaggtggtactaacaggaagtcaggactgaaaactagtgatttgtctaaactgccttggaaagttctccaaggcagtaagttaaaaaacaaaaatagaaccatagggccacatgtacagtataatactacttaatgtgattaatcccagcactttgggaggccgagggggcggatcacaaggtcagatcgagagcatcctggctaacacggtgaaaccccatctctactaaaaatacaaaaaattagctgggcgtggtggcrggtgcctgtagtcccagctactcaggaggctgggatgaacccgggaggtggagcttgcagtgagccgagattgcgccactgcactcccgccttggcgaccaagcgagactccatctcaaaaaaaaaaaaaaggaaaggaaaatcatatcatagatgcatgcacataagagaatcttgtaatacacaccaagctaatgacaaatgtttacttcttagaaggggaagtggggaattgcagggatggggggtggttagtccaggtctagggaaacatggattcatctgaattgctgaatttcttttgagaatgcattcaccatttatgttacgaaaaataaaggatgaatttttaaagaatagcataaactatcaaaatgctactgacttactcgaa

SEQ ID NO: 700978 - DNA, 1372 bp, Homo sapiens
gcaaatactatttgcaagtcccattttatgtaagggacttgaacacccatgaattttactgtctcaatgagtcctagaattaatcccctacagatccaagagtgactatataccaataactcttacaaagaaaaaaagtcaacaaaacaatagccatatgcaaacatactcaacttcactagaaactgaggataggtaaattaaaatgagatgccatttcactatcagatggataaaaatgtaagacattgatactatcaagtattggcaatggggtggaaaatgggaaatctcatcatctgtttggtaggagcataaattgatatggcctttggatgagcagccaggcagttcaaattttaaatatgtcaaaaataaatgaatagattttaaatatgtctcccctctgcttgagcatctgctcgtaggtaccaagcctagagagggagatacgcatacacacagggagcctggacaagggcatgcttactctcagtatggacctcttaggtttaaatagagcaaattcgtaacaggaaatgctaggagtagatattttttaaaaggtggttctaaatgagtgcctttcaacccttaactacacttcagaattgcctggagcttttaagaaattagaattccagggccctaccttcagagactcagatttcacttgtctaggtggaggaaaggtgatggtaatttttaaaagctcccaggtggtactaacaggaagtcaggactgaaaactagtgatttgtctaaactgccttggaaagttctccaaggcagtaagttaaaaaacaaaaatagaaccatagggccacatgtacagtataatactacttaatgtgattaatcccagcactttgggaggccgagggggcggatcacaaggtcagatcgagagcatcctggctaacacggtgaaaccccatctctactaaaaatacaaaaaattagctgggcgtggtggcaggtgcctgtagtcccagctactcaggaggctgggatgaacccgggaggtggagcttgcagtgagccgagattgcgccactgcactcccgccttggcgaccaagcgagactccatctcaaaaaaaaaaaaaaggaaaggaaaatcatatcatagatgcatgcacataagagaatcttgtaatacacaccaagctaatgacaaatgtttacttcttagaaggrgaagtggggaattgcagggatggggggtggttagtccaggtctagggaaacatggattcatctgaattgctgaatttcttttgagaatgcattcaccatttatgttacgaaaaataaaggatgaatttttaaagaatagcataaactatcaaaatgctactgacttactcgaa

SEQ ID NO: 700979 - DNA, 1372 bp, Homo sapiens
gcaaatactatttgcaagtcccattttatgtaagggacttgaacacccatgaattttactgtctcaatgagtcctagaattaatcccctacagatccaagagtgactatataccaataactcttacaaagaaaaaaagtcaacaaaacaatagccatatgcaaacatactcaacttcactagaaactgaggataggtaaattaaaatgagatgccatttcactatcagatggataaaaatgtaagacattgatactatcaagtattggcaatggggtggaaaatgggaaatctcatcatctgtttggtaggagcataaattgatatggcctttggatgagcagccaggcagttcaaattttaaatatgtcaaaaataaatgaatagattttaaatatgtctcccctctgcttgagcatctgctcgtaggtaccaagcctagagagggagatacgcatacacacagggagcctggacaagggcatgcttactctcagtatggacctcttaggtttaaatagagcaaattcgtaacaggaaatgctaggagtagatattttttaaaaggtggttctaaatgagtgcctttcaacccttaactacacttcagaattgcctggagcttttaagaaattagaattccagggccctaccttcagagactcagatttcacttgtctaggtggaggaaaggtgatggtaatttttaaaagctcccaggtggtactaacaggaagtcaggactgaaaactagtgatttgtctaaactgccttggaaagttctccaaggcagtaagttaaaaaacaaaaatagaaccatagggccacatgtacagtataatactacttaatgtgattaatcccagcactttgggaggccgagggggcggatcacaaggtcagatcgagagcatcctggctaacacggtgaaaccccatctctactaaaaatacaaaaaattagctgggcgtggtggcaggtgcctgtagtcccagctactcaggaggctgggatgaacccgggaggtggagcttgcagtgagccgagattgcgccactgcactcccgccttggcgaccaagcgagactccatctcaaaaaaaaaaaaaaggaaaggaaaatcatatcatagatgcatgcacataagagaatcttgtaatacacaccaagctaatgacaaatgtttacttcttagaaggggaagtrgggaattgcagggatggggggtggttagtccaggtctagggaaacatggattcatctgaattgctgaatttcttttgagaatgcattcaccatttatgttacgaaaaataaaggatgaatttttaaagaatagcataaactatcaaaatgctactgacttactcgaa

SEQ ID NO: 700980 - DNA, 637 bp, Homo sapiens
tttttttaggcacctttcttggatgttctcaacaccatgatggacactacacttcctctgacattagaagaattagaagaatgggggaatccttcatctgatgaaaaacacaagaactacataaaacgttactgtccctatcaaaatattaaacctcaggtagtgaaagacaattgtgttagattatcctgaatttacacagaagataataaaaaaaaaacttatccaagctgaagcaaaaataggagctttagagatgtttctacttaygatgcccaaatatcttcagcaccatctctgctcatgctccatgtttaatacctcaggggaatagacttatcatgccttaattactaaattagctaaggtcctttagtcaagaaaaggctattccagataacaagtagtctactactgtaatactgaggcgctctcaagatagcaagtgagaaaaagcatagagcacttacagggaaaaattggaggtaattatttttcatagtctctatagtggcaagggaccataagaaataatgtaaactcttcgtgcatgtattttctttcagcattatccttcaattcacataacggcatatgaaaacgatgaacgggtacctctgaaaggaattgtaagtta

SEQ ID NO: 700981 - DNA, 637 bp, Homo sapiens
tttttttaggcacctttcttggatgttctcaacaccatgatggacactacacttcctctgacattagaagaattagaagaatgggggaatccttcatctgatgaaaaacacaagaactacataaaacgttactgtccctatcaaaatattaaacctcaggtagtgaaagacaattgtgttagattatcctgaatttacacagaagataataaaaaaaaaacttatccaagctgaagcaaaaataggagctttagagatgtttctacttatgatgcccaaatatcttcagcaccatctctgctcatgctccatgtttaatacctcagrggaatagacttatcatgccttaattactaaattagctaaggtcctttagtcaagaaaaggctattccagataacaagtagtctactactgtaatactgaggcgctctcaagatagcaagtgagaaaaagcatagagcacttacagggaaaaattggaggtaattatttttcatagtctctatagtggcaagggaccataagaaataatgtaaactcttcgtgcatgtattttctttcagcattatccttcaattcacataacggcatatgaaaacgatgaacgggtacctctgaaaggaattgtaagtta

SEQ ID NO: 700982 - DNA, 640 bp, Homo sapiens
agaatttaggttgcagaggtacttgctaagagaccagccttttgaacatcattttagggtaatggaccaccttatgtttagagcataagaatgatagattcaaaaaaatatctgtggtattttaatctgttagaaacatttaccatattagattaaagagatgcaggcagtcaggtagttgtgaaataattacagagaccaaatggtaactgtagacttattatcattacatagatatgtggattaaaggaactttccttgtttactgtgaaaactgactttacagcctagaattttaaatggggaaatattatatgcctttcacaataatcactaacttagaaaaatgttgaactataattgcaagtagcagaaatgtgctgaaaaataccgcagaaggagagagaatgaagaaaatacagacgtgattaaattctgagctcttaacttgacccactgtagcaaaaagctagccgcaaaggtgctccataaatgcttcttaacagtgtggatgatgtcgccrggagctggatgttaacttgcggggtgggaaagatgaaagtatgctagaattacagaagaggagaaagttggaaggtattataaaaattaagtttttttaaataacaaaaattatttt

SEQ ID NO: 700983 - DNA, 823 bp, Homo sapiens
aggcaggagaatcacttgaactcaggatgcagaggttgccctgagccaagattgcaccactgcactccagcctgggtgacagagcaagactctgtctcaaaaaaaaaagaaaaaatgaattgaatttttcaataagattggaaaattgaaccgcaataggtgaaaatcacatacatagtagagtggaaatagtaggttaagaataaggatctccagattcaaattacgccaccaactaacagataataaacgtaagccactgaaatcatatcaaccaatcaattacatttaatatgtaggcattagacaagaacactatttatatttgggtaatattaattctctcaatttcaaattgtatttgtcaccctacagcaggtgaaatagtttgtgttaagtcaagactgtgtatagttgttggtgacagcatattttaaaggaargagtctcagaaagttatagactgggttttcaggctagtctgagccacagtttcctcatctgcatcattttggattgtcttaaagatgccacttgatttctgttaattgactcccactgtacaggtatcagatgtttctaaaatgtagcagaagtggtttgtacagttgtgagaactgacagattttgttataccttttctttattgcctcttgtatttatgtattaaaaacccctctagtggttatgaacatacgaaaaccatatcttatcaactacattgtaaaaatggtcaattttatatttcatatgtgttcattcatatacttcaacaggtctgttttttataagagtcttcatttcatcttcatcttgaatagtc

SEQ ID NO: 700984 - DNA, 1116 bp, Homo sapiens
tagagtaagtagagagcaacaaggaatattggttagaaatgtctctgtgaggaaggatgtttgagcagccgtgcttggagagagaatatctgagggaagaacattccaggcaatgasaacagcaaagactaggagggaatgttcttagtgagtgcagctgggttagaataagccagtagaaaactagaggaaaattaagaggtttgtaggaggcatatcatgtgaggactttggactttgacttgtgggaattcattggaagattttgagtacaagagtgatttgttcttttttccaaaggatctctcttagttgctgtatggagaagagattgtataaaagggacaagagaagccaaaataccgattagaaattatgcattaatgcatggtagtggtaaattggactagagtagaggggtgtaaaaatgtctggtgacatttttggtgtcatagctgagggggtgccactggcatctagtgaatggaggccagggatgctgcttaatattccacagcacacaggacagcccccacaacaaaaaaattgtctggtgtaaaatgtcggtgttgttgatgttgagaagccttatactataagacacagatttaaggtagaaaacttacagtcctgctttcatgaagcttgcagtctatgacccaataaacatcgtgtatgtgggagtatatagcattatggtatacagtacatgtcatgcatatgggagtgtattgcagtgtacctactcagacttaggtcagagaaggatttgagaatgtgacatataaaattgaaacctcaaggatgaaaataggcattcatagctgggcgtggtggctcaggcctctaatcccagcattttgagaggctgaggtgggtggatcacgaggtcaggaattcaagaccagcctggccaacatggtgaaaccccatctctactaaaatacaaaaattagctgggtgtggtggcacatgcctgtaatcccagctacttgggaggctgaggcaggagaatcgcttgaaccagggagtcagaggttgcagtgagctgagatagtgccactgcactccagtgtctcaaaaaaaaaaaaagggacattcaccatacagaggggt

SEQ ID NO: 700985 - DNA, 2940 bp, Homo sapiens
gtacatgtgataaaactgaactacatgcacaaacacacaaatgagtccatatatgaactagagaatctaaataaaggtctatagtctagttaatagtattgttttgatgtcattttcctggtttgctatcatactattgttatataaaatgtaactattgggagaagctaaaagaagggtacacagactctctctgaaactatttttaaacttaaccatgagtataatgattccataataaaacattatttaaaggaggaaaaataatctgagtcttcatatatggcttcgacaactttctacattttaattaaaaaaaatttaacatcttaaaatgcctaatatacagttctatacaggatactgaagtttttaaaaacacatcctctgaccttgaaaaatctagacaactgcaaattatttggattatagttttatggaggtttttacattgtcataattatctttttacacccatgatgcctttcttaaatcctctggtatgaatataacatttatcaaaagccagaggtattcaggaatttattttctctcacatacatttaagaaattattccacggagcctaagggtttagggactaaaataatgtccacaatctatcctcatatctaaggagatcagagccttttctgaagcaatttctctttcttccttctacgactagctttccctctctatcaatacttgcagttaacatctattgtctgagctgctcgtatgctcttaaaatatgcaaaaacagtgtttcctatgccgataaaatgctgttttctctagctccttctatactttcaaaaggaaaggcaacatcaattacttaaagcaattaagtgacacatttgggtgttatttaagaactctgggcagaaactactttctaatgaatgaatgctggtttcttggttgtatttcaaagcaattcattaaagaagcacactctttgatttgtaataagctcaatcttttaaaaaatattttaatatagagttctatgttacacagtattcaatatccctggaatttaaatgcagcaccttttaccaaaaacatttaccttaggcctttcaatttacaacactgtcttgagaaaacattttacattatttatgtaactgtccatgacggtaccttaaaacgaattactactatttctgatccattataaattaatttttgttcaaatatgtaaataaattgtgaatgcatgtaagaaatctgaaagactagaagtggccctattttggatataagtagaaatgattaaaacaattcactaacctcattaatcaggaactggagctggattactgcagctccactgtcatgctggcaataacattctactcctggacgaccaaagctgtaattaattccattaaggagtttatggtatttgttcggttttgagaaactggtaagttatataataggctgataaatattccaatgacctcatattcaatacaggccatttactgaagttgagatttagagttaggtttgttacacatcaatctaatagtttctgttgagaagtctcagagattacaggtttaaacaaaacaagcaaattagaagaaaatgaattattaacatcagcaacatattaaaacaagataatatataggtaatacattttatgctggcccaaattattttcttcatcttaaaataacaaaaagaagacaaaaggtggttggatctatagaacatccaattttgctgaagtcagcaaacaaatctgaaaagtaggcaaatgtcattttggaatgttgcttttaggaatagtaatgattttactgtcatttttcatttctgcagtgtaatttttaagtaacgctaaaaatataatgaagaaccacataactatgtttctaattgaaacatgattttgtttcaccaaatgaacgtgtcaatcttttactacaggcatggatactgattaaaatgaattggcatacaataataacagcaaatatttatataacattttccacattaggcattattatgaaaatgttatttatatcaactcatttaatcctcataactcacgaagaatgttattttcccccacttaaacagataaggaaactgaagtacaaagaaattaagtaacctgccccaagtcacataactagaagtagcgaaaatagaatataaataagctttctggctccagagtctacactctaaattaataaagtatgctgagtaaaaacatcaaaacagaacagaaaaaaaaactgtacatttgtagaactcactatgtgccaggcactgttatatgcattttaccttcataaacttgaaacaagaaggtagtcattttaactggctgctaaactaatctcattttgccagttattaactattaccctaaagtaaaaagcaaaatgtaaaaataaaatttggtgggatttaataaaattatagttgccagtatataaattcacattcaggtatggtctgtttctatattctattaatacatgccacaaagttcttaatgaaaaaattgtgccataggtttaattcttattggctatgatttcttcctttggctttctagaaattttctagatggtattcattttcaagagttttttccatttattactagcaattaattatatattttataaattaacaggttgagtatgtttagctcatagtatcctactctttaaacacctagaattattgttagtagtaatagtagtagtagtaatagtagtagtagtagtagtcataatagtaatagtagtagtagtagtaggagtagtatttttgctataccagttgctcaaatacaactgcaggaaactagaattcaaattaatagyattggcaatgtgcaaatcacaccgtgataggccaaaaaaagaaaagtctgtatctccgttcacccatttat

SEQ ID NO: 700986 - DNA, 658 bp, Homo sapiens
aagaggctgctctggtacataccagctgaatattagccctctaaacaacctttaacaaaatcatcaaaatattatgtgaacacagaataatgtaaaccccctctcagcaaaaaagaaaaaartcaaatttgaaatgaatgttttccttcaagcaaggaattagcattagttaatagaaaactgatgctaacttcttgaataataacattttaggttgggcaatgtgaaatggccatttttaaagcaaaagatggttaaaaactggcaatttcaaaggattcaacctctatattcttaatttaactatggtattgtaaattgccagtttatacacaatattccaacctgtagagctaaacacagaacctgtatattaactaatatacagctaaacacagaacctgtgtattaactaatggacttgaaactagtcaataagactaaaacttgattttactgaattatgtaagtcagtttacagtgctatgttttcctggaatttgatataaaaattgatttagagcccactaaaaatgtaattatttgtgtttgtcaaaatttgtgaaatatgcttagatgattatttaaagcctaaacctgaatgagagaaaacctaattgaacttaaattggttggatttacaatggctttttccccc

SEQ ID NO: 700987 - DNA, 641 bp, Homo sapiens
taatgtatattgtcagacagtatgtctgtactcgattcccttctctccctcttatttttggtgtagtgaacctatttgtactgtgtactttagtcaggaatttctatattctatacttcctaaagaataaaggtcttgttttttgctggaaccaggagaggaatggttacccagctgtacaagtgtgggagaggatctgaggatctgatgccttgtaaacagcctatcagccaatcttcagttttaatcccaacactgccctagaggtatctggcatcatcagatcctgagcctttttgggtttctctggtgtcagtttgattggtagttaatctcagctttctactttcagctttctggacttcccagtgcatttagccccggcatttctggttttcatctcctaaaattgtattgtaacaatagtgtcttccattcttctcatccttgtagatttatgtctcagattgttttaatgctgtattagtggcatttcatgtggagacagaagtgmgtgcatgtgtgttaagtcttctgtctttacccagaagggagacacttcgctaggcatatgcaaaagtatgatctcgctgtacatgacagtgggcattactttttgagtgcctgttatgtggccaggc

SEQ ID NO: 700988 - DNA, 644 bp, Homo sapiens
taggaacagcagcatcagtatcaccttgaaatccataagaaatgcaaattctcaggtccttccctaaacccactgaattagaaaatctgggagtggggcccagcaatccgcatttcaacaagccctcccagtggttctgacataggccgttgccagcggtaggtatgtaaattaaaggacttgggtggccactgcagtcagcagaatggtggctcccaaacatgtccctgtcccagtcccaggaacctgcaaatacatgaaattccgtggcaagggggattttgcagwtgtgattatactaaggatcttgagctgagggattgttctggcttaactacaaagaccaaatgtaatcacaagtctcttaacaggaagatgtaaggatggaggcagaagtcagataggagagaagctgctacactgctcactttggaaatggagaaatgagccaagagccaaggcagagactagaagctggaaaaggcaaggaatagattctcccctcgagcctccagaaggaacacgggcctgctgacactttgattttggtccaaggaaactcatttcagacttctgacctccagaaccgtaagagagaaagtatttgtgttgtttgaagtccctgatgtgtggtcattttgtta

SEQ ID NO: 700989 - DNA, 644 bp, Homo sapiens
taggaacagcagcatcagtatcaccttgaaatccataagaaatgcaaattctcaggtccttccctaaacccactgaattagaaaatctgggagtggggcccagcaatccgcatttcaacaagccctcccagtggttctgacataggccgttgccagcggtaggtatgtaaattaaaggacttgggtggccactgcagtcagcagaatggtggctcccaaacatgtccctgtcccagtcccaggaacctgcaaatacatgaaattccgtggcaagggggattttgcagatgtgattatactaaggatcttgagctgagggattgttctggcttaactacaaagaccaaatgtaatcacaagtctcttaacaggaagatgtaaggatggaggcagaagtcagataggagagaagctgctacactgctcactttggaaatggagaaatgagccaagagccaaggcagagactagaagctggaaaaggcaaggaatagattctcccctcgagcctccagaaggaacacgggcctgctgacactttgaytttggtccaaggaaactcatttcagacttctgacctccagaaccgtaagagagaaagtatttgtgttgtttgaagtccctgatgtgtggtcattttgtta

SEQ ID NO: 700990 - DNA, 747 bp, Homo sapiens
tattttctagtgcaaatgagaaaattatgacctcttgaggtatgtactgctattatkctcatcctcattctataggggaaacctgaggtaattaatatgtctaatgatgacctcctgaggtatgtactgctattatgctcatcctcattctataggggaaacctgaggtaattaatatgtctaatgatgacctcctgaggtatgtactgctattatcctcatcctcattctacaggagaaacccaggtaattattgtgtcagcagtggtgctgaaaaatatgctggtctttaaaccaggtttatctggctctagagctcacacatgtcgtcactaagtcagtggatcttaaacatgaacatacggaagaaatatctagaaggtttggtaaaacacattgcaaagccccactctcagaatggctggtccagaaggtctgggatggggcctaagaatttgcattttcaacaagtacccacttgctgctgatgctgccgatgggcagtcatacttccagaaccactgcattaagttaaccttgtgccacatgggctacattatatctggtttcttcactaatgatactatagtaagacaaaatttccttatcaattggattagcagttaaagatatccctcagtgcgttacagcagagtttctcaaactttaacatacagatcatctggggatcttgctaagatgcagtttttgcttcagtaggtctgaagtaagaccctagattctgca

SEQ ID NO: 700991 - DNA, 747 bp, Homo sapiens
tattttctagtgcaaatgagaaaattatgacctcttgaggtatgtactgctattattctcatcctcattctataggggaaacctgaggtaattaatatgtctaatgatgacctcctgaggtatgtactgctattatgctcatcctcattctataggggaaacctgaggtaattaatatgtctaatgatgacctcctgaggtatgtactgctattatcctcatcctcattctacaggagaaacccaggtaattattgtgycagcagtggtgctgaaaaatatgctggtctttaaaccaggtttatctggctctagagctcacacatgtcgtcactaagtcagtggatcttaaacatgaacatacggaagaaatatctagaaggtttggtaaaacacattgcaaagccccactctcagaatggctggtccagaaggtctgggatggggcctaagaatttgcattttcaacaagtacccacttgctgctgatgctgccgatgggcagtcatacttccagaaccactgcattaagttaaccttgtgccacatgggctacattatatctggtttcttcactaatgatactatagtaagacaaaatttccttatcaattggattagcagttaaagatatccctcagtgcgttacagcagagtttctcaaactttaacatacagatcatctggggatcttgctaagatgcagtttttgcttcagtaggtctgaagtaagaccctagattctgca

SEQ ID NO: 700992 - DNA, 747 bp, Homo sapiens
tattttctagtgcaaatgagaaaattatgacctcttgaggtatgtactgctattattctcatcctcattctataggggaaacctgaggtaattaatatgtctaatgatgacctcctgaggtatgtactgctattatgctcatcctcattctataggggaaacctgaggtaattaatatgtctaatgatgacctcctgaggtatgtactgctattatcctcatcctcattctacaggagaaacccaggtaattattgtgtcagcagtggtgctgaaaaatatgctggtctttaaaccaggtttatctggctctagagctcacacatgtcgtcactaagtcagtggatcttaaacatgaacatacggaagaaatatctagaaggttyggtaaaacacattgcaaagccccactctcagaatggctggtccagaaggtctgggatggggcctaagaatttgcattttcaacaagtacccacttgctgctgatgctgccgatgggcagtcatacttccagaaccactgcattaagttaaccttgtgccacatgggctacattatatctggtttcttcactaatgatactatagtaagacaaaatttccttatcaattggattagcagttaaagatatccctcagtgcgttacagcagagtttctcaaactttaacatacagatcatctggggatcttgctaagatgcagtttttgcttcagtaggtctgaagtaagaccctagattctgca

SEQ ID NO: 700993 - DNA, 747 bp, Homo sapiens
tattttctagtgcaaatgagaaaattatgacctcttgaggtatgtactgctattattctcatcctcattctataggggaaacctgaggtaattaatatgtctaatgatgacctcctgaggtatgtactgctattatgctcatcctcattctataggggaaacctgaggtaattaatatgtctaatgatgacctcctgaggtatgtactgctattatcctcatcctcattctacaggagaaacccaggtaattattgtgtcagcagtggtgctgaaaaatatgctggtctttaaaccaggtttatctggctctagagctcacacatgtcgtcactaagtcagtggatcttaaacatgaacatacggaagaaatatctagaaggtttrgtaaaacacattgcaaagccccactctcagaatggctggtccagaaggtctgggatggggcctaagaatttgcattttcaacaagtacccacttgctgctgatgctgccgatgggcagtcatacttccagaaccactgcattaagttaaccttgtgccacatgggctacattatatctggtttcttcactaatgatactatagtaagacaaaatttccttatcaattggattagcagttaaagatatccctcagtgcgttacagcagagtttctcaaactttaacatacagatcatctggggatcttgctaagatgcagtttttgcttcagtaggtctgaagtaagaccctagattctgca

SEQ ID NO: 700994 - DNA, 747 bp, Homo sapiens
tattttctagtgcaaatgagaaaattatgacctcttgaggtatgtactgctattattctcatcctcattctataggggaaacctgaggtaattaatatgtctaatgatgacctcctgaggtatgtactgctattatgctcatcctcattctataggggaaacctgaggtaattaatatgtctaatgatgacctcctgaggtatgtactgctattatcctcatcctcattctacaggagaaacccaggtaattattgtgtcagcagtggtgctgaaaaatatgctggtctttaaaccaggtttatctggctctagagctcacacatgtcgtcactaagtcagtggatcttaaacatgaacatacggaagaaatatctagaaggtttggtaaaacacattgcaaagccccactctcagaatggctggtccagaaggtctgggatggggcctaagaatttgcattttcaacaagtacccacttgctgctgatgctgccgatgggcagtcatacttccagaaccactgcattaagttaaccttgtgccacatgggctacattayatctggtttcttcactaatgatactatagtaagacaaaatttccttatcaattggattagcagttaaagatatccctcagtgcgttacagcagagtttctcaaactttaacatacagatcatctggggatcttgctaagatgcagtttttgcttcagtaggtctgaagtaagaccctagattctgca

SEQ ID NO: 700995 - DNA, 747 bp, Homo sapiens
tattttctagtgcaaatgagaaaattatgacctcttgaggtatgtactgctattattctcatcctcattctataggggaaacctgaggtaattaatatgtctaatgatgacctcctgaggtatgtactgctattatgctcatcctcattctataggggaaacctgaggtaattaatatgtctaatgatgacctcctgaggtatgtactgctattatcctcatcctcattctacaggagaaacccaggtaattattgtgtcagcagtggtgctgaaaaatatgctggtctttaaaccaggtttatctggctctagagctcacacatgtcgtcactaagtcagtggatcttaaacatgaacatacggaagaaatatctagaaggtttggtaaaacacattgcaaagccccactctcagaatggctggtccagaaggtctgggatggggcctaagaatttgcattttcaacaagtacccacttgctgctgatgctgccgatgggcagtcatacttccagaaccactgcattaagttaaccttgtgccacatgggctacattatatctggtttcttcactaatgatactatagtaagacaaaatttccttatcaattggattagcagttaaagatatccctcagtgygttacagcagagtttctcaaactttaacatacagatcatctggggatcttgctaagatgcagtttttgcttcagtaggtctgaagtaagaccctagattctgca

SEQ ID NO: 700996 - DNA, 2074 bp, Homo sapiens
ggaaaccaaagcaactgcctaggaaattatttctagagttcagttggaagggatctgcactttgattctggccatctgaaagggttgggaaggagagcaagaaggcctggcagtttttagtaaagagagactaggggcattatttcttctttctcatttatttgccccatctcttttatttcttttcttttctttttttttttgagacggaatcttgctctttcatccaggctagtgtgcagtggcatgatctcggctcactacaacctccacctcctgggttcaaacgattctcctgtctcagcctcctgagtagctggactacaggcgcctgccaccatgcccggctagtttttgtatttttagtagagacgggatttcaccatgtttgtcaggctggtctcgaactcctgaccttgtgatctgcccgcctgggtgtcccaaagtgctgggattacaggcatgagccaccgtgcccagcccatctctttattttcttgaccacagtggcatatcacagaagagagaggacgtgttcctattcctctggatttcttttatcttagcagtaaaacatattggtaacatgtttgacaagaagcagacttccacagcggctgtgcagggagacaagagacctgggttctcaccatgccatgtcatgcttttcccatgtgaccatggctccttctcaaaagtcaggctgcatcttctccatctatgagcgttggtttgtaacagtacctacagcactccttttcctgccacattgcttttaggaaatgctaataggagtgccagaagagttcaaggttcaaatatatttatgaaatattttaattgtattttcttcctggaaatttaaaatgaatatcagcatattaacaacttgagaaatttcagcagaaaaaaaaaacgcctgtggaattacacatatcccaacatctctcaacttcacatgagtatagagcttatatttattccacagagccatgygccaaggaggcacaggctgggaaaccctggatgaggcccttccaaacttcccaccactaacacacctctgtaatgtggtgatgtggttgcaaacgggctctgagtgctacagtgacagaagtagctcatgtaagagttttctcttacctctgcgtgttgccccagcaagtgaggagcagacagcatttaatactttcaaagtgagaatgcaagagtgagccctggaggcaaggcttaattgctggattttgaaaaagggaataaaagcccttccctgcgaatgtcaaatgtatcctgcagatattttcccatcatggaaagtctctgtgttgggcagttttcagaacctagacagacaggtgaaagggggatctctctaatttcttttcatttccccaggtaataacactcttgagcgacactcagctgcctcctctgccagactattaacctgcagctctcttgctgagtttccctgaagctcagggaaggaagtccagaggactaggtgcttcccccgcgcgaagagctgctactgatattacttttcctaacctttactccaagagcttatttttttaaatgagaaataggctgtgagagaaaacctctccaagaaggtgaaacaaatgggcttcattcagtctggagggtgataaaagaaagagggtgataaaataactgtctgtgagggccaagagaggttaggcaggagggagatgtttcttctcattagaaagtggaaatgcactcctaaggaatgactttagaggaagaagtatattggaggtgaaatgtaaaaagaaagtgaaaagataacaaatattaatggagtgactggatggatgcatggatgaatagatggatgggtggatggatgtgtggaaaatggagaccatttgtcaacccaatggatgattgactatgttcaagagtgacaaagcaaaagtctaggttaacagtaaatttgtttaaaaatgtcactctcagcactgtgggctttaagctagtctgacacatcaattgcagatactcgatgattataatatgcaataataacatctgtgtttttttggca

SEQ ID NO: 700997 - DNA, 2074 bp, Homo sapiens
ggaaaccaaagcaactgcctaggaaattatttctagagttcagttggaagggatctgcactttgattctggccatctgaaagggttgggaaggagagcaagaaggcctggcagtttttagtaaagagagactaggggcattatttcttctttctcatttatttgccccatctcttttatttcttttcttttctttttttttttgagacggaatcttgctctttcatccaggctagtgtgcagtggcatgatctcggctcactacaacctccacctcctgggttcaaacgattctcctgtctcagcctcctgagtagctggactacaggcgcctgccaccatgcccggctagtttttgtatttttagtagagacgggatttcaccatgtttgtcaggctggtctcgaactcctgaccttgtgatctgcccgcctgggtgtcccaaagtgctgggattacaggcatgagccaccgtgcccagcccatctctttattttcttgaccacagtggcatatcacagaagagagaggacgtgttcctattcctctggatttcttttatcttagcagtaaaacatattggtaacatgtttgacaagaagcagacttccacagcggctgtgcagggagacaagagacctgggttctcaccatgccatgtcatgcttttcccatgtgaccatggctccttctcaaaagtcaggctgcatcttctccatctatgagcgttggtttgtaacagtacctacagcactccttttcctgccacattgcttttaggaaatgctaataggagtgccagaagagttcaaggttcaaatatatttatgaaatattttaattgtattttcttcctggaaatttaaaatgaatatcagcatattaacaacttgagaaatttcagcagaaaaaaaaaacgcctgtggaattacacatatcccaacatctctcaacttcacatgagtatagagcttatatttattccacagagccatgcgccaaggaggcacaggctgggaaaccctggatgaggcccttccaaacttcccaccactaacacacctctgtaatgtggtgatgtggttgcaaacgggctctgagtgctacagtgacagaagtagctcatgtaagagttttctcttacctctgcgtgttgccccagcaagtgaggagcagacagcatttaatactttcaaagtgagaatgcaagagtgagccctggaggcaaggcttaattgctggattttgaaaaagggaataaaagcccttccctgcgaatgtcaaatgtatcctgcagatattttcccatcatggaaagtctctgtgttgggcagttttcagaacctagacagacaggtgaaagggggatctctctaatttcttttcatttccccaggtaataacactcttgagcgacactcagctgcctcctctgccagactattaacctgcagctctcttgctgagtttccctgaagctcagggaaggaagtccagaggactaggtgcttcccccgcgcgaagagctgctactgatattacttttcctaacctttactccaagagcttatttttttaaatgagaaataggctgtgagagaaaacctctccaagaaggtgaaacaaatgggcttcattcagtctggagggtgataaaagaaagagggtgataaaataactgtctgtgagggccaagagaggttaggcaggagggagatgtttcttctcattagraagtggaaatgcactcctaaggaatgactttagaggaagaagtatattggaggtgaaatgtaaaaagaaagtgaaaagataacaaatattaatggagtgactggatggatgcatggatgaatagatggatgggtggatggatgtgtggaaaatggagaccatttgtcaacccaatggatgattgactatgttcaagagtgacaaagcaaaagtctaggttaacagtaaatttgtttaaaaatgtcactctcagcactgtgggctttaagctagtctgacacatcaattgcagatactcgatgattataatatgcaataataacatctgtgtttttttggca

SEQ ID NO: 700998 - DNA, 2074 bp, Homo sapiens
ggaaaccaaagcaactgcctaggaaattatttctagagttcagttggaagggatctgcactttgattctggccatctgaaagggttgggaaggagagcaagaaggcctggcagtttttagtaaagagagactaggggcattatttcttctttctcatttatttgccccatctcttttatttcttttcttttctttttttttttgagacggaatcttgctctttcatccaggctagtgtgcagtggcatgatctcggctcactacaacctccacctcctgggttcaaacgattctcctgtctcagcctcctgagtagctggactacaggcgcctgccaccatgcccggctagtttttgtatttttagtagagacgggatttcaccatgtttgtcaggctggtctcgaactcctgaccttgtgatctgcccgcctgggtgtcccaaagtgctgggattacaggcatgagccaccgtgcccagcccatctctttattttcttgaccacagtggcatatcacagaagagagaggacgtgttcctattcctctggatttcttttatcttagcagtaaaacatattggtaacatgtttgacaagaagcagacttccacagcggctgtgcagggagacaagagacctgggttctcaccatgccatgtcatgcttttcccatgtgaccatggctccttctcaaaagtcaggctgcatcttctccatctatgagcgttggtttgtaacagtacctacagcactccttttcctgccacattgcttttaggaaatgctaataggagtgccagaagagttcaaggttcaaatatatttatgaaatattttaattgtattttcttcctggaaatttaaaatgaatatcagcatattaacaacttgagaaatttcagcagaaaaaaaaaacgcctgtggaattacacatatcccaacatctctcaacttcacatgagtatagagcttatatttattccacagagccatgcgccaaggaggcacaggctgggaaaccctggatgaggcccttccaaacttcccaccactaacacacctctgtaatgtggtgatgtggttgcaaacgggctctgagtgctacagtgacagaagtagctcatgtaagagttttctcttacctctgcgtgttgccccagcaagtgaggagcagacagcatttaatactttcaaagtgagaatgcaagagtgagccctggaggcaaggcttaattgctggattttgaaaaagggaataaaagcccttccctgcgaatgtcaaatgtatcctgcagatattttcccatcatggaaagtctctgtgttgggcagttttcagaacctagacagacaggtgaaagggggatctctctaatttcttttcatttccccaggtaataacactcttgagcgacactcagctgcctcctctgccagactattaacctgcagctctcttgctgagtttccctgaagctcagggaaggaagtccagaggactaggtgcttcccccgcgcgaagagctgctactgatattacttttcctaacctttactccaagagcttatttttttaaatgagaaataggctgtgagagaaaacctctccaagaaggtgaaacaaatgggcttcattcagtctggagggtgataaaagaaagagggtgataaaataactgtctgtgagggccaagagaggttaggcaggagggagatgtttcttctcattagaaagtggaaatgcactcctaaggaatgactttagaggaagaagtatattggaggtgaaatgtaaaaagaaagtgaaaagataacaaatattaatggagtgactggatggatgcatggatgaatagatggatgggtggatggatgtgtggaaaatggagaccatttgtcaacccaatggatgattgactatgttcaagagtgacaaagcaaaagtctaggttaacagtaaatttgttwaaaaatgtcactctcagcactgtgggctttaagctagtctgacacatcaattgcagatactcgatgattataatatgcaataataacatctgtgtttttttggca

SEQ ID NO: 700999 - DNA, 2542 bp, Homo sapiens
tttctcagtccctctgagctcttagggcccactactactcagttgacatttaatcgcatatcagaagttattaacttaccagagggtgaaggttcaaaggtctttgaaagcctttaataacttgttataaaatactaattaaatggtggttttaagatggtagtagtgggagaggttagagaaagaataaaactgtagtagttcaaggtaagtctgaaagtttacttctttcatttaacaagtttgaatacctactacattcgaggcacttctttgtgtatattaaaatgttaatattagtgtaactgaacctccatgggcaactgttgctatgagaacaaaggaaaaagtgcttaaaccttttgtggcctgaacttgctggactgtaggaacaggatgagatgtaaaccacaatgatggtttctattgccagggtgtaaggattatgtctgggcatgggcttccttattggtaaagacccttacatacagttcaactcactaatactctttttttcctgaggacctcaaggatagtcatatgtactttgctctcacttttgtcattattgtcagccaaggtagtacctctgcaggtcagatcccattacttcccagcagtcacggtgaggatatcgcacagccctctaaattgtccaaagggttctgctacttagaaacactaaaagtctgacttttataccatgcccattcagttatcccctcaatgctctcaatatttgatcataagatgacaaaaaagtattcagaacaactgttgaaagttcagagtatttgaactcggcacaggcagatctgtgttgctggaagggagaagaaactttacctgagagattaaagtaattgttatttttacttgaagtgtccagtggtcctaggaccaggaaagaggtagaagagattcacctaacagcctctaggatacctgaactcctcagtctaccttcctgatgccagcaatgggaccactgtggtcagggatcactttggggtgcacagtggcagggaatagagggaagataaaaagaaactgtcagaagccttgttgaccgaacatccaaaagtaagcttcaaacacacatataattcaagatgttctaaaaagtatttgtaaaactttatttattcatatgatgagtatttttaggcccagacttactgaagacaaagggaaggtgataagcaattttaatatagcttataattggtttgatttttaaaatccaagttaacaacattcaagacaaaggtcatgtttatttttaatatgctaggcaaatgggggatatgaacctttcatttccacaattaaaagaatatagttgacaaatatatttggttttcatttttgccattgaaaaaagagttaagtaaatcagtaagaattgtttccacaagaaagaaaaattacaaggaaattacttataaaatgtagtcaaatttcctaagtctctaagttattttcagttggacttactcaaaatgtaaggaaaaaaattaagtcttaataaaattgtaagtcttaataaaaactttaaattttaataaacacacatataattcacaaattatgccagtcagctgatatagtttaggctcctagtcacatgaaatatgataccctacaacgtatttgaagtaaaacaaaattttaaccattttggagtagaaattagaggaagccaattttattgaaaaagccttaaattgattcaaagagtctgatactaaaataagctaaatgtttataccttggcagtctacatagatggtaattatacaagtgtgtctccactttataatagttttaaaattataatttcttctccatgcctttcatcataacacaattactaccgcatagttagtactatgataagaagccaaaaytaaaggtgaagttgagaaagtattacctgatgagaaaattttggagaaaacataaacattctagatcaagtattttatatacttaggtacattatgtagcatgtaatcaatgtaaaatagcttacaggattacagcaagccatcttctcctctgtgctgtaatactgtcagtttttttttagaaagataaatttgatatcaatacgatgtgacacaactgcatcaaaccttaatttcactcacagtaagaagtcacaggattaaataacactgtgcagtcttttagaaaagtttattgcttccagatggattcaagtttcctttcagccctgattacatctaatatgcacagggtgcaacattataaaggacagagtcaaaaatatcatttatatagatagcaagaggtgaagcaggggaactctggcttctaaataggttctgctaatcaagtcttaactatttttaagaaatcacaatcagcatttaatgaaaaacaaacatcatactatataaatgtcttcaataatggctgttccacagaaaaacacaaatctacactaaagtagccataaagtgactcctagctcaagccgcatgctctttgcccccatgttgggctgtgccatgtg

SEQ ID NO: 701000 - DNA, 1360 bp, Homo sapiens
atgagctcccccaggaattaaggagtggtgattaataaaaaccagcttctctctctctgaactgtacaggcccttggatcaagctaaattcccatttccaggtctctcctcatgctattcctcagctgtaagaccagttcttctcttccctaattcattgtccatatctccatcacaagtcaactctaaactcaacatttttgagttttccttaagccagttccctgactcttcagcacagcctctttcttatggactcaatttaaactacaataatgtgtgtttgttgacattttctatgttagagaagtttacctcagtattttacttcccatcaaaataataaatttctccactgtttttttttttttgagacagagtctccctctgtcacccaggctggagtgccgtggcacaatctcggctcactgtaacctctgcctcctgggttcaagcaattctcctgcctcagcctccccagtagctgggactacaggcatgagccacaacacctggctaattctgtgtatttttggaagagacagggttttgctacgttggccaggctggtctccaactcctggcctcaagtgatctgcctgcctcagcctcccaaaacgctgtgattacaggcgtgagccaccacgccaacgaaatgtctccactttttctgagcaatgaccttctccatttcccatcttcccaaaaactgctagaagaatgcataggtaaatactaaatagttaactgataaaaatgagatacttatggcacaactatttaacaaagcagactgtcattcattagtcttttgaatatatttaagtgtttgtcttctcattatcttccctaaacacaaacaatttagatttgcaatttcaacattcccatccataaacatactttcaagtgatacccaaaagcagtcttattaaatgatcttttaaaaaggcattccacacattgtccacaaatagcacttctttttctttttcaggagagcctttctaatagtgctacttttactttctttcagcaagattacccaagtctttgacaacactaggcagacaatgacattccaggaaaagactaccaattgtttaagagcagaaaagactatatggctttaataagacagcattgtttattgcccaattaagtataaaatttgaaagttgtttatagtcaaggttggatatcttcatctttatcttctcatttcaaaaggcttgtttaaaaactcaaagatatagcaaaggayaccttgaagacagaaacttgaatttgtgtttaaatggctaatgaaaacaaaaacagtaattgtaggtatgcctcactatatataataaacaagccc

SEQ ID NO: 701001 - DNA, 1487 bp, Homo sapiens
ttataacactatttatttgaagcygtatctatgtctacccatggctcagtaagccattttgtttcacagtaaaaatcattaaatgagcatgtcatatattttctaatatatttctgtaaaatttagtacatgtatatgagtaaaaattatagccaaaaaagtcagtagtgtggggagtaactagggagttgactaaccaatctttaacattgatcaagcagcagtttaaaacttccagacagcctgaatgataattgttagaagacgctacttccatgtgtccaagttataatgctttggtcaactaattaagagcccttagaaaatcctttactacatataagtgaaacataaaagtccaatattcaaattaattattttaggtctgaatattaacaaatgccactctagtcatctatcactcgtcacacatttattgaacacctactgtgtgttagacactgtgttaggaactgaggaaatagaggacaaagattggaccctactgtcttacatagctcagaatgtctaggacagaccaacaaaagaaaaatggtgggattttatgttgtgagtcatgaaaaggcatgcccagggtgctataaggctcagagaaaaccatctgacagagaagacccttagtccaaatcttgatggatgagttggagttacctgcacctttttcctccacaagaaaaaaagaaaaacatgttctgagctctgggacagcatgggcaaaggcatccctctgacgcatttgaggaaatgctgaacagagtgggttctgtttctgggatgctccgggaagtgagtggaaaacagaaagtagagctttgtataccctgaaaaggtgcttgcacttttttccttaaaatcatgtggagttgcaggatttgacataaatgaggattttaagtgatctgatttagagatcatctggcggccactgtagaatggatcaaggggaacaagactaaaggcagagacagcagtgccagaaagcagagaatggccatgagaaaattttaggaagaatgagtagaacttggctattggttgtatcagggctgagggagaatgtgcagtgtaggaccactaagcagtgtagatgagattgctcataggatactcggaagcaggaggagcagcagtttggctcaaggagaatgaagaatgatgatgaattcaggtttggtgcagtggatctgctaagtgaagaggacaatgggcagttgcttacccatcaacagctcaagaaagtgatattagtggaagtagagatttggtagcatcaacccgcacggtaatctctgaaactataaatgtgggtgagatttcccaggaagcaagtatgatgagaaaagagaagagagctaaatcctggggaatgttgacttttaaatgactagcccaagaatccaagaaaactgaaaagtaggaagtgaagatataagtaaactaagagtgggattacagattctttgaaa

SEQ ID NO: 701002 - DNA, 1996 bp, Homo sapiens
atatgttgatttttaagcaatctgttactttgtctcttacaagcatttcaatctgacaatatcctgagaaaaattccaacatttgacaacagaaacagaaggatcttcactttaagtgtctgactctcctcccaactatagtgccctagatatttctagaaatatagacagataatacacatacacacatacatgtatatgaatatatatgtgtatatatgtatgtgtgtacacatgattaatctcagtatatatttgcatcttatccattttagaaaatcaatttaagaaatcataacttcctctgaactctcagatatcaagtcttatgaagtcttcataagttaagatgaaagagaaatttgataactttaaaataaaatgaataaatcatgaaaatgaagaaagtgagaaatatcctcacttatattcataaaagctgagtttcctggaatattttaatcacattttgggcataaaatttggcagtggaaaatgaaaaataaagactttcataccacaacatattaaatagatatgaaatactactctttgcttacaatcccatttgaacatcctcactttataaatagatgaactttaaaattctcaaattgttatttaaaggtctaaaatatggcatatctgagcattcagtgccttatctcttagctttgcacaatgcatcagctttgtcctgggctatgaactgaatgtatttggcacatgcatattcattacttccccccaaatcccatatttaagatgaaatcctatagagaactttcttctaaaatcctgacacttgtctgcatatattgaacttaatggtttttgtcacgttttgtaggaatatttaaatgcttaatatttgttactaaacctctgatatgaagaaacaagataactgtctcagtttcttctctgctgttagaacaccacagactggataatttataaagaaaagagacttatttggctcatggttctggagggtgagaagtctaaaagcatggtgctggcatctggcaaggcccttcttgctgtgtcctaacatggtgaaaggcaagagtgcacatgagagagagaggcaccaggggctggacttgctttttaacaacccactctcatgctaacctactcccatcataatggcattagtccatttatgaagtttctgtcgtattgacccaatgagctcttattagtccayatcttccaacactgtcacattggagattaagtttccaacacacgaaatttcgggaaacacatttaaacaatagcaataacaaactttttcctggggactcacttttatttaataccacaagaaaaaaataaataatctcacatacatagttcttaaataataaagaatctaataaacttagattctttaggtataaaagaaagaaatttctaaccagttcagtcatgttggagtaaattctcagtaaattcagattccaaactccttttcagggttcttttctattatcttaagagtttctttgcccccttttctttaccaaagttttaacataagcacagtggattatgtaccttcatagatgaagatgtatagacctttaattgggctgcttttgcctgggccttaacattttcatagtaaagagcttggcatggcctgattccatggtcgtgtgctagactctgccaagttttgttttatcccatgtatcatttggagccttgtgctagttgcaataagatggagattatgttcctgtcattaggtcctgaaatgcttgagtcctgtggcctctttcactacacagctgtaccaagttaagtcttttcagcacctccatatctcttcatccgtaagtcatcacaatttttttttgcatactgtgaatagattatactttcatttttcaagacacggtcttttaaatttgcagatctatgaacattgaacacagtgggtaattgtgtctaattgacacaatttaaaattccctaatttaaa

SEQ ID NO: 701003 - DNA, 1232 bp, Homo sapiens
tgaaaacatgcattatttgtctttctgtgcctggcttgttcctcttaagataatggcctccagtttcttctgttttgcggcaaaagacacgatttcattcttttttatgactgagtagtattccaggtacggctgtttttcactttactgtgtattgtgaggttctccaaagtgctgtacttatgtcccttcctactagcattgattgaagctccactcttccgcaaatttgtgaagaaaatgtaattcattgtcattttagtttacattactgtacattacattacattgttaattacttctcattggctagcaagattgaacatctgtgtatgtttgtatgcataagattttctcatctgtcaattgcttacatgtgtccattatatatttgaaaggcttttcatattctctggatacaattctcttttttggtaaaaaaaatatattttttagtatattacttgtattttaatgttgattatactatgttttattatatgagttataaatgataatgtagccatatttatcaaatatttcctttattattcatacaaattttgtcttgtgaaataaattattctccatcccaaggtttgggatgctaggttttgtttgcataaattttattcaggattatatacatatatgagtatataaatattatatatacatatatgtacaaatacacatacatttcatacatattatatatcaatgaagacatgtaatgtactatgcatataaaatattgacaaatattacaataattatataattggtcatttaactcaaataactaaaaaactgacaaattattcccaactctttgtgttgctgttgtcttacatataaaacggagattatttatcttaatgtgttttgtcagtgctttaaacacttataaaagtgaagtgcttagatcagtgcctggtatcttaaaacgcttaataaaaactcggtatcattttgtcatcattattaygttttacacgtttgttttctggccttggtacaaggctaggctaacgtaataaaatggcatgaacttcattttgtatgattttaaaaaatatctactctatcttacaatctatttcataatacaagtattatgtgaacatgattttttttccttacaaccatttaggttgtttgtacattttatgagtctttaactaaaatgctttttatacatgctctctctcttttatatttaatttatattg

SEQ ID NO: 701004 - DNA, 570 bp, Homo sapiens
aataatgtcagttccctgaacaaacattttccatggaaaaatatttaatagtgtcccaaatcctttactctggctggtaagattgtggatgcctaatattttcttctttgtttctgtctcttcttattaaccagaaaaaaaaaaaaaaaaaaccttccacacttttcctttttccatagtagtgagaacagttctgagatcactctctggtggccctccttgaatttgtctttattggctgtgtcaccatgtcacttaccctccctcgatcccagattatccacacctgtaaaatacagttcatacaaggactgaatgagaaaatgcatgtaaaacacccaacacagtccttaagcaatggaagcttgggtactgagaagtgccygtaatactggccttgttaagtatttgttaacagatcagtggaacataatcaactacttctctctcatttcctaaccctctataacctaaaaccttacccttggcctcagttcagagttcactgtcagactgggttttattttggtagggtcagcctggctgtccttgtgttttcatctgtctctg

SEQ ID NO: 701005 - DNA, 609 bp, Homo sapiens
agttaaaaatgttcattacaggccaggcrcggtggctcacgcctgtaatcccagcactttgggaggccgaggcgggcggatcccgaggtctggagatcgagaccatcctggctatcacggtgaaaccccgtctctactaaaaatacaaaaaattagccgggcatggtggtgggcacctgtagtcccagctactggggaagctggggcaggagaatggcgtgaacccaggaggcggagcttgcagagagccgagatcgcaccactgcagtccagcctgggcaacagagcgagactccgtctcaaaaaacaaaaaaaaatgttcattacagcaaaactgtaatcaaggaaatcgagggtctccaagacaggagtgaggagggtagagcagagggccaggggacactcagagggacacggcacatggagactcagtggaagggggactgggcaaggctcaagttctgccttaaatgactggtaagtgatggaaaaagagaaacctcagaggaaaagcacatctggggcaagatcagtgagtctcattttagtattagttgtaagctgggtttcatcagcaagtgaatttgtccatctggggctgggaagaga

SEQ ID NO: 701006 - DNA, 602 bp, Homo sapiens
acagggttattggtcaggtttttcaaaggaaatagagtgcaatatttttctcagcttctgatgctgaattgctgtatcatcttgagtcaattgcgtcttattatgctgttagttacctgatccataaaatggggacatgacacatttttcctgtgtcaacactcattataaataactctaaatacatcctgagcacttaatagatctgttatacawaaacataaattttcctctactaattagatgtcaccattgacaccaaagcctgaccactatgactgctgagctgtgtttaatttattcttgctgtaaaaataacaggtaattaagaatgaattatttggctttaaatactctccctgtaccgcaaatataccacaaacacatacactccatccataggcatacacagaggcacaaactcattatctttactatctttaccattaccaccacgacctatgttaatttccattttgtagtcaaatcctctctccagaaagtatattacatatatagtatataaagaatacacagcattcattaaaatatataatcccatgcttattttctcttttaataagtatgtagtttttaaaatt

SEQ ID NO: 701007 - DNA, 1641 bp, Homo sapiens
aaaaacacaaattggtgacaaaccatggcactaaatagactgtgaaaaggacaattgtttacaacgtgcgagctggagcaagaaggcagagcgttgctttgctcaactcagtgggatgtgtgccttgggtgactcaaatgtttcaaarctctgtgcacatccaccagtgagcatgaaagcacctcgggtatcaattttggggttactaatcgatttcagcagtgggagaattcacaaatacggaatctgtaaatgatgaggatgggctgttttgttgttttcagctgctgagtttgtgatcacttgttaggcagccatcgccaactaactcagtctctcactgccgtcactctgcctgccggcaaaccccagccaagctccctctcagaaataaaattctgtttccggtgaacatgctgtttcatactctgactttctttgccttcagtcttcctttgaacgtgactcctgttctgcacgtatgaggatgttaaacaaatactgttcttctgacacaacctttctgttacttgagtgttttatagtacattcctagaactcctatgtattagaaaagcacaaggagctggaaggctttgctgcacttcataaaaatatggtctctgtagcagacacaactcattccctcagcctggcttaaacatgaggtcaaatctcctttattcctcattttaaatcatcacatggtttaagcttttttcgtatcccgcaagatcatttttcttgcttttgcaagaatcccacttcctttccctgatggatcaaagaattccagagctcactcaccatgactcacccatgccccagccaagttcacagggccgacagaaaaccaggaaagtcgttctgtcctctggccagcccaggccttggctgcattgctgtggtcattgacctgctgcacaatttctcaaccccagggtcaccggccaccagcgactttcctttcctctcttctataccattacagaaaattggttgaatatctccatgtgactgaagcagggactgtcccctctcacatctgtccctcagtgcaggcaccctcgccctttggacacaatcctgaatatcagaccagccagatgtgtcccacattcattggcagaattgaagctgaaagaccccagatcctgctctgtacagcctgggcttagcgctgtctccagtaactgagctgagtaggttgacacctgtgcataaagccattgcttctcccaaggcttgcacagaagatttagtgggcaggttgctagcaccttctactctccactcaacattgtctcagagaccatcatctaactctccacattagtgcacccctcaccctccgaatatggaatctgcccctccctcaatcagtcctcaaaaccagcctgccctcaagacagggtaaaaaaccctcccgggtgcatgtacagatcctcctccttttacaacggggttatgtcctaataaacccattgtaagttgagaatatcataagttgaaaatgcactcaatacgcctcgcctacccaacattatagcttagcctagcctagtttaaacatgccttagccaacagttgggcaaaatcatctcacacaaagcctatcttataataaagtgttgaatatct

SEQ ID NO: 701008 - DNA, 1641 bp, Homo sapiens
aaaaacacaaattggtgacaaaccatggcactaaatagactgtgaaaaggacaattgtttacaacgtgcgagctggagcaagaaggcagagcgttgctttgctcaactcagtgggatgtgtgccttgggtgactcaaatgtttcaaagctctgtgcacatccaccagtgagcatgaaagcacctcgggtatcaattttggggttactaatcgatttcagcagtgggagaattcacaaatacggaatctgtaaatgatgaggatgggctgttttgttgttttcagctgctgagtttgtgatcacttgttaggcagccatcgccaactaactcagtctctcactgccgtcactctgcctgccggcaaaccccagccaagctccctctcagaaataaaattctgtttccggtgaacatgctgtttcatactctgactttctttgccttcagtcttcctttgaacgtgactcctgttctgcacgtatgaggatgttaaacaaatactgttcttctgacacaacctttctgttacttgagtgttttatagtacattcctagaactcctatgtattagaaaagcacaaggagctggaaggctttgctgcacttcataaaaatatggtctctgtagcagacacaactcattccctcagcctggcttaaacatgaggtcaaatctcctttattcctcattttaaatcatcacatggtttaagcttttttcgtatcccgcaagatcatttttcttgcttttgcaagaatcccacttcctttccctgatggatcaaagaattccagagctcactcaccatgactcacccatgccccagccaagttcacagggccgacagaaaaccaggaaagtcgttctgtcctctggccagcccaggccttggctgcattgctgtggtcattgacctgctgcacaatttctcaaccccagggtcaccggccaccagcgactttcctttsctctcttctataccattacagaaaattggttgaatatctccatgtgactgaagcagggactgtcccctctcacatctgtccctcagtgcaggcaccctcgccctttggacacaatcctgaatatcagaccagccagatgtgtcccacattcattggcagaattgaagctgaaagaccccagatcctgctctgtacagcctgggcttagcgctgtctccagtaactgagctgagtaggttgacacctgtgcataaagccattgcttctcccaaggcttgcacagaagatttagtgggcaggttgctagcaccttctactctccactcaacattgtctcagagaccatcatctaactctccacattagtgcacccctcaccctccgaatatggaatctgcccctccctcaatcagtcctcaaaaccagcctgccctcaagacagggtaaaaaaccctcccgggtgcatgtacagatcctcctccttttacaacggggttatgtcctaataaacccattgtaagttgagaatatcataagttgaaaatgcactcaatacgcctcgcctacccaacattatagcttagcctagcctagtttaaacatgccttagccaacagttgggcaaaatcatctcacacaaagcctatcttataataaagtgttgaatatct

SEQ ID NO: 701009 - DNA, 665 bp, Homo sapiens
agtacttgctcttaaacatttctgattctatgtctaggggaacccatgtaagaagtggtagagtccttagatgctccagagctggaagtgtatccttaaagtcagcagcatagccaagcagtgaagcacatgagctggaatgcactgacctggaagtcattggcttattttctgtgtctgagaatcttcctatggattgttataacttgctgacaataagacaatatttgccacgtggcacaaggacttcacatggaaagggcttcttgaatacatgtataatttctttagaacctcactcaggcagaatatgccatcaccagtgatgtgagaagagggtctttgcccttttatcccttgttgtctatccaatgcctagaacagcagtaggaattaggtaggtgcagaattcatatcaaatgaatgaaactgattcaccacaaaggactggattctgttttgcaaacagcattttcatatttttcattttgcggtgtgctctgtctgaattaactgtcctataacatcacttacaatcacaactctctctttgtggctctgactgaatttttgaccagcttttrtattgaataacacattctatgatttgcaaaatgtttatttcaaccaattttatcaaaattatatttctagtcttttgtaca

SEQ ID NO: 701010 - DNA, 1586 bp, Homo sapiens
ccttacgacaggcatcctggcctggcggctgagtcagtttaacagtttgaggagaagggagcaggagggggtgtgtgcctcatacctgctttccctgtggtcattaatcatcccagacccatcctccctgctctgctgttatcttcagcagcccctctaatcccatccacccacccggctgctggttccccaggacggcagggctctttgattccagccatgccatactgagtgctttactgaagctccaakaaacatatcagccttctcatagtaggtacctgtgagggccagctctgcccattcccaccattggatttgtcctcagatttttctggtggaaccatgggaagccaggcccttgtttgatgtctgtgcaacattcacatccaaggattcaggtcactttcctatctggacctgggcccagcagataactatactgaccggcaggtccggaacattcattctctcatttaacaagtatttattggacacctaccgcgccaggcgctgttttaagccttgcagatacagcagagaatgggagagaggaaagcatttgtcctaatggagcttgatggggagacaggtaataaatgaaacaataagtgcattggggtgatccagccaagctcctccaccacagccgggctaatctccaaagcaggcagcatacaggatgtcagacaggagtggaggcagcaacaaaaataaagtaagggaggtggatgggaggtgctggtgtgggaggcagaattttaaagtagagaggctggggaagggctcccgggggtcatgggtgagtagatctggaggaattccaggtggccacaacctgggggcatggtctttggtcctgtgtgcatgacagcctacgcttgacacagaggtgatgccctttgtagtcttcatctcccactctatcccagcaccggcacttgctcattggggtccatgatcctacaacacttggaatacttgggctgctgcatcattctgtcctgttgctggtccctgcagaaggggatagtcctggcttattgggcagccttggcaggaaagctgtccctgtaccaggcatgggttgagcctttggaattggtggccaatgtcccagtgctgctgctagtgaggattgtgaaggtccatgtattgtcaaaaatgaaccttcaataacacttattgacacacacttattggccgtgtgtttcaataaaaaggaagaatgaaaggcatattccaacccattgggtctgttccatgctctgaaaatggcctgacattcatacctggtttctctctggcctataatggtcccagctccatcctccttgctctgctgttatcttcagcagcccatataatgccacccacccacctggcttctgattccccaggacagcagggctttttgattccagctgccccacgccgagtgcttcatagaagctccaagaaacataccagctgccatgtaacaatgccatgtaacacttcttttctcatcttgcaggccagaatttagtcataaggccacatctgatttcaagggagccgtggaaagatagtctttatgtgcacag

SEQ ID NO: 701011 - DNA, 551 bp, Homo sapiens
tttcgctgaaaagcaacctggacaggaggttaaacctgcagagtggaacagagtgaataaatctaggggaaaattactttgagcttcaatactaaatagcctgaattccaagactwtgtggaaaatatggtcatcaaagcctgatgctgctttgccaagtgctgtgggactagatgatttatgagataattcagggcattaagagggggacgagggtgcaaggtgaggcatttgaacccaggcacattctggaggaggttatgattacagggcagattgtccctaaggaagcaaggttgtggggccccaccatatcaggagatctcttcatcttgtgctttgagaacctgtcttgctactagtgccacctctggcctgaggacaatttattatccttctagcatttatgtgagggacactgagtccctataagcttacatgccattctctcagcaagaggtcttatctgactttcagtaaaatgatactcccactcctgctgctcgctttgtactccttctcacagctccctcttttccttgataggattt

SEQ ID NO: 701012 - DNA, 551 bp, Homo sapiens
tttcgctgaaaagcaacctggacaggaggttaaacctgcagagtggaacagagtgaataaatctaggggaaaattactttgagcttcaatactaaatagcctgaattccaagactttgtggaaaatatggtcatcaaagcctgrtgctgctttgccaagtgctgtgggactagatgatttatgagataattcagggcattaagagggggacgagggtgcaaggtgaggcatttgaacccaggcacattctggaggaggttatgattacagggcagattgtccctaaggaagcaaggttgtggggccccaccatatcaggagatctcttcatcttgtgctttgagaacctgtcttgctactagtgccacctctggcctgaggacaatttattatccttctagcatttatgtgagggacactgagtccctataagcttacatgccattctctcagcaagaggtcttatctgactttcagtaaaatgatactcccactcctgctgctcgctttgtactccttctcacagctccctcttttccttgataggattt

SEQ ID NO: 701013 - DNA, 663 bp, Homo sapiens
tgtatgctgcaccctcctgaagtgacctgggcttggctgctgcttttgaaagacacaaattgttacttgtcatttgatagccaaaaggtgctccccgcaactgtgcttaaacattgtcttatgttagttaggacacaaggctggcctgctaggccttggaaatgggtatgtcagtgagtttatgccaccttcccatagtggcagaggtgggaaggaagttggcaggtgaagggttacataagcaaaagtgggcagtacccacctacgtgtgttggcaccagcattggttcccttggaggtggttccctctgccctagaatgaccctgttggagtcagatcaactgataatcaaagccctttacaaaaacaaggtcagccccctgcaaagaaagctccatttccagtggggccaaggtcctgtttatttcatctgtggctttctcagtttagtaggatgcctttgataagctgcagtcagcacccscagtgacccttaatgacagcctgactcagccaaacgcttctggtctcaggttatggatgaatacccactgaactctggatacagatctctgaggctgtgcagatttcacatccctcttgaaaaatgaagtgacaaagtccctgtttaattcaggcccttgccacttccccatgtcata

SEQ ID NO: 701014 - DNA, 599 bp, Homo sapiens
atagattatagtccctctattatacaatatgtcacaaatcttattcctcttatctatccaaactttgtaccttttgatcaagaacttcgcatcctcttcttcccccttcccaacccactctctgataaacattgttctrctctctacttctatgagttcaatatttttaggttccacatataagtaagaccatgtgctatttgtctttctgtgcctggcttatttcagtctgtcttaaaaagtcctacaggtgattctgataaaaagctaaagttggaaattcatttttgtaaagtaattaagtgacaagggaccttccttctttttcccttttaattgtgggtatcccaattagaaagctgcagtagcatttttctcttcagctgctcatcaaattctttgagtgtgtcatgaagtatccctggaaaatgaaattctccaagtggaagaaaagaactgataatctcaaatttaagtatacaaacttctaattaacacactgtttgcagcactgtggctgctagttctcttaaccctagagctccttaaatgccacttctttagtacttaagctttctctttactttgagactatctgg

SEQ ID NO: 701015 - DNA, 571 bp, Homo sapiens
tttgtgctaggccagccacatctactaattccagtgcttgggcagctccagcagtgaatgtgcccgtctccagcatcgtcccgggagaggctggctgggttcctgttctttgttgtcasccctgactgcatgactgaaagcacgccctgtggttcccgctgtctgcaggtgacccaggtgtggaggaagctcagggtcactgtgaaatcctctaatcgcctcattagcagggtggggaggagggtgcgtttgttccacgaggaagcagaaagctggtaattgcatggtgtcacatagaaaaaaaccatggtggaagcaaaaggccaaatgtaaaaagctgtgtgtgcacagctgtaattaaaccagagcccgaaaagcaaggcccacagcacctgaccgtagaaggaaggtaaagcagtggaaactggttttgcatggggtgtgctgagaggggaagggcagaacccccactggagcatgtgcccacactgtgcaacccatttggagttgcctgtgaacatgaggtgcatgaactctataacagatggattcatttgacaaatggtccctg

SEQ ID NO: 701016 - DNA, 1323 bp, Homo sapiens
tgtctgtatgtatttagagatgcacatcattgaagattcatagttttctcttttacctagtggattagaattccatttacttatttaatttattttgatgctcaaattgtcctcaatttggccaacaggtataccttcaaaatggttctttcgatayattcattgtttgagagcctttttgctttcaagagtacataacaagatattcatgggacattttttacttctcctgcaccgacctaagaatcagcactttatccaaggatccatcattcctttttgtagataatagtattaaaatgtatattaatagtattaaaatgtatattgataatgtaagatctgtgcaccactgggaatatggccactcctaggcctgcaatgggcaaagttagggaatatgtagaagtttatttatgcatgtatgtatatatgtgtgtgcgcacatctctatctttatagattgaaatatattagtatgcactgacatttctaattctgatccaacattacagtgttattttagctttcttctctttttccatatttgttcattcattttgcgacattacaaaacccactgccattcttttgaattgatttacttatttggtccatccccagctgtaactaatatcctattctgcccagcaccctttaccctttgcataggtgccttcctcatcctatttagggtccctgcaggttcgggtcccatgggccagcctatctgtctgcctggcttctctgcttaacctgtttactacacctgggctctgatgtcccactttatgtcaccacaatgcttggacaccctctgcaccttgcttgtactctgagccgcccaccaggcctcctcctctgcagaggcctgaggccacatggtggatgcttcctatgggtctctttcttcctcctgctgctctggttcccagattccgcaccaagccaccccttccccaagcagacagcaatgttgctctgccatacatgacggctttagtactgaattgtctaggaaggaaaagaaagtaaaagggaataggtaccttttcacattttgttattgtttgttgctggtatgaaaaatgtttttaaatttggcatttttacttttatatttttatatttgtagcaaagttcctagataggttccttactaaacatacttattaattctaatacattattcataggttcttttgaattttccaatacatagttatacttcttgtaaataattttagatttacttccacaagtttaatttgaattctacagattcaatctctatgaatgaactctaatagaacaaaatcaaag

SEQ ID NO: 701017 - DNA, 562 bp, Homo sapiens
ttattaatttacaacaaacagctttcttctcatgcacttccaccttatgtrcttcagaaacagactggtcgaattctgaaaggaaaagcattaaggctttggttggaattttgctaaatatatagataaaattattgagtcagaatcaacaactttacatttctcccctcctggcatgcctttcagttcgaaggagaatgagcacatacactagcataaacgagaaaaacaatgcaacagggcatgcatacaagtaagaatatggagagggaaatgccggcagttacaaagactggaaattttcagaagaaattgaaatcctaaatagaccaataatgattttcaaagttgaatcagtaacttaaaaacctaccaacaaagaaagacctggaccagaaagactcatggccaaattatcccagacatacaaagagctgttaccaatcctactgaaagtattacaaaaaatcaaggaggagggactctttcctaactcattttatgaggccagcctcattctgttaccaaaacctggcagaagcacaatgaaaaaagaaaactt

SEQ ID NO: 701018 - DNA, 996 bp, Homo sapiens
cttttggatgggttttgtttcctcatttgtttgttgttatattttgctctgttttgttttgttttcttttaacggacaattgtaaatccagttgagcctcttaagttttatgattcaggaacgtcagctctagagtagtctttacttttgggcaatttagccctacttctatggtggcactgctatatcaagtggttgccaatggattcaaaagtgtttatactcagctgtgtgaggtttagctgtctcctggccccagccctgtgtgggagatgagaaccactcgccttgcagctccccagctgttgctcttcttgtggctccatagagtcccacgctacccaggtgggcagactggtactcagcacaagctcaaagagtccctgaggtatgttcctggagctggttctctgcataactcccagcaattctgtattgcatcctgcaaattttagcaacttttgtctccccacctaccagtcactgtgtcttcagctttgtaaggttatggactcgtgaccaccctctctgctctaaggaccatctcgctagttcctttctctcagggaacatcatactacactgttgttgamtatctgaaagcagttatttcataattttgtccaagtttttatagcagatggggtaaatctaactccagattatccatcaattgataaaagtagaatttcccccagaagttatcttttaatattcagtgaaaatcattgtgtattagctccctgtggcactgcaatgaatttccacaatcttagtttaaaacaatgaaaattgactacctactggttctggaagccagagtctgacacgaaggagctggcaagcctatattcctgcggaggcttcaagggggattctcttatttgccccttcgagcttctggggtatattggccttccttgacttgtgcctgcctcacatggggaaagttctgaaaaccagaattttccacttagattccagtctaacctccta

SEQ ID NO: 701019 - DNA, 1005 bp, Homo sapiens
  misc_feature 905, 906, 907, 908, 909, 910, 911, 912, 913, 914, 915, 916,917, 918, 919, 920, 921, 922, 923, 924, 925, 926, 927, 928,929, 930, 931, 932, 933, 934, 935, 936, 937, 938, 939, 940,941, 942, 943, 944, 945, 946, 947, 948, 949, 950, 951: n = A,T,C or G
  misc_feature 952, 953, 954, 955, 956, 957, 958, 959, 960, 961, 962, 963,964, 965, 966, 967, 968, 969, 970, 971, 972, 973, 974, 975,976, 977, 978, 979, 980, 981, 982, 983, 984, 985, 986, 987,988, 989, 990, 991, 992, 993, 994, 995, 996, 997, 998: n = A,T,C or G
  misc_feature 999, 1000, 1001, 1002, 1003, 1004: n = A,T,C or G
agatattaatgagggagtctagaccaacctgtcatttcttattctgagggcctaggggtaaaactttaacaggattatattttaatccctcccaaagacatgtactcattcattcatccagtcaaaaaagagtagttattgaggtccttctatgctccagctgttaggaatacaatgacaagtaaaataaaaagggtcaactgtgggatatacacattagacaaatcatcacacaaggtaatatataatttcaaatgacgatttgtgatacaaagggaaaatacagattattttcagagcatgtaataggtctgatcttaaggaagacttgcctgacatttgagttaacgtataaaggatgaataagagttaactaagtaaaaaaagtgaagatgggaaatgcattccagataaagagaacagcaaatgcaaaataccttgcctccccatgcaaggcaggtatatgaagaagcacagaatattaacaacaacatcaacaaaaaaacctgagagagccactgtgggtgaaattcagagctaaggagttctgcagtacaaaatgaagctggagacatcattaggccaatacatgaggaatatggcagtctgtgggaagacctgtacaattttatcttctgcacttcccctcacaaagtctttgttcttttcagcaaatgccatgacctgctttgctacccacattcagttctttacttgtatttttattttcctcaggaatgcttcccccttctcatcatccatctcctacacaaagtcttactcatcttctcattycctgaattttggcatctagggagtgtggatgaagagaaactagctcctaacgtacattaagtacctgttatgcaccaagcacagtgctaaattctttatatttataatannnnnnnnnnnnnnnnnnnnnnnnnnnnnnnnnnnnnnnnnnnnnnnnnnnnnnnnnnnnnnnnnnnnnnnnnnnnnnnnnnnnnnnnnnnnnnnnnnnna

SEQ ID NO: 701020 - DNA, 2718 bp, Homo sapiens
ataggcagttccattttagggtttttggggatccaataagaaaatacatttaaagcccctggtggtggaggcggtagggatggatgtggtttgacttgaaaaaggaccaaaactggccttcttgggcccttccccttgttattctctcatctgggcaaactgggagtgtatggtgcttttcagaattgcttaacttctacagaagatacaccatccatggaatcttcaaaaataacaaagccagcaggccctttaggcactcaatctgtgccctaggttttggaaacactatgcttcatgctgctgcccaagtgctgtctttagtacccttcctttacaattattaattaattaactagttaatttattttgagacagagtcttgctctgtaacccaggctggagtgcagtggcacgatcttggctcactgcaacctccacctcccaggttcaagcaagtctactgcctcagcctcccgactagccaggattacaggcacgcaccaccacacctggctgatttttgtatttttagtagagacggggtttcaccatgttgaccaagcacgaactcttgacctcaagtgatctgcccgccttggcctcccagagtgttgggccactgggcccggcccctttacaaatatttatcgaaggccttctctgacttattagaactgtgggctctattggtgtaagatatggccctgttctcaggagacwgcagttgaatgcctgtgaaatgattaaaatagtgatctaggaggtcagaatagggggcgtcccttcctctgcttcttgggtttaaagccaactattgccttacatttttgtaaatctccttttggttttttcctagaaaattgtgttaaggaatggtactgaggcatttgactcctgggagaagccccctctgcctgtgtatactcagttctatttcttcaatgtcaccaatccagaggagatcctcagaggggagacccctcgggtggaagaagtggggccatacacctacaggtaagtcttgaccacctcctgtcttgaaagaaatacagagtgaccccaatatggcctgagtccttgcctcttcccaggagcaaggctccagggctgtgtgggagcacactttctgatttcattgtctgaaacgctgctgatgttttgtatgtgtgtgtgaaacctcagcagagaatggctttgtagactgggccaagtctcagcgtgttgtgttttgaagtgcagcggtttcctcctgagttggcagactgtgattattaaaccatgaagggttactccttaccctgacccttttaaggttgccccttgatattcttattttattttattttatttttttaagagacaaggtctggctttgttgcccaggctggagtgcagtagagcagtcatagctcactgccacctccaactcctgggctcaagtgatcctcctgcctcaacctccctagtagctgggattgcaagtgttcaccaccacacccagataattttttttgtagagatgaggtcttgctatattgcccaggctggtcttgaactcctgggctcaggtgattctcccgcctcagcctcccacagtgttgggattacaggcgtgagcaccaccatgcctggctactgcttgatattcttaagtgacttttagggcctccctccatttccattccccacataactagttttaaagcagttccagaatttacttttgtctgagacagatctttctgtttcttacccgctccttttctccacctatcctgcgtataagcaataagcaagtagcagaggctgttagagtctttgctggtgaccaccaattccaaacactggggaatcaggatccctttaatcatttttaaacgattagtagagggagacgcttgaatcagagcattttctctgttgcaatgttccccttttccctattacaatacctcctccctctcccatacaataatctttccaataaagtctctccttaccaggttagaaaacaaattaatagaggaagcagacaacaagatctttctttttcaaaactgctgaatgataaaaatgcctgacaattctgttgtaatcgattgctcaataaattattgctgactgattcatgtgctatgaatcagtactattctcagtggtgggaattcagagataaaaatcctagttcctgccttgggtgctcatgctctgactctggagtcagatgacccattttgattcccgcctctgcaacttactagttctctgtgcttccatttccttatctataaaatggggataaaaataggacctcctccacatggtttttacaaagattgagtcaatgagtcatgtataaagtgcttagactagtgcctagcacataattagtgatacttaagtgtttgctcttactattagttggattaggctatttttgcattgctatgaagaaatacctgagactgggtaatttataaagaaaagaggtttaattggctcatggttctgcaggctgtacacacatggcacactggctctgctcggcttctggggaagcctcaaggagcttttactcatggcagaaggcaaagcaggagcaggcacgttacatggtgaaagcaggagcaaggggtgaggaggtgccacacttttacaacaacaagatctcgtgagaagtcacccactgttgtgaggacagcaccaaaccttgag

SEQ ID NO: 701021 - DNA, 675 bp, Homo sapiens
cccagccagctcacttccggtgggcttcacatgctgtggggtgtcactgttaaggtaaaatgctgggacgctcgcgagggtgtgccgcctgagagtcctttaaaaactgccgtagggaggttctttgggaaaggtgtgcagaggctgaagttgttactgtagggatacgcggtagacagctagamtttgtatgtggtagggttgaagttgctgcctcatcaactagcgggcctgggaggtcgggcagcagggctggggttgagaacccccccaacacccacgaggaggtggtatttgaacccagtgctgaaggatgagtagacggagcagaagcagtaaagaggatgcacgttggaagaaatgaaagcgaatggaattgtagcaaacacgttgcgtttactatgtgccaggcactcttctagacattttacataatttaatcagctatcttatgaggtgggttgctgctatctccaatttataaaagaggaaacaggtaccaaagggtcaggctgtttacagagtaaatactcctaaccacagctctaaggggagcactgaaaaagaggggaagagtgggccccctctattgtacttgtaatataatttaatcctcagaataaataaatagagaagattctgtaactgtattttgcaggtgagatgagagaattg

SEQ ID NO: 701022 - DNA, 1344 bp, Homo sapiens
tgcaagatttaactggagctgtctatccacagtatcttattcatacacagacacaacagttttaattagatcaagggggagaaaaagtaggtccctggcccaaatcagctttcatagaggcaatggccaaatagcccaaaacatgtggtggtttgaaaagtatttgtgctgtagctactacacatcactcaatgactaytaagcaagagtgggacttttcactggcctgtaattcatgcctggccatgataaatctacaaatcactaatatttaatctgtaagatgttttaccaccatcttgatttgtagaataataattacaagactatttacatgtttttatatttttcatccaaaaaaggctaaacacatttttaagcaatgtagaagtagacatgtagtttaaatgaaaactgaaaaaataattccactgataaatcatttgacttacgttttcccattccattccacaatttttgtaaagttaaggtaactgtcttctccagttagaaaaacatagtctccatcattagtcccatttttctgaaaatatgtgaatatgatcatttaaagtaactgtgataattttatgacaacttggctagactatggtgcccagttgtttggtcaaacactagcccagatggtgtggtgaaggtattttgtaggtgtgattaatatctacaatccgttaactttaagggaggttaccctcaataatgagtggctgggccccctccaatctgttcaaagccttacaagcaaaaacagaggtttcttagaggaggaattctcctcaagactgcaacatcgaaattctgcctggatttccaggttgcagcccaccctacagatttcaaactcaagaccacatcatcaacttttacctgagtttccagctgctggcctgctctatggatttcagacttaccagctcccataatcacataagccaattccataatataaatttctttctctccctctttctcatctctacatatacaccctcttgattcagtttctctggcaaccctaactgatacagtaactaaaaaatttaatcttcatctaactgtcctactagggcctaactgctacacaagactgaaccaggaccagaaaatagtgactattttgctaaatactatattaaccatattattattttatggttttaaaaagtaggagctcaattttaaaatgggcaaaggatttgaagagacatttctgaaaagaaaatatactaatggccagagagcacataaaaacatgttcagcatcattagtcattagggaaatgcaaatcaaaaccacaatgagataccacttcacacccacta

SEQ ID NO: 701023 - DNA, 3257 bp, Homo sapiens
cagtcaatgccagtagctttcactctttccagtaagaaaacttaactaaggcatgccctttgatatttttatattctattgtattttattttaaaaaaatgttggttacaaggaataatatatcttcacccactaatagcttgccatccagtttgacaacgagtgttctctgagaacacttggtttaatatattaactatgtcatatagactatggtttatgatttaatttattctgaaagtagatatgatttaacgttttctgaaatagtaggctgcttaagtttaacaatacagataatataaataatacaaataaaattccccatacactaatactaatcatacctaccaaatatattatcttttctattagtaacttacatacatttcacatgtattacctcaaaaaagtctctactacaaatctgtgtttactttcattcttcagagttgcagactgaatttcctcagtcataacaagacttacaataaagttatgaaatatagcttattgctataataggaaaaataagaaaacattctataaggtgataaacagggaaactgttaaattatggtacatttatatgatgactattacacagccattaaaattatattttcaaagaatatttaatgaattaaagaaataacaatgattcgttgctaagtggaaagagagggacctggagctatacttagagtgtctcaaccatgggaggaaataaacacatcaagaaagaaaagccaggaaattaatgcaatcaaatatcaggagtggtttctctgcaatcagattccaggtgattttcattttttcttaatactttttttttatatttttcacactatctacattgtgcatgtgtaacttcagagaagtccaaaaaaattaaaagcaaatgaaattgtctcctttgataaaagtgtacacatgaaagagaaagaatgcccctcaaagtctgcctttccagatgtcctgtgtagctgaattacagaccctgtaacagattttctatactggaggatgagtttgcttgtcacaaaagcatcttccagggtattccttatctacaaatattcgtaaaaggaggcctggaccttcagaatcagaagatgagtaggtataattttgtgttatctcctgtatataagtatcagtcaaaacaaactctccaagaactttatcttggaaaggttacatcagtctgagttttgttccattggatggccctttttttttttaatttttttaaagagatggggtcttgccatgttgcccaggctagtctcaaactcctgggctcaagcaatcttcctgccatccaggccaggcacagtggcacttttgactgcaaagtatgaaagcactaagagtattgctctacagaatggtaaatatgatatgcaattttaaattaatttatattaaaaggttgccaaagttatcaatgttgcttatatttcctaaaatggattatgacctaaacaatatttatgaacacctaaaactcattaaaaatctcttttccatttttaatattttatcctcatattttattgtatatgcagtcgttgtcataatgcctttcttccagagattttttacaatgcctttttttaaagattaagtagaaaactttccaagaatttcaaataattttaaagaaagaaatttatacatcagccactccatctaactcttcatattaaagatgaaatccaagtactttttaaatgacattagttaaagcttccaatgtccacggaaataaaactagtattttgcctttttggtttctccagcccagcaaagaaagaatgaaaaaaatatttgcagaaagtgagaactttgtaagttactgcattgatcagaaatcaattcaaagctatgtaatacgtattcactcaatacaactttactgagtacctcttaaatcatctctatgcttgggaccagggactccaatagagatcaaatacaatcccactaatcaaaacatttagcctatgagatcttaaagaccggcaaacaggcaattacagcaaagtgtgagtgaacacagattataatgagattgcctagaagggccatctaatccaggacttgggctgtgaaggcaggctttctggaaaatgtgactaccaaagtgagggctgaaggatgggttagacaagcaaggatggaagaggatgtaatttcaggcattagaaacagcatgtgtcaaactcagcctgctttgcccatacttcataaatctccaaatcaaacagggctttcaggcaagagagcaattggaagcattattatacctctgctctttcctgaagccctacttaaatcacaaggattaaaaaggacagatagcagccaggcacggtgggtcatgcctgtaatctcagcactttgggaggctgaggcagacggatcacctgaagtcaggagtttgagaccagcctggccaacctrgtgaaaccccgtctctactgaaaatacaaaaaaattatccaggcgtggtgtcaggcacctgtaatcccagctactcgggaggctgaggcaggagattcggttggacccggaaggcagaggttgcagtgagccgagatcgcgccactgcacgacagcctgggcgacagagtgagactctgtctcaaaaaaacagagaaagagataccctagatgtctcaattgttgtaagtaataataaaataaaaggagggagtacaagacaaagagaaaacaagggaagacagcgccaaaacttggaaggttagaaagcaggtgatgaagtggtaactgatttagataatcaaagaaagctaaaacctatgctggcagtaggggaagcctaaagcaagccagtctttcctgcaaaaccagaaaggcccaggtttgaaagtcatccggtagttctgcaaactgggggtaaaggtaagactgaaacagtaatgattagttggaagtctgttagacaaacagttaaaccccagatccaaatgtcatgcaagacagctggaccactctccttcttttgccaaagcaggaacatttaactttaaaactatgaataaacgagaatttctttaacccattagaaggcatttagtggttgctgagggcttgctgctgagatagtcccgtcaggacctgaggagtctttccccagctgacaggaatgtcggcggctgacagctctcagctgagtcactctccaggcatttcccgcaggccaagagactcctcacacggggcca

SEQ ID NO: 701024 - DNA, 1122 bp, Homo sapiens
tttctgggctatctacagaatataaacatttttatattcagagtattttcatcagtcatgggagcagaaacaggtattagtgtaccaatcttcaaataactttagatgtgtatcctaattgaaaaactgctaagaagtgtacatcggtaagtatccatatcttttytgtgtcttgagagttttttttttttttaattatactttaagttctgggatacatgtgcagaacatgcaggtttgttacataggtatacatgtcccgtggtggtttgctgcacccatcaacccatcatctacattaggtatttcccctaatgctatctctcccctagccctccacccccgacaggccctggcgtgtgatgttcccctccctgtgtccatgtgttctcattgttcaactcccacttacgagtgagaacatgcagtgttaaaactagacattactgaatctttttttttattttttgccttggcactgggttctggtaaaaatgatctggaacagcacttttcaaactttagtgtactttgtaccacctacagatcttggtaaatacattttctaatgtagtaggtctgggatgagactaggtaataccaatgctgctaactaactttgaaacacaagttagttctatgtgaagcactaacttcacatagaaacatgaacatggatacacattggaatcacatggagagctttaaaaaatactgatgcctgggtcatacctgagggcagcttgggcatttagatatttttaagctctctgaagaattcaaatgggaagcgaaggatgagaaacactggtctagaaacagtgatgacaaacaagaaagtcacctacccttcctggtcccctgtcctttgtccatctgggagttcgtggggaaggggatcaaagtgtagcctgcactgatgaggaaagccagtgaagtagtcagtccaagtaccctctcccattgacagtactggacatacactgacaaattcttcttttgctggacttctcttagtcaccaatctatcaataaaacagcagtactacataaatgttgaattaactattatagtcaagaaagagatttatgaaatactttcatgtctctgacaaattttgc

SEQ ID NO: 701025 - DNA, 1122 bp, Homo sapiens
tttctgggctatctacagaatataaacatttttatattcagagtattttcatcagtcatgggagcagaaacaggtattagtgtaccaatcttcaaataactttagatgtgtatcctaattgaaaaactgctaagaagtgtacatcggtaagtatccatatcttttctgtgtcttgagagttttttttttttttaattatactttaagttctgggatacatgtgcagaacatgcaggtttgttacataggtatacatgtcccgtggtggtttgctgcacccatcaacccatcatctacattaggtatttcccctaatgctatctctcccctagccctccacccccgacaggccctggcgtgtgatgttcccctccctgtgtccatgtgttctcattgttcaactcccacttacgagtgagaacatgcagtgttaaaactagacattactgaatctttttttttattttttgccttggcactgggttctggtaaaaatgatctggaacagcacttttcaaactttagtgtactttgtaccacctacagatcttggtaaatacattttctaatgtagtaggtctgggatgagactaggtaataccaatgctgctaactaactttgaaacacaagttagttctatgtgaagcactaacttcacatagaaacatgaacatggatacacattggaatcacatggagagctttaaaaaatactgatgcctgggtcatacctgagggcagcttgggcatttagatatttttaagctctctgaagaattcaaatgggaagygaaggatgagaaacactggtctagaaacagtgatgacaaacaagaaagtcacctacccttcctggtcccctgtcctttgtccatctgggagttcgtggggaaggggatcaaagtgtagcctgcactgatgaggaaagccagtgaagtagtcagtccaagtaccctctcccattgacagtactggacatacactgacaaattcttcttttgctggacttctcttagtcaccaatctatcaataaaacagcagtactacataaatgttgaattaactattatagtcaagaaagagatttatgaaatactttcatgtctctgacaaattttgc

SEQ ID NO: 701026 - DNA, 621 bp, Homo sapiens
ttggctaccaaaattattatgaatagtataatatgtaattgttctggtccttgttttattattaacaaatactttacagatcgtgttgttgtatcataccctgtaaaaaatttgagaaaaggatagaattataaaagaaatcaatatttttatcaattaatttttacattataattgatacaaaataattgtacatgcttatggggtatartgtgatgttgcaatgcgtatattcattgtgtgatgatcaaatcgggttaatcaccatattcagcactttaagcatttatcatctctggcggtgatgacactcaaaatcttctgtcttgaagtatatactacgttgttactagctatagtcaccctagtgtgtaacagaataccaaaactagtatttccagaggtttggaaaataaatgtaactaaactttaaacttgatttaaatactaacagaaaagtaactctgtgagtatttaataaaatataccattttatcataataaaataaagattgagctcatagtttttttcacattgggtacttaacagtaactttaagttagtaaaacttctttgacacccctagagagctgtagagacttttttcgtctctttttcct

SEQ ID NO: 701027 - DNA, 621 bp, Homo sapiens
ttggctaccaaaattattatgaatagtataatatgtaattgttctggtccttgttttattattaacaaatactttacagatcgtgttgttgtatcataccctgtaaaaaatttgagaaaaggatagaattataaaagaaatcaatatttttatcaattaatttttacattataattgatacaaaataattgtacatgcttatggggtataatgtgatgttgcaatgcgtatattcattgtgtgatgatcaaatcgggttaatcaccatattcagcactttaagcatttatcatctctggcggtgaygacactcaaaatcttctgtcttgaagtatatactacgttgttactagctatagtcaccctagtgtgtaacagaataccaaaactagtatttccagaggtttggaaaataaatgtaactaaactttaaacttgatttaaatactaacagaaaagtaactctgtgagtatttaataaaatataccattttatcataataaaataaagattgagctcatagtttttttcacattgggtacttaacagtaactttaagttagtaaaacttctttgacacccctagagagctgtagagacttttttcgtctctttttcct

SEQ ID NO: 701028 - DNA, 621 bp, Homo sapiens
ttggctaccaaaattattatgaatagtataatatgtaattgttctggtccttgttttattattaacaaatactttacagatcgtgttgttgtatcataccctgtaaaaaatttgagaaaaggatagaattataaaagaaatcaatatttttatcaattaatttttacattataattgatacaaaataattgtacatgcttatggggtataatgtgatgttgcaatgcgtatattcattgtgtgatgatcaaatcgggttaatcaccatattcagcactttaagcatttatcatctctggcggtgatgacaytcaaaatcttctgtcttgaagtatatactacgttgttactagctatagtcaccctagtgtgtaacagaataccaaaactagtatttccagaggtttggaaaataaatgtaactaaactttaaacttgatttaaatactaacagaaaagtaactctgtgagtatttaataaaatataccattttatcataataaaataaagattgagctcatagtttttttcacattgggtacttaacagtaactttaagttagtaaaacttctttgacacccctagagagctgtagagacttttttcgtctctttttcct

SEQ ID NO: 701029 - DNA, 584 bp, Homo sapiens
aaagtgaaaactatgaagatagaaaataatgacacagtgaaattcaatgatagattaaatcccgtggagaattccccatgtattttattytggggatccgaaaggacaggttttctttgcctgttgtttcataatcttttcctctagcaaatattgcctcttgaattctctcctacaggttttgcatgcctgaagaagaggctgagcccacagttacaggctgttgaatagccacagggttagatgttggcaagggtttcgtctcttttaggcttctcaaaaaatttaaaaaacaaacaaacaaacaaaaacacaattcttaaaaaccaccatagggagcataaagaaaatggaaaagagcagagataaagaaacagaggcattgttttctgcagactaagcctgctgagctacgtgcactgcacaatatttacttccctgctttcattgaaaacgccaaatgtgcctatattattctaaaaagtacagctgatccttctgtttgggccaacaggtctataggccagaacacattccaaagcttttcccttgaggctgtctgcccaaagccagataacatcttc

SEQ ID NO: 701030 - DNA, 529 bp, Homo sapiens
cagaatttgggaaactaacttggaaccatttagtcctcatttctcattgtacatctaagcatgaaaatacagcacttagctctatcagagagctttaacatagttggagtgaattttgattatgttaaaattttcttgctctgtctgacacagtagaatagggaagacagtatttctgcagctaagtgtctaagccgctggttctctaacttgttccatccttccctcctctcactgaaagttccttttmtccttcaagctagggatggggatagaatgggtctaagtgctaatgatatgtgactagattaaaggagaacataaaattgagtccatgaatatttatcaagtatctactttcatttagacatttttccaggttctaagtgggataagaattactccaagatactatttgaacatcaagggacatatcgtttaatcagttgaaggctataagcctgtgaaaaaaataaaagtagctcattttaatgagcaaatacaatgttccaggtgctggtctaaatgc

SEQ ID NO: 701031 - DNA, 2117 bp, Homo sapiens
caaaaacttacagagaatgtcaaagaatctttgcttatttgtttaaatatttatttatttatttattcatttaaaattaataattatacatttgtgtaaactaaaataaatattttatgaaacataactgtactcataaacaatggtgaaagggtggcattatctttttctgcaaatttctttactatctgacttaacagaagacaggtggaatcttaatctctgcttctgcatttaatttgttgggtgatgttgttttggttgatgtatataaggaaaatctggccccgtaaacatactgaatcatctgaacacaggctgcattgagagagcatacattgtggcaatgtggcacactgtggtaggcaggacagagaggcaaatcacagattaaatcagtggtctctatacatgtttaattacatatctttgccaattacatattttcagcagaaatacacacatgcacacattattatcactcaatgataattcacttgttctgaggttctttgttaattatagggagtataaatccttatttcaaataatcttcttaaaaatttcacttttcattttcccccagatcttcacagatctgatttcgtaatatggttgataggagtaaaagtgtcagtttcatgattttcttaatgttcacttctattattagcatttatgttaatctgtgatttctgtttaagaatatttttaagatacttgtccatttcatgagggctactttagataacccagaaaacataatccataactccactcacccagaacctaacctacagaaagactgagctactgaggcaccactattattcctgcagcatcatggaatcccattctcctctgagaacaccttaggagcacagttgaaatagtatctgaccagggaactgagggaagaccccaggatcaagcaatatattagatatgagttgtgcttaatttctcttctttttttcctccaaaatataagttctagtgttttctttccacccaggggtatggtctgggcacacctgcggggcagatcactagaggaaactggattgaacctggtgtgattaccaccctggaagactgtaggtgcaatggaggcatcatcaggagcactggggcaatgtgactgcttcaagaaagscttgctggagtaaggaatacttgcactaaggtttgaagaacaaaaggacatggagtggtgaggttgtgcattccaaacaaagggtacttatatattgtgattttaactggaataattttgaaatttccttcactgaaaatcataaataaaaatcaatagcgataattgattagtgactaggggccagagctagctaagtgtcatacacacatttggtcatctgttattccaacaactccataagttgagtactgtgttacatctgaggaatctgaagctcaaagaatataaggccacacagctagtcaccaataaaactatagtaataaggcttgtgttctctattgctgtatgatattgctgccttaatggagcatatggtagagtaggaaaaaaatgtgaaatgattaaagtaatttcagaatgtgattagtgctattggtagtggcagaagacaaattcctaggcaaatagggacaagtccctggtgaaacccaactttctagctgaagacagtttaaagcctgaaaaccaagcaacgagtctcagataaatccacaaaccagactgagaacctctcttcccatttggcacactttcctctgattaatccccagccttcgcctattttacatgtaatctaaccttccctaaatggttttttacactgttgtgcccacctttgagtagtgtctttatttatttatttatttatttatttattttggctttttgcatactcacaaaccaatcagtactcactcccccattctgagcccataaaagccccgggatcagccacatttgggagaggtacccaactttgggtagggggttgccccctttgagtcccctctctgctgaaaactgttccattgctcaataaagctctctaccctgctcacactctggttgtcagcacaacttcattcttctaggacacggtacaagaacttgggac

SEQ ID NO: 701032 - DNA, 2098 bp, Homo sapiens
gcattagataatgtcaagtgaaggaaagaaacaatttacagttagtaaaagagcagactgtcactgttctgtgttctgtccctgacttcaccccagtgcatttctcaacgcggtttcttaatgaggagggcaatttatccctcagcccctgtcactgtggctggagtcgcagctggcagccatgagtactcatcaaaatggccctttatggggttttgcttcttgaagtgcatgatggttgggtgggcctatgttattttacttctgcttcccagaccaagtttacctgccccacacaatcaagctaatcctcagtgagcattctagatctaaaagagatattagggagactctcattcaattcctgcatttcacagatgagaaaaaggagtgtcaatgcattcattaagtaaattgcttaaggataatatgagtttgcgattccaattctgggctaggaaaaagcttatgagcagccaatttgcaaaacaataaaaatactaccatctatgtacacactttgtaaaaacatccagcacactcgcatacagcctgtttaatattcttttcttatccctcaaactctcaaagaggcttggtaggcatcattatctcagtgggccgtgatgaagataaaggaaatgctctgggtcaattagcagaaatgtaggcaaaatggaagggtgagaaagaggtgggaagaagtctatttaaacatacctggaaacatttgctgactccccactgtgtgccaggcaccacagctctgaagatgaaagacaccatcgttcctgttcttcaggagttggtgatctaactggggagagagatatataaggcaatatccacagcatacttacacaggatgttttgggagcccaggaagtgggaacatgtgtcgacaaaagcacacaaagtttagcacaggagggtcaactcttgctgggcactgaaggatgggttcaagtttgagtccatcagttagacagggtaagtacattcatcatggggagcatgcagtrccaaaaaagggggcctgaagaggatgacaggagtctcttgaagggcttcaaaggagtacttcgacaatacccttggactcccttctgctctgcccttcgagattatttttcatcataaacaggctgtggttaccaagaatgtctagtaatatgaacattagaggaagtgtagtgagaacacagtaataaaaagacttagtaagtcagaggaaataaaagaactgaaaccatgcaacaatataaagaatgaggatatttatttaaaaaaaaaaaaaaaaaaaagaaaacttttcctgcagcagtggtacaggtgtacctgatgaggaaatgaaaggtcatccttaacaccaacatttcattgagctttgattgttttatgctagtctccctaatttatccttttttttttttcctctctctctttaacacaagcagtgtctaaagttgtagctaatgatgatctatgttttgttcccaaaagacctgaataacaaatagtttcctttgggcccagtggcaatgccttgctccaggagggagaagaggtgagtgaactgaaaatcagcagcctgctgaaaacgctagagagagaggatctgcaacattcaggcgcaaaaggaaaacttctctccctgtctttccacgcaggagccctattaacccagacacatttcaccctcacatcgggaaatcctaatatagacaagtccacctcctctgcctggttcccctaaactcacaacgatctttaagatgaaaatgaaaactgcatttcattaagtgaatataaggcaattcaaactaagtcagaggaaggaaactggggcaggccctacataaattaatattgtgaaaggaggaaatttccctattccgatgttaagcagcattctggatttgtacagaaaatgcagtggaagcctttaaagtttcaccagcactgtttcttctctcggccattgtcttcttactaaaaaaaggaggcgaggaaaacctgaggataccattttgggggtgcctagaggtggggtgtacttgaaaaggaaacgtaaaagggcttaactctattcattgcg

SEQ ID NO: 701033 - DNA, 2098 bp, Homo sapiens
gcattagataatgtcaagtgaaggaaagaaacaatttacagttagtaaaagagcagactgtcactgttctgtgttctgtccctgacttcaccccagtgcatttctcaacgcggtttcttaatgaggagggcaatttatccctcagcccctgtcactgtggctggagtcgcagctggcagccatgagtactcatcaaaatggccctttatggggttttgcttcttgaagtgcatgatggttgggtgggcctatgttattttacttctgcttcccagaccaagtttacctgccccacacaatcaagctaatcctcagtgagcattctagatctaaaagagatattagggagactctcattcaattcctgcatttcacagatgagaaaaaggagtgtcaatgcattcattaagtaaattgcttaaggataatatgagtttgcgattccaattctgggctaggaaaaagcttatgagcagccaatttgcaaaacaataaaaatactaccatctatgtacacactttgtaaaaacatccagcacactcgcatacagcctgtttaatattcttttcttatccctcaaactctcaaagaggcttggtaggcatcattatctcagtgggccgtgatgaagataaaggaaatgctctgggtcaattagcagaaatgtaggcaaaatggaagggtgagaaagaggtgggaagaagtctatttaaacatacctggaaacatttgctgactccccactgtgtgccaggcaccacagctctgaagatgaaagacaccatcgttcctgttcttcaggagttggtgatctaactggggagagagatatataaggcaatatccacagcatacttacacaggatgttttgggagcccaggaagtgggaacatgtgtcgacaaaagcacacaaagtttagcacaggagggtcaactcttgctgggcactgaaggatgggttcaagtttgagtccatcagttagacagggtaagtacattcatcatggggagcatgcagtaccaaaaaagggggcctgaagaggatgacaggagtctcttgaagggcttcaaaggagtacttcgacaatacccttggactcccttctgctctgcccttcgagattatttttcatcataaacaggctgtggttaccaagaatgtctagtaatatgaacattagaggaagtgtagtgagaacacmgtaataaaaagacttagtaagtcagaggaaataaaagaactgaaaccatgcaacaatataaagaatgaggatatttatttaaaaaaaaaaaaaaaaaaaagaaaacttttcctgcagcagtggtacaggtgtacctgatgaggaaatgaaaggtcatccttaacaccaacatttcattgagctttgattgttttatgctagtctccctaatttatccttttttttttttcctctctctctttaacacaagcagtgtctaaagttgtagctaatgatgatctatgttttgttcccaaaagacctgaataacaaatagtttcctttgggcccagtggcaatgccttgctccaggagggagaagaggtgagtgaactgaaaatcagcagcctgctgaaaacgctagagagagaggatctgcaacattcaggcgcaaaaggaaaacttctctccctgtctttccacgcaggagccctattaacccagacacatttcaccctcacatcgggaaatcctaatatagacaagtccacctcctctgcctggttcccctaaactcacaacgatctttaagatgaaaatgaaaactgcatttcattaagtgaatataaggcaattcaaactaagtcagaggaaggaaactggggcaggccctacataaattaatattgtgaaaggaggaaatttccctattccgatgttaagcagcattctggatttgtacagaaaatgcagtggaagcctttaaagtttcaccagcactgtttcttctctcggccattgtcttcttactaaaaaaaggaggcgaggaaaacctgaggataccattttgggggtgcctagaggtggggtgtacttgaaaaggaaacgtaaaagggcttaactctattcattgcg

SEQ ID NO: 701034 - DNA, 609 bp, Homo sapiens
tgctgcaaaatttctatccaaaaaacaccagagatgtaaagaatcttataactactagagagcaaaatattttccagtaacaactataattttggtgaaatatttcaagcttaagaaaaagatgtattaattattagaagctgaatgtgtgtgtacatatatatataatatatatagtgtttcaacacaagatatatgttgctatcttcttttatggatgaagaaactgaaaaaatacaaaattccctttacctaatattaatatgattatttcatgatattcatcactggtaattgtcttaacactgataattacattgaaccttttcttttaaaagattgaaaatttattgtagtttcattgaacattattttagcacaggcatatttgggtcaaaaataaatcatgcctattaaaaatttttcctcaaatttgtttacaaatataattttaattcagtaaaaaaattgttaaaactgtaaataccaagatattaagaatgctgatttcaattattaattcacagcctcttgagtctygtattgaccaaagagaaaaacaagtggaaagagatattcttgcttgctattttaaaaggaaattctaat

SEQ ID NO: 701035 - DNA, 644 bp, Homo sapiens
tttccttggttacaaagtttttgacccaaaatatcttcacaagcctagctaaagtaagtagtaaagtataattaaatatattttaaaatttttatttattttcctgtaagttattgggttacacacagtatttgtttatgtgaggaagttgtttagtggtgatttgtgagattttgctgcacccaccacccaaacagtaaacgttgcaccaaatttgtagtcttttatacctcacccccttcccactcttccccctaagtacccaaagtccattgtataattctcatgcctctaaaattgcttatggattgagcctcttctttcaatattttcttacgtgcagaactttcaggataagcataataactatgagagttttttaatggaagaaaaggcagtgccaaaatatataacgtgacaacctataaaacatgggaataaaaatccctaacattaccatacaataaattgtatgagaaatggatagtactaaactagacagctaaggaaaaactgaacaaaaaaaaatcctggaaggattagccaccattccaaccaaatcttattgggccagtaagattytaatatttaaataacaaagaatagacactgataaatcactatgtcaaacacgcaaattaatg

SEQ ID NO: 701036 - DNA, 782 bp, Homo sapiens
tactggctaaactctagttttgactacgtaacattgccaaattcaacaagttctcatctacaaaaatgagaatttcatgagattcaatgtaataggctgactttaggtaaaatgatgatttgggctaaatgtcttcagggtcttccaagtcctagactagggcccacaaggacttgattcttgactcttatactgaatccattaagagtcctgagacttggagtcttttctctgtatgttgtgaatatacgcagttcacataaaggtgacaattataggttaacagctaaacttttactagtctgctgagtatttgaattgcaagaggagaatcaaagccctaacccaaagacatacaattctaacagctatatttgaagatagatatgrtattttatgggattatatattgttgaagctagagtcaaacttaagtaccattttatacaaaccctccatttaaaaaatgagaaaacgcaaatgtagatacaccatgagtgttaggaccagactctcatagagtggctgatggtgcaagtttcgttgctacttcactttccttaactctattccacacaccccgtgcctattttctagtccttttttcttcctgaccgcaaattgcagattctacctctattcagaaggagtgggaggaaggaggaataggagaaaatagagccattttccctggctctgtaataaacatttttcattccaaggtagcaaactaaacacaagctacaacctcttccaccaacctcaaatcttccagaaatgcc

SEQ ID NO: 701037 - DNA, 782 bp, Homo sapiens
tactggctaaactctagttttgactacgtaacattgccaaattcaacaagttctcatctacaaaaatgagaatttcatgagattcaatgtaataggctgactttaggtaaaatgatgatttgggctaaatgtcttcagggtcttccaagtcctagactagggcccacaaggacttgattcttgactcttatactgaatccattaagagtcctgagacttggagtcttttctctgtatgttgtgaatatacgcagttcacataaaggtgacaattataggttaacagctaaacttttactagtctgctgagtatttgaattgcaagaggagaatcaaagccctaacccaaagacatacaattctaacagctatatttgaagatagatatggtattttatgggattatatattgttgaagctagagtcaaacttaagtaccattttatacaaaccctccatttaaaaaatgagaaaaygcaaatgtagatacaccatgagtgttaggaccagactctcatagagtggctgatggtgcaagtttcgttgctacttcactttccttaactctattccacacaccccgtgcctattttctagtccttttttcttcctgaccgcaaattgcagattctacctctattcagaaggagtgggaggaaggaggaataggagaaaatagagccattttccctggctctgtaataaacatttttcattccaaggtagcaaactaaacacaagctacaacctcttccaccaacctcaaatcttccagaaatgcc

SEQ ID NO: 701038 - DNA, 1442 bp, Homo sapiens
ctgcgagctccgcctcccgggttcacgccattgtcctgcctcagcctcatcagtagccgagactacaagcgcccgccaccatgcccggctaattttttgtattttttttagtagagacggggtttcactgtgttaggcaggatggtctcgatctcctgacctcgtgatccgcctgcctctgcctcccaaagtgctgggattacaggcgtgagcaaccgcgcctggcccgtgagccaccgcgcccggccgatcttcaggttcttaacgcatggagcttccctgcctaaaatatctgtctgtttgaagggcaaggttagattttacatcctcttaggatgacttccgccatgcccaggctggtttcatgccccctgcyctgcgttcttacttctttatgattatcctatcacttcgtggattctattataattacccacgtttgtgcctcccctagcagccataaatttctagagagaagaagcagtctcttactcactgtcatatgacggggcagtgatttccatactttgtacagcactggtggtacagagaatgatttcacagatgctctctttaaagctttttaaaattgttctactttttgaaatacatactttctctttataaaaagtggtgtttgttttcttcaagaacctcagatgcacagaagtagattaactacaatacttgttctatgacacagccattattggtccttgcatcacccacttatatttattttgctagttattttataccgtaatcagtacccctaaacttaccatgcaagagaaaagctaagctcttcacagtcgtggacattattcatctaccgataccacacctgttctgtccttttgcctccctctatctgaccctgtgtgctatgctcaccattctcttgccttctttttaaattgtttaattgcctctgtatttatctctaagctttttcccttatgtttggttgttttaaactttataaaaagggtatcatgcttacacaatatttaggaacttttttcacttaatatattgccatattgttgatgttgctgcaggtcatttagtttgactgccatatttcattccatttatgaatataccacagtttatgcatccactcgccaattgatgagcacctgggctgtctacaggcttttgtcattgtgagcagcagtgctctgaacacttgtgtgcatctctcctgagtgtgtgtaagcttttcaatggggtagaactgccgggtcagagagtataggaataatgaataatggatatggagaggggataacgggtttggataatgccaaactcgaatccaatgggatggcaccaatttgtactcctaccagtagcgaatatgaaatcctgtggttctctatcctttcccatacgtggcattgtcagccttttttacatttgggcccctcaagtatcta

SEQ ID NO: 701039 - DNA, 1442 bp, Homo sapiens
ctgcgagctccgcctcccgggttcacgccattgtcctgcctcagcctcatcagtagccgagactacaagcgcccgccaccatgcccggctaattttttgtattttttttagtagagacggggtttcactgtgttaggcaggatggtctcgatctcctgacctcgtgatccgcctgcctctgcctcccaaagtgctgggattacaggcgtgagcaaccgcgcctggcccgtgagccaccgcgcccggccgatcttcaggttcttaacgcatggagcttccctgcctaaaatatctgtctgtttgaagggcaaggttagattttacatcctcttaggatgacttccgccatgcccaggctggtttcatgccccctgccctgcgttcttacttctttatgattatcctatcacttcgtggattctattataattacccacgtttgtgcctcccctagcagccataaatttctagagagaagaagcagtctcttactcactgtcatatgacggggcagtgatttccatactttgtacagcactggtggtacagagaatgatttcacagatgctctctttaaagctttttaaaattgttctactttttgaaatacatactttctctttataaaaagtggtgtttgttttcttcaagaacctcagatgcacagaagtagattaactacaatacttgttctatgacacagccattattggtccttgcatcacccacttatatttattttgctagttattttataccgtaatcagtacccctaaactyaccatgcaagagaaaagctaagctcttcacagtcgtggacattattcatctaccgataccacacctgttctgtccttttgcctccctctatctgaccctgtgtgctatgctcaccattctcttgccttctttttaaattgtttaattgcctctgtatttatctctaagctttttcccttatgtttggttgttttaaactttataaaaagggtatcatgcttacacaatatttaggaacttttttcacttaatatattgccatattgttgatgttgctgcaggtcatttagtttgactgccatatttcattccatttatgaatataccacagtttatgcatccactcgccaattgatgagcacctgggctgtctacaggcttttgtcattgtgagcagcagtgctctgaacacttgtgtgcatctctcctgagtgtgtgtaagcttttcaatggggtagaactgccgggtcagagagtataggaataatgaataatggatatggagaggggataacgggtttggataatgccaaactcgaatccaatgggatggcaccaatttgtactcctaccagtagcgaatatgaaatcctgtggttctctatcctttcccatacgtggcattgtcagccttttttacatttgggcccctcaagtatcta

SEQ ID NO: 701040 - DNA, 1442 bp, Homo sapiens
ctgcgagctccgcctcccgggttcacgccattgtcctgcctcagcctcatcagtagccgagactacaagcgcccgccaccatgcccggctaattttttgtattttttttagtagagacggggtttcactgtgttaggcaggatggtctcgatctcctgacctcgtgatccgcctgcctctgcctcccaaagtgctgggattacaggcgtgagcaaccgcgcctggcccgtgagccaccgcgcccggccgatcttcaggttcttaacgcatggagcttccctgcctaaaatatctgtctgtttgaagggcaaggttagattttacatcctcttaggatgacttccgccatgcccaggctggtttcatgccccctgccctgcgttcttacttctttatgattatcctatcacttcgtggattctattataattacccacgtttgtgcctcccctagcagccataaatttctagagagaagaagcagtctcttactcactgtcatatgacggggcagtgatttccatactttgtacagcactggtggtacagagaatgatttcacagatgctctctttaaagctttttaaaattgttctactttttgaaatacatactttctctttataaaaagtggtgtttgttttcttcaagaacctcagatgcacagaagtagattaactacaatacttgttctatgacacagccattattggtccttgcatcacccacttatatttattttgctagttattttataccgtaatcagtacccctaaacttaccatgcaagagaaaagctaagctcttcacagtcgtggacattattcatctaccgataccacacctgttctgtccttttgcctccctctatctgaccctgtgtgctatgctcaccattctcttgccttctttttaaattgtttaattgcctctgtatttatctctaagctttttcccttatgtttggttgttttaaactttataaaaagggtatcatgcttacacaatatttaggaacttttttcacttaatatattgccatattgttgatgttgctgcaggtcatttagtttgactgccatatttcattccatttatgaatataccacagtttatgcatccactcgccaattgatgagcacctgggctgtctacaggcttttgtcattgtgagcagcagtgctctgaacacttgtgtgcatctctcctgagygtgtgtaagcttttcaatggggtagaactgccgggtcagagagtataggaataatgaataatggatatggagaggggataacgggtttggataatgccaaactcgaatccaatgggatggcaccaatttgtactcctaccagtagcgaatatgaaatcctgtggttctctatcctttcccatacgtggcattgtcagccttttttacatttgggcccctcaagtatcta

SEQ ID NO: 701041 - DNA, 2043 bp, Homo sapiens
cgtctaatcccagctactctggaggctgaggtgagagaattgcttgaatccgggaggcagaagctgcagtgagcagagattgtgccactgcactccagcctgggtgacacagcgagactcggtctcaaaaaaacaaacaaaaaatgcccccacaaacctgttaactgggttaagttaatgtaagaagtctaaatatcaaagttctaagcatgccctggcttagcctctagagcaggtcactgaccagcagggtggccttggacaccgtctttcaaagtctgctactcagcaggacgactggggccctgaccacagcagtagcttcatagataatgctcgtgattaccaaagcgcttgcagcaatagttgagctttggtggaaggaactgctgaagttcctgatgtgatggggcagggggtccgagtcatttggatttagccataaaatgggaaaatctggagcagtatcttgtgatttcccactcaagacgtcaaaggggccgtattgaggcccgtgacacccacttccttccttttccggggaaacgccccctcctccaccgaagccggccgcggcacgccgccttcccactggagtttgcggcctcggcggcctcgaccgcatcccgcagccagccaaaccccaccatgcgcacgcgcacgcggcgaagccggcgccccgggctgggctgggaagtgcccgcgccagccgagggtcccgcgctccctacaggaggcggggcacggagggggcggggcgatcgcgaggctccgccttgcccttggcggcgctgggccatgcggaggcccacgtgagtagactgcccgctggcccacgggccggggcgcgcaggcgcacggcggggctgggtggagggcggaggtggcaaaagggtgaaggcggaggagggagtgcctgggaacaggcgcatacgcttggcgcggtgcctcgcagctgtctgcgggtggggccgccgctttcccttgcagacgaaagctgctgacgggaaaaccacgcgggaggggaacgtctaggccctggccctttcccctcaaaggccgcgggaacatagggctggggaatcctggcagaggctctgggcattattacagatggtcgttgagggtcgcaagcaccaggcctggaggccctcctcggcctgctaccagctgtgacctttggaaagtgacttggctcgcgcctcagttttccgttttctggaggacttgcggcctgagagtggccaaaaagaagagagttactgtcgcagtcactgcctgcctagtgggtatttaggtgcccagtcatgcctttgctctcggagccagtgcctggtgcaagcactgcggtgggttcgtgccccagcttgggggccacagggctgactcggccgcactgcctatgcgagcttggccccagtttcctcgtcagggcacagaacttccttcaaaggtaatgaaaagaggtgaaatctgtgtcacctttagtccctggctcatagtgggctcgtaatcccggttacaggcttcaggccgcgcacagggcatgtaactagagctgatcctttcataggaggggaacgcagrcaccatgccagccggttgtgcatgcccgccgaacagaggtcgatttccactctgtcggctggccagggagaaggaatgcaattattcatttattacgtacactcccattgatccctgccgtagaaaaagctgctcagtcttactttgcacatctttctagtttagtgttttagaaaagataaaggaagcatttcattgattattttttctaaatttactcttacaattagtccttctctaatgatcaagaaggaaacgtgattaatctgtatttgtggaggttattagtgtattggaataacatgggataaaacagtaataggagagctggcaaaaccagatactcttcaactgttaactgtgttgaaagcttgaaaagtattcatgttctgtgctgtgttacactctttttttggtctcaaaaatacccctacctccattgtctctaggtggtcg

SEQ ID NO: 701042 - DNA, 2147 bp, Homo sapiens
tgaggcataagtgctttgctccacccaactggactacacagtcctggcaagaaaatctagggctgaggtgttctaacgccccaaagaggaaagtctgagcaactgacaagaaaactaaggaaaccgatggctgagatcccacactcagatggcgacagggatcaagcagggagcaccacaggctgaaatgggccaggcaccaaagaaaagaaagaacccacctcatctggaggggcccccactagcatgcaagccacatggtactgtgggtccagcctggccgacagtggggtttgtgtgaaattccttcactttccaacatgagtcagatctggccaggtgaggacctcagatctcagatgctttttcaaagttgaggttcttcaatctgattgaaaattcaaacaactatagaaggtattaacgttgcaggcttctctcagttccatttcactgtttgccttactaattaacaatataatttcttagctaatccaggcatagactctgtggcaagttttaagtgagagcaattcactgcggcagtaccaactgtctagccacaatcgaggtgtgacaggcatcaagtcacctgggggataaggtcagccaggtaaatatttaaaggctgtgccttccctggccagatctggactagcattatttcctttccataccctcataacccaagtacacagaactaccacggctgactggagtgtcttaggaggaaacattccaccacaaaggagatagaggttcagatgccctttccttgttcatcctcacaccattcaggcaaaaagggggtggtttccctaggtccaggagttggcaacaaacccaggcaaaagccagggacccagtgctccagcacacttctcctgggcagtgagggccctccgcagatccagacccattcggaagaaagaagcggatctctacgatccatcctcggcccttcctaaacagctcctgctgctgggaaactttgcaagggacatcatgtgccctctgtctctcagcatttggttaacaacatgagctctagtgtaagactacctgggttcaagtcctacttctgcactccctgtgtcctctgcacctcagtttcctcatctatataatataatcatataagcaacacttaggatccaggatatcataagtgcctaacaaaccttgcccattgttatcagacaaaaacaacaaaatgaacaaaggatttctggaataatcagttcagcaaatatttttgagcacctctttctgtaaatcactgaaaggcagccatttccttcattcaaccaacaaatatttattcagaactttctatgtatccaattttagaaatctaatatatttaattatctagccatccatccatcccatttttacctgagtgcctagatgtctaacagtgacaggctacaagacacacacatcaataggcacatacagacacttaacaaatatatatggggcaggcacctatgttggtgcacaagatgtggtctctggagacagcagggaagacagacaagggcattacttgcccaggcttttgcatcacagaactttgctgatctggccaggctcggtggctcggtggctcatgcctgtaatcctagaactttgggaggccaaggtggggggatcacttgaggtcaggagttcgagaccagcctggccaacatgatgaaaacccatctctactaaaaatacaaaaattagccaggcactcctctaattctagctacttgggaagctgaggaaggagaatcgcttgaacccaagagctggaggttggagtaagccaagatcacgccactgtactccagcctgggtgacagagcgagactccatctcaaaaaaaaaraaaaaagaaaaaagaaaaaggaaaaaaaagaaccttgctggatccttggctcaagcaatctggcccaagtgagaggtgctgaaccatcagaggaaggcaggccttggcagcctttcccgagctccctccacgcccccacccccaggccctcacctgcaggtctcggttgtggttttcacacaggagctgaaggaagcggaggatgggctgcatgatggtgatgaccgcgctcatctccaggtcgtccttggccttgtcggcagtggcc

SEQ ID NO: 701043 - DNA, 786 bp, Homo sapiens
cgcaggtattaagtttccattttgatcttttgcccttgttaacacgttgctttctgtatttgcttcctgtgtcatcttatcaaatacagataagcacaagggccagatgtcctactgcttttgaatcttctcataatgtttcctcatagatgtttagtagcactgaattagctaatagaacttatttgcttggaaatgttacccaggaggtgcttgtcaggcaaaaaggctcttttgcatgttactttttttgaagcaaattacccgcagctctcaggaaagcatttttcaggaatgcgggctcctgggctctcccctcctaagcaaaagcaccccaccacctcctgagagcatcccacttgctgccacattgagcctacttttgatctggaaaattgctcctttgcttctggatcctgtatagctagtttctgaagaggtcaagtgaactaacccgtaatggaacaaactggaaaatctccaatggaatgttgagggcaaggaagagggagcaggagaggcaaagagagaaagtagggaggtgtctacccccactgtgagaaaaactcagcaccaggcttaaaggatgatggagcagacattctcatgtgtaattattagggagttaaagtcrttcagatgagtcacctgggtgtggaagctccagtctggctgtggttgtagtgaatcgtccttctccttttactttgacacctctcaaatctggccaccaaaggacatgtcattccctgtttcaagctaaggtgagggtagtgaagtttctca

SEQ ID NO: 701044 - DNA, 1484 bp, Homo sapiens
gaacatgcaatatttgtctttttgtgcttggcttatttcacttcagataatggcctccagatccatccatgttgctgcaaatgacaggatttcattccttttttatggccaaatagtattccactgtgtctatatascacattttctttatccattcatttgttgatgggcacttatgttagtttcatattgttactgttgtgtacttaagttactgtttggtcttctttaccaaccttccttcttaatgctgctcaaatttctaattttcaagaagaatttagtctcctgcatttgactatactagaaaaatgggctgctgtttctttgctgggaatcaaatatttggtcttttaactgcaacatgcccagggtgcagcatctagattctctcaggcaaagtgctcataatgaattcaccacttattcagattaaatagctccaatagcatggcctttcaaatcatcatctatagactaacacagattctcagtttagttggcactagagcaaaggcaaacagtgctaaaattattcaaaaaagggtatgcagcatataaattactgtgaaaacttaaatgtagatcaaggttaataaaaatttgcttattaaaaaaggctatcaccaaaactaggatggcaccaaaattcaagttcccgcagggaaaggaaattttttttccctcttcccttgatctgccaagggctatgtcaggtcaccccacagtcacatttctctgaaagcccaggcttgtccagggcccaagtcagtgaatatgagattgcatctcggggaatgagcggcgctgtgagttacagtggaggagggctcacttcccctggtcatttgagtactcgacagcatcgccttccatcaggtgcttgagttgaaggacaaatctaccagtgaaccatgaatgatttcatgattaatctgaggtttgccttgaatacacagaactcagggtccactccccaaatcaatgaaagctctacttctgggcagtaaaagcaagtggaggaaaccactaaagacatggatagaactcacaagtatctgtgaccaattcaacagagaaaagaacgctaacgtcaaccatgccctgcctcaactttgaaggacacttaaagatttaaagttcaagagagagaaagacacagggattttccagaggaggaggctcttagagtcaagatgcccactctgacttttcttagtgacaacgtgcccacagccaaggtgtcttgcagagttttggaaccataggaaatgatgcttctgtcagctctgctgtcagccccgcagcccctgcttcctggctggctgtgctctgggcctgttgctctttcgcctgctccctccctctgtgcatgcctcccacctgccaggtctcatttagctcatgtctaccacccaacggatgtgtgaggcggtaggaaccgcgatgtacagacaggaaacccaggtcagcaaagtcccgtg

SEQ ID NO: 701045 - DNA, 1484 bp, Homo sapiens
gaacatgcaatatttgtctttttgtgcttggcttatttcacttcagataatggcctccagatccatccatgttgctgcaaatgacaggatttcattccttttttatggccaaatagtattccactgtgtctatataccacattttctttatccattcatttgttgatgggcacttatgttagtttcatattgttactgttgtgtacttaagttactgtttggtcttctttaccaaccttccttcttaatgctgctcaaatttctaattttcaagaagaatttagtctcctgcatttgactatactagaaaaatgggctgctgtttctttgctgggaatcaaatatttggtcttttaactgcaacatgcccagggtgcagcatctagattctctcaggcaaagtgctcataatgaattcaccacttattcagattaaatagctccaatagcatggcctttcaaatcatcatctatagactaacacagattctcagtttagttggcactagagcaaaggcaaacagtgctaaaattattcaaaaaagggtatgcagcatataaattactgtgaaaacttaaatgtagatcaaggttaataaaaatttgcttattaaaaaaggctatcaccaaaactaggatggcaccaaaattcaagttcccgcagggaaaggaaattttttttccctcttcccttgatctgccaagggctatgtcaggtcaccccacagtcacatttctctgaaagcccaggcttgtccagggcccaagtcagtgaatatgagattgcatctcggggaatgagcggcgctgtgagttacagtggaggagggctcacttcccctggtcatttgagtactcgacagcatcgccttccatcaggtgcttgagttgaaggacaaatctaccagtgaaccatgaatgatttcatgattaatctgaggtttgccttgaatacacagaactcagggtccactccccaaatcaatgaaagctctacttctgggcagtaaaagcaagtggaggaaaccactaaagacatggatagaactcacaagtatctgtgaccaattcaacagagaaaagaacgctaacgtcaaccatgccctgcctcaactttgaaggacacttaaagatttaaagttcaagagagagaaagacacagggattttccagaggaggaggctcttagagtcaagatgcccactctgacttttcttagtgacaacgtgcccacagccaaggtgtcttgcagagttttggaaccataggaaatgatgcttctgtcagctctgctgtcagccccgcagcccctgcttcctggctggctgtgctctgggcctgttgctctttcgcctgctccctccctctgtgcatgcctcccacctgccaggtctcatttagctcatgtctaccacccaacggatgtgtgaggyggtaggaaccgcgatgtacagacaggaaacccaggtcagcaaagtcccgtg

SEQ ID NO: 701046 - DNA, 649 bp, Homo sapiens
tccagaaggattcttcagttcacagtgtaaacaacacccttcatcaattctctacatgattcctctttcacttgtagtcatttttgtgtatcagcaagtagtttttctggggcacactttttcccccacagttcatacaggaaattttttttaagcagcacttttgggatacaagtttatgtaaaggaataaaaggaagaagagtgggcagagggacatactgggctgcaatgcagttataagatatttgctgactccatgttcaccagcagctaaaactgggtgctctgcagagttgtctcgaattgggcagagrcccctcattacagtcccgtatggaccgtcattgaatgcaggatattctgggaagagtcactcacttcacctgagggaaattcataagtggactgaggcctaagaggtgatggttctggacaggtacactcgcagcagctatagactccaggcttttagtcctgagcaggcatctggccagtgtagcataacatgcactacaactcagcaagcagaacctgtctttttatttcccatcacaaaagcaaagcttcaggaggtcgaggctatagcttgcgatgattgcacctatgaatagccactggactccagcctgggccatacagcaaaacct

SEQ ID NO: 701047 - DNA, 649 bp, Homo sapiens
tccagaaggattcttcagttcacagtgtaaacaacacccttcatcaattctctacatgattcctctttcacttgtagtcatttttgtgtatcagcaagtagtttttctggggcacactttttcccccacagttcatacaggaaattttttttaagcagcacttttgggatacaagtttatgtaaaggaataaaaggaagaagagtgggcagagggacatactgggctgcaatgcagttataagatatttgctgactccatgttcaccagcagctaaaactgggtgctctgcagagttgtctcgaattgggcagagacccctcattacagtcccgtatggaccgtcattgaatgcaggatattctgggaagagtcactcacttcacctgagggaaattcataagtggactgaggcctaagaggtgatggttctggacaggtacactcgcagcagctatagactccaggcttttagtcctgagcaggcatctggccagtgtagcataacatgcrctacaactcagcaagcagaacctgtctttttatttcccatcacaaaagcaaagcttcaggaggtcgaggctatagcttgcgatgattgcacctatgaatagccactggactccagcctgggccatacagcaaaacct

SEQ ID NO: 701048 - DNA, 2025 bp, Homo sapiens
gaagaaatgtgtatatactatttaattgtagttaagcttataaaacataaatgcaataaaaatttggaaggaaatgcatgaaattcttggtattgaagctaatcaggcattctttcttttttatttttctgtatttcccaattttccataatgagtttaaattaccttcattctctctctctgaaatatatataatttttagattttagcctttttataagttacaaaaactgccacccctctaaataaggctgtttccttagttactgttgagtatttttaaagaagattccttctattgcttattataaagacctttttaaaaaacacaaatgtttactgagttatatgtaaaatttggtatttactgagatggtcatgtgttttatttttatttacagatctgctgaattatattgattccctaaaagggaaccacccttagcataaatgctacatgagattgatatatttttcttttagtgtacttctatattcagtttactaatgttttatttaggatttttgcatctataagtgaaagtagtatatgtgtgtgtatatatatatgtgtgtgtgtatatatatatgtgtgtgtgtgtatatatatgtgtgtgtatatatatatatatatatatatactttttatactcatctagttttggtaccaagttttccagagttgtagatgtattcagaaattttttggctcttttattctctgaagttgtcaaaagaattatttgttcctttaaagcttgataaccttgactttaacaccctctgaaataggcctcagagaggggtggtaagtgacatgagatggtctttttctctgcttctttccacattactggtctattcaaaatttttactactttttggaactattttggtaattgactcctgccctcaaagtattcattaaatctaaaaatagaactatgaaagtacaattttctacaaagtaattttataatttttaaagtcttccaaattcatgatcttgttttcattctgaatattatttgtgttggtcttattttttttccttggatacagttgccaaaagtttaattctcttatcttctttccatttaattggccaccttttagaaaaaaatgttgttttctgcttcatttatttttttgtttctataacctagtttactcttttttattgttttcctattaaattactatatttatttggtatcttaaagttctacatatttaacattttaaatatatagtttgtttcatgtattagatatttttatatcatgtattttgtaatagatacattttaggtattaatttttctctcattcatctgattacatccattgagtttggatatcaaatatgcctattaacattatttctttttaaaaacagtcttttatttccaaaagtctataaatttactaatttctcttaatataaaaaattatacaaaaatttagtaaatcaaaatagagtttgagccattatatggagaattgttttcatacacatgacttctattttttggaatatttttgaaattgcctttgcagaacaaaatcaactgttatgaatgttccatgagcatatgaaaagaagagaaattctttctttggtagataccrtagatattcattaattatagataattattaacattaacattattaatgtattaacattaataacatgtaaatcaatgtattaacattccctataattttatttattttttgccaccacagctatcaatttctgagacagatgaagttacttcactgtgattttggattttcagatttcctgtgtttttaacgtttttcaatgctatataatttagaacataaaaatttataactttattgtaattttttaaagaggacttttcctttgcatcttgaactagaagtttctgcattgatatttaaatgggaacaagtgctctgtttttttaaaaagcatgttataaaagtagtttacaatgtaaaagtagggatatgagagaaagtggaaaggaaa

SEQ ID NO: 701049 - DNA, 642 bp, Homo sapiens
aatgatctcactgccactggattagcagtggtttatgaagagaattaattaaaagaaattagatcagctgggtgtggtatatcctgcctctaatcccagcactttggaggccaaagtggaaggatcacttgaggccaggagttcaagaccaagctgggcaactattagggagaccttatctctacaagtctttttttttaattagctgggagtagttacacatgcctgtggtcccagctactcaggaggctgaggtgagaggactgcttgaacctgggaggtcgaggctgcagtgagctatgcttgtgccactgcactccagcctgggcaacagagcaagaccctgtgaaggacggaaagagggagggaggaaggaaggagagagaaagaaagaaggaaggaaagaagaaasgagaagatctatatgtagcaatatagataaatctgaaaacataatattgagtaggaaagttgacaaaaagatacctaaagcacatatgttaccatttcagtagatttttcaaacataaatgtttatagatttacctgtatgtaggaaaagtattaaaaacatgcgtggaaatgatacacagtaagtgcagagcagtacttatccctggtagagtggaggagggacaggaa

SEQ ID NO: 701050 - DNA, 618 bp, Homo sapiens
tgagctcatcctggatgtctagtcaccaggcatctgtctacattagccagagggcayggaacccgcagcccagagacatgagcaacaacacacagccagaacaggctgagggcttttcacccagttcctaaggaaggtgaaaacaaagcacctcacctaggaaaggaaggctgctcctgggagaaaagactaggcccacctcttcagccccctcattcaattccaatcaagacacaaggaaaaacaggctgggcgagttgggaggctgaggtgcgcagatcacttgaggccaggagtttgggaccagcctggacaacatggtaaaacctcctctccactaaaaatacaaaaattagccgggcatggtggtgcatgcctgtaatcccagctacttgagaggtggaggttgcagtaagccgagattgcgccactgcactccagcctgaaagagcaagattgtctccaaaaaaaaaaaaaaaagatacaaggaaaaacgaaaagacaaaaacaaaagccaagttagaaaacagaaaggaggaaagaggaagtatggtttaaacgctgagctggtggaggacaccaatctgagccgaggtctcctcctctgcctgcacccct

SEQ ID NO: 701051 - DNA, 618 bp, Homo sapiens
tgagctcatcctggatgtctagtcaccaggcatctgtctacattagccagagggcatggaacccgcagcccagagacatgagcaacaacacacagccagaacaggctgagggcttttcacccagttcctaaggaaggtgaaaacaaagcacctcacctaggaaaggaaggctgctcctgggagaaaagactaggcccacctcttcagccccctcattcaattccaatcaagacacaaggaaaaacaggctgggcgagttgggaggctgaggtgcgcagatcacttgaggccaggagtttgggaccagcctggacaacatggtaaaacctcctctccactaaaaatacaaaaattagccgggcatggtggtgcatgcctgtaatcccagctacttgagaggtggaggttgcagtragccgagattgcgccactgcactccagcctgaaagagcaagattgtctccaaaaaaaaaaaaaaaagatacaaggaaaaacgaaaagacaaaaacaaaagccaagttagaaaacagaaaggaggaaagaggaagtatggtttaaacgctgagctggtggaggacaccaatctgagccgaggtctcctcctctgcctgcacccct

SEQ ID NO: 701052 - DNA, 869 bp, Homo sapiens
ttcaatagcatttaacacattttcctatttcttctccaggataaacattcacaacatcttcaactcatccttctatgataaatctgcaatcctgttcctagttgcttttttttttagatggagtttcacccttgtcacccaggctggagtgcaatggcactatctcagcttactacaacctcctattccccagttcaagtgattctcctgcctcagcctctcgagtagctgggattacaggcatgcaccaccacacccagctaaatttttttgtagttttagtagagacggggtttctccatgttggccaggctggtttcaaactcctgacctcaagtgatctgcccacctcggccttccaaagtgttgggattacaggtgtgagccactgcacccggccctgctcttcaacttggtcttttagactagaattccaaagaactacccctgaccccttcaattcattacaatgtttgatggttttttttaaaacagaaattctacagtgtttgtgacatcacagcatacatgattctccaactgtatagctagatattttggttctgtggcttaatttaaattacttttgctgacacttacttcatttaaaaaatttattcaaaccttaaaatggtcatgtatttcaaccatgcctgtgttgaacatttacactcatttattttttttcagcatttttcgagtggctactattgaattaaatatttagaaaaatttttcaaattcagaggatgcatccaagatgagaggtggatcattctgtagtaaaaactatacattttgttgcatttttacttcaggagctaattgaatataacaagataggtcctrgtatagatttattttaagta

SEQ ID NO: 701053 - DNA, 591 bp, Homo sapiens
acatgatttgcaataataataggacctcgttgactatgtgtacacttatttacttccttcttagcttctaacccaaggactcctttttgtttttttttattaaaagtatgactcacrcttgggacttaatagaaagcaccagatctttgccttttatcttttattgctctcccggactgtgacttgaattcattctttgaatgattcaatctatcaccataggaaggttcttacatatcactctcttgccctgggactaggacttacattctctggatgttaagctcagtgtatgagttttctagggccaccataacaaagtaccacagactgggtgccttaaacaacagaaatttatttttttgcaattctagaggctagaagtctgaaatcaagatatggttgtgttgactccttctgaggtcccactccttggcttgtagatggccatcttctccctgtgtcttcacatggccttccctggtgtctgtgttcaaatttcctcttcttataaggacaccagtcatattggattaaggcccaccctaatgacctcattttaacttaattacctttttaaaggccttaact

SEQ ID NO: 701054 - DNA, 591 bp, Homo sapiens
acatgatttgcaataataataggacctcgttgactatgtgtacacttatttacttccttcttagcttctaacccaaggactcctttttgtttttttttattaaaagtatgactcacgcttgggacttaatagaaagcaccagatctttgccttttatcttttattgctctcccrgactgtgacttgaattcattctttgaatgattcaatctatcaccataggaaggttcttacatatcactctcttgccctgggactaggacttacattctctggatgttaagctcagtgtatgagttttctagggccaccataacaaagtaccacagactgggtgccttaaacaacagaaatttatttttttgcaattctagaggctagaagtctgaaatcaagatatggttgtgttgactccttctgaggtcccactccttggcttgtagatggccatcttctccctgtgtcttcacatggccttccctggtgtctgtgttcaaatttcctcttcttataaggacaccagtcatattggattaaggcccaccctaatgacctcattttaacttaattacctttttaaaggccttaact

SEQ ID NO: 701055 - DNA, 577 bp, Homo sapiens
tgagccactacccctggccactaaaatcaatttttaacagctttgatctcttagagctctcagtcatatcccacttgtgcattagagacatatgctgggatttgtcagcttaaaaagagggcaaatccttaccccagaattcttgatatgggaatggtttgctttggggaaaagaaggcacagacagtacttatttgatatcctccagactgcataatatatccgtgcattcttaggcttaaagttgttccaccaactctttccttgagcagttcagttcatcataattgagtgtaatcatatgccaggtactctgccaatatctgtggagacaaagagtaagacactgcaccactctcgaggatctcactgaggaggagrggagacaaagaagcgaacagaggatgcgatgctgtgtgtggtgcaggctctggcagaggaaggctgaggacagtgcaggagcacggggtggcgccaggcctgacacggagcgccgtggaggagcagactctgttgactaactggtgagataccaagtgaaaaaaggtggtaaatgcattctagaaaaatgaaaccg

SEQ ID NO: 701056 - DNA, 1083 bp, Homo sapiens
caggctactttggtttgttgttctgtttagtaatttaatgatggctaaatctgctgtgatctctcatccatcctgagcctctcccacttcatattgtaagctccctggaaatgaagaccacgttcttaattcttcagaaaactgccagcccctaacataatatcccatgaatggtggatgattaataggtgattctagaaacatgaagctagaagaagcctctgagatccattcattcaatagtttaacaagtttttactgagtgtccacaatgcaccagacacttttctaggatctgagattaaggaggcgaccaagaaaaaagctgacccctgccgtctgatgctcagtttctagtgggtgagagagtcaatctataaatcagtaaagaaatcataaataaatgaagcactgggtaatgctaagggttgtaaagcaaactgcagcagagtcaagagctgagagttggggaacgcaggttggtttagccagtaatgtctctgggaaggggaacattggagcacaatctgagtgggctgaggactgggtcacactgtgacttagggttaaaasagtccaggtagaaggaagagaagtgccatgccctaagacagaagtgagcttggtgcattacagtgacagtacagaacccagggcagaggtgagatgcccaagacaggcaggaaggctggcagccaagataagatgctagagtttactcccagagtgaagggatgcagccatctgagggtgttgaggcaggaggtgaacaaatgtgacgcacttttaacattactctaactgccatggggaacaagagtggaagcagaaaaccagtctggacatttttgtggagaggagtgatggtggttttgatgcgggcagaggtagcaagactcagatgcagtcaggtcatatctggaaggggactctaatatttgcagaatgtctccaagggccaggatgctttcctgtgctcctaggaagagcttggggctgcaaaggaggtgtggaagggaaggtccaggggtcaccagcacctggttcctacccaaacagttcagcctcacctgcctcaccacg

SEQ ID NO: 701057 - DNA, 1083 bp, Homo sapiens
caggctactttggtttgttgttctgtttagtaatttaatgatggctaaatctgctgtgatctctcatccatcctgagcctctcccacttcatattgtaagctccctggaaatgaagaccacgttcttaattcttcagaaaactgccagcccctaacataatatcccatgaatggtggatgattaataggtgattctagaaacatgaagctagaagaagcctctgagatccattcattcaatagtttaacaagtttttactgagtgtccacaatgcaccagacacttttctaggatctgagattaaggaggcgaccaagaaaaaagctgacccctgccgtctgatgctcagtttctagtgggtgagagagtcaatctataaatcagtaaagaaatcataaataaatgaagcactgggtaatgctaagggttgtaaagcaaactgcagcagagtcaagagctgagagttggggaacgcaggttggtttagccagtaatgtctctgggaaggggaacattggagcacaatctgagtgggctgaggactgggtcacactgtgacttagggttaaaacagtccaggtagaaggaagagaagtgccatgccctaagacagaagtgagcttggtgcattacagtgacagtacagaacccagggcagaggtgagatgcccaagacaggcaggaaggctggcagccaagataagatgctagagtttactcccagagtgaagggatgcagccatctgagggtgttgaggcaggaggtgaacaaatgtgacgcacttttaacattactctaactgccatggggaacaagagtggaagcagaaaaccagtctggacatttttgtggagaggagtgatggtggttttgatgcgggcagaggtagcaagactcagatgcagtcaggtcatatctggaaggggactctaatatttgcagaatgtctccaagggccaggatgctttcctgtgctcctaggaagagcttggggctgcaaaggaggtgtggaagggaaggtccaggggtcaccagcacctggttcctacccaaacarttcagcctcacctgcctcaccacg

SEQ ID NO: 701058 - DNA, 643 bp, Homo sapiens
tctccttaggtagtggaaagttgtgttaaaggcaaataaatctcaggccccaaaatcactcaagcccaactgcttagggcaaatctgcctcccgttctattcaaagtcgcccctctgctcactgagataaatgcatatctgattgcttcatttggataggctcatcagaagctcaaaagaatgcaaccatttctctcttacctacctgtgacctgggcgcccttgcaccacttggagttgtcctgcctttgcctcaagttgtcctacctttttggactgaaccaatgtacctcttacacatattgactggtgtctcgtgtttccctacagtgtataaaactgagctgtgccccgaccaccttgggcacatgtcatcagaacctcctgaggctgtgtcacaggcrtgtatgtccttaactttggcaaaataaacttgctaaattaactaagacctgtctagattttcaggttcacagttggagactctatacccctttattgcactagtttgagctccttcaggccaacactagacatttggctccatgttaagggaaggacacagaccccttcacgtccgaggaaaggcgggtgctgagccttgccgctctcatcatccaaggacttgcactctgcttcagtg

SEQ ID NO: 701059 - DNA, 544 bp, Homo sapiens
tgggtgattaataaatctgactctagtactggagctcggggccattatggtttaaaggcaaacatgaggcaactcctggcatcaagattttctcctgtattgcatttcaaatgcttctcccaaaccaaaggctcagcaattttcactcagcattacaaggccaagaagaaatcaggctgtaaattggctttggacttttctggttttgttttgactcttgtttgaaatataggtttaaaaaaaatgtttctagcagctttaatgtaaaagcagtgtaattcttaagaacacaagtatttggattaaaatcctagtctcattatttccaagctcagtgaccttgggcaaatgaccttacctctctaaaccttaatctcctcatctgtataacaaggattacaatgsctttttctggactgttgtaaggattaaatgagataaaattttgtatataaagtgtttagccagtcctggaacataagaaatgtctgtaataataatagaattactagcagtactttgattaacaatcatgctaggcaat

SEQ ID NO: 701060 - DNA, 833 bp, Homo sapiens
atgccatctccagtactcagcacggtactgggtccatagtagagatgacagaatgctcagtaaagaacttaatgcttagtattttctgagtactggaaatgcattgaacataaagtccaaacctaatttaatgttcctcctattatattttatttcttctcaaagaagttaaaggactattggaatcttaccaatatttactgtaccatcctgagtactgacatgcattgataagtgagattattgcatgtcagtactcagcacagtatcatgtccatggtagggatgacaaaatgcttacaaacacagctttgtattagttcttcataatttctagtgwttttcttttaaactatccaatttagtgaagcacagaaagagacctccttcattttaaatcaaggagggtcaacataaagtctaaacctaattcagtgttcttcccactatatttgatttcttctcaaagaagttaaatggctattggaatcttgcaaacatttacagtcttattgttaatttggccttaattgggtcagctagtagagagatgcactgatgaacagtcatttcttaagattaacttgcacatgcaatacatcaattattgcaataatatgtaacctccaaacaggaatggggcatcgctgtgctaagtaaaattagtccagatacaaaagctaattctttgtgatgattatacaaattagaagtaataaagagctatttctaaatcttgtgataatttcaaacaaagagatagcaaaagggaagatctttctaaataactaataatttacaaaattaagcaatcagagaaccctacagtttga

SEQ ID NO: 701061 - DNA, 596 bp, Homo sapiens
gtattggatggcaactctgtgagtaagattacaatgaaatagaggtttccatccctggagaaatatgtgctttcaagctgcaatttgaatatttgacatggaaagtctaggtattttattcatcacagagatgtatgaggcatataaatacacattgtggctgagagtgcrttctctagagtcagcctgcctggattcaaattctagttctactgctaactggctacatagccctgtgcaaggttttcaaccaagttatgccttagttttctctctacttaattcctacataagaagaattttatgagaattaaataaaataaaacataaggaatataaaactgtgtctggcttatagtaagcactcaatacattttaagccttattattattatccctgttattattattatttttaggttttgttctataggactctaatcacattttggttttcaaaagtgttaagaactcaattgtacttattcaacaaacactccctctggatatattttcatctaatggcttgacagttgcttgtatataggccatattctgaaattatgtttttcaataataaaagtgatatcattttg

SEQ ID NO: 701062 - DNA, 561 bp, Homo sapiens
tgagctgcctgcctggctcccaggccaagcccagcccctggagctcattcctgagatagccaagagggctttcagggatgatgccaccctgcttaaggacagcagtcagatgggtgatggccgcggggtcactgggcattgtcctctcactcracactgggctaatcacagaggtcatcagatttcagggaggtatgtctaggaggcccgttttagagatatggagcccgagtcctgggttagtggttgtccttatcctgaccccacagctggcctttggtagtggaggacgttctcgtcacacaggcagccctgttctagctgtggggctgtcggctcgtgcccatagcacctgatacctggtaagctctcaagagacagctgactttactactcagccttccacgtgcaatttcagggtccctccattccctaacttcatgcttccctgagtcaggaaactgaaagtgagctcttcccctcttacaaatgtggaaaagcgggactgctccagtgataagaaagttccagtggtcagaaaagcctggagggcgggcatgg

SEQ ID NO: 701063 - DNA, 640 bp, Homo sapiens
tgtttattaatgtatctctttcaagctccaggagatattcctggttttccaagatttattcagatctttacattctagaaatatccaacatgtccattttcagtcttcatgtttctaaactgtgtcatcccattcatttcagtctgcccttgtggcagtcctctatcccatctgttctaacttttacctttctctggacctccctcattccaatttcttttttcattccttcctatctttcttttttcctttaaaaaaatgtttaaagatagtcacctgaactatggactatgtatgtctgctaatatacacctgcagtaaatgggagagaaataatctctaattcccagtacctttcattgtgataggcaatattttctttgtattcctgacaaaagactaaaccagagattttttttttyccctgtggtcatagctgcagtagctgcaatattacacatcatttggagtatttagctttaacattttatttaaaccacatcaaaagccatttgcttcttttctaatcatcactagcttttattgcatacttgctaagcacttacgtgcaataacttacttaatcctcattaaaaaataaaccatgaggtatatttcattttagccctcaatttacaga

SEQ ID NO: 701064 - DNA, 640 bp, Homo sapiens
tgtttattaatgtatctctttcaagctccaggagatattcctggttttccaagatttattcagatctttacattctagaaatatccaacatgtccattttcagtcttcatgtttctaaactgtgtcatcccattcatttcagtctgcccttgtggcagtcctctatcccatctgttctaacttttacctttctctggacctccctcattccaatttcttttttcattccttcctatctttcttttttcctttaaaaaaatgtttaaagatagtcacctgaactatggactatgtatgtctgctaatatacacctgcagtaaatgggagagaaataatctctaattcccagtacctttcattgtgataggcaatattttctttgtattcctgacaaaagactaaaccagagatttttttttttccctgtggtcatagctgcagtarctgcaatattacacatcatttggagtatttagctttaacattttatttaaaccacatcaaaagccatttgcttcttttctaatcatcactagcttttattgcatacttgctaagcacttacgtgcaataacttacttaatcctcattaaaaaataaaccatgaggtatatttcattttagccctcaatttacaga

SEQ ID NO: 701065 - DNA, 627 bp, Homo sapiens
atacctaggactgagtaatttataaggaaaagaggcttaattggctcatgttttcgcaggctgtacaggaagcatggcascatcagctcggcttctggggaggcctcaggaaacttataatcatgagggaagaaggaaaagcgggagtcagtacttcacatggcaagagcagaaagaacagaaagaggggcaggcactacacacatacttttaaacaaccagatcttgtgagaagtctaccatgagaacagcatgaggggaatgatgttaaaacatgagaaactgctcccatgatccaagcacctcccaccagaccccacttccagcactgtggattacatttcaacaagagatttgggtagggacacagatccaaatcatatcagtactttaagtatatttattcaatgaagcttgcgtaacactgctgaatttggttagtatcaggttacttatttactctttttgattccttgaagatctttcctcctctgcttcaatactccagtgaatttgagttctgattatccaaacttactattaggaaagaaccacatatgtcatttacactagatgttgtggtaatgaacatcaggaaatagtatctcttggcatgctttctcacta

SEQ ID NO: 701066 - DNA, 629 bp, Homo sapiens
ttctttcatatgccaaatgggggttttattatgattatcatgtgtttcataatagccttattaggwtgataagaccttaatatgggcttctaacatgtggagctaagtctgtgatatagtggcatcaaataactgtgtgatttattgtccaaattcagatgtctttgagaatgagaagggcttttgttaatatccacaccacagcaacccataacaatgaggcctgtccccacacataggtctgtttggtcaacccagctagtacagaccagagtatcactacaactctgttgtgggagaaagaaatgttcttttttagtaacagattgtttggttttgtgagactaagatttttttttttttccccagtgtaagcagctctgcccagaacccatattttgggtgaaggacacccttagtccatggagtgagaaacagggatttgctggatgtaatgattttccagcctctccctctcacctctgctattgaagattgagttagacctgctctgaaggccacagaatagatggatgcatattctaattcctaatgcctacagggcaataactcaggctgattccttcagctacaataacaaggtttattttattacagtttgaaagctg

SEQ ID NO: 701067 - DNA, 659 bp, Homo sapiens
cctctcctccggagtccagtcatccctctgaagtctagttgcctctctgcagtcaagcagcttctctccctctaccaattgaatctggagtctttataggcacaggatagggagcaggacaggccataggcagttttagaaaaggcaccattcaattggaaaaaagacattattcagaaagaacaaattgggagagagcaggcaaacagggatagaagtttttacattgggttgtgggtttcaggcttttcagctcgtaggtggggttttgccaggacctgccgcwgtctgcctagcatttctctgcctcctgcccctatcagtatagaaatagtgaacaaaccagcatgataagtagcccttgaacctggctttcttgtcttaagtcttcctactgtgttccaatgaaatactccattgtgtctataaaaagcagctgagtttttgtttacatgtctaaaaaccaagaacgaataaatactgcagtgtagtgaaaactacaggtcactttgtgttatttattttatctgagttttaccaagcttcctgataatttcacagaagactaaaaaatcctgtgaaagctgagacctttacattttctgaacttttataaaatgtctttatttggttctaaatgacctctgataacatgctca

SEQ ID NO: 701068 - DNA, 656 bp, Homo sapiens
cacagtcagtcagaggtaatggagtagcagggttaagtaggttttagatggagtagcattttagatggaggtcagaaggaggcaggagaaaatttcataagatcataagatgttagttttcttgctgaaaaatgctgagcttggttggaatttartagactttccacagcatgtggaatttgcaaattaagttcattccctaaaaccagctcagatgaaacttgtagcaacttggtggctgctgctgcttctattttttttttttttttaagacacaggatctgtcttaggcttcctttagtggtgaaacagtgtggcctaatgggaggaggcttattggtagactaacagagaagcagacaactcttttccagtgtcctgcttatttgcaaggaaggcagacatctcggggaaaagaatttcttgttctaggatctatctcttggttgtgatttaaaataaaaaagaaggttcctttggtctcagcccctgtaactgttgtaattggtgagacataagcttggtagtcttttgggttttttcttgctccagagtcctctcaaaatgttcagctaaggccaccaattcagtcatgtctgtaacttcccatccaggtttatgtttttttaattaaactgctaagtttgggacagagt

SEQ ID NO: 701069 - DNA, 989 bp, Homo sapiens
tgcatatttaccattttgataaaactagaatttgaaatcaaaattttagtccttttccttattttacggaactcttagtttcctgctcccccatctcacctctgttatctgaggacgtggaacagttatttaatgcaatctgaaccataactgtgtttataatgttttaaaataatcctccttaaacgatatgtaagtggagcataaagaagccaatattttaaytttactgaaagattattgattgctcttgagcttgttattgagatgaacgaaactcattcttttatcaggaaaaaaaggatgagaagaagaaatcacataaaagagtaagtagcaactcgaaaattattttcttggtttattttatgttgcagctacacaagccatccctttttgtgtgtccatcaatacgatatctgttgtgcttttgtacaaagaacaaagatgcttttatcaattctcaaaagtctgtaagacaaaccattcatgctgtcaaaccccctaaaaccctttcagcaaataatgaaatccatcagtgacaaatgtcaacatactaatttgttaaatgcaaaacaaaagcaacattcagacaaggcgcttcatttcatgttatatcagcactccaatttgtaccaagtttatggcaacccacagatcatgcaatattaaacagggctgtattataatgactaaaactggaacaataaactccccttagctagactgctaataaagcagctgaaatacgtgctatgattctagtacattcaactccttccaaactactagaaattctacaaagatacctattgctaataatttggtttaacccaaatatatggctttcagatggataagaaacttgaaacacaaaagtgaagtcccagagaagactttagaaatcatttaatccaataagaccaattagagcaaaacaaaattcttaaaggtatgaaatatgtaataggacattcttgatttttatt

SEQ ID NO: 701070 - DNA, 989 bp, Homo sapiens
tgcatatttaccattttgataaaactagaatttgaaatcaaaattttagtccttttccttattttacggaactcttagtttcctgctcccccatctcacctctgttatctgaggacgtggaacagttatttaatgcaatctgaaccataactgtgtttataatgttttaaaataatcctccttaaacgatatgtaagtggagcataaagaagccaatattttaattttactgaaagattattgattgctcttgagcttgttattgagatgaacgaaactcattcttttatcaggaaaaaaaggatgagaagaagaaatcacataaaagagtaagtagcaactcgaaaattattttcttggtttattttatgttgcagctacacaagccatccctttttgtgtgtccatcaatacgatatctgttgtgcttttgtacaaagaacaaagatgcttttatcaattctcaaaagtctgtaagacaaaccattcatgctgtcaaaccccctaaaaccctttcagcaaataatgaaatccatcagtgacaaatgtcaacatactaatttgttaaatgcaaaacaaaagcaacattcagacaaggcgcttcatttcatgttatatcagcactccaatttgtaccaagtttatggcaacccacagatcatgcaatattaaacagggctgtattataatgactaaaactggaacaataaactccccttagctagactgctaataaagcagctgaaatacgtgctatgattctagtacattcaactccttccmaactactagaaattctacaaagatacctattgctaataatttggtttaacccaaatatatggctttcagatggataagaaacttgaaacacaaaagtgaagtcccagagaagactttagaaatcatttaatccaataagaccaattagagcaaaacaaaattcttaaaggtatgaaatatgtaataggacattcttgatttttatt

SEQ ID NO: 701071 - DNA, 628 bp, Homo sapiens
cttgttgcccagactggagtgcagtggcacgatctcagtgcactgcaacctccacctctcgagttcaagcgattctcctgcctcagcctcctgagtagctggaattacaggcgctggcctctgcaccccgctaatttttrtatttttagtagagacgaggtttcacaatgttggccaggctgctctcaaactcctgacctcaggtgatccgccagcctcggcctcccaaaatgttgagattacaggtgtgagccaccgcacccagcctaaactaattttttattccgtattctattttatactgatccaaaatattcaccattactgtgcgtgtttgaaagacatttaaggaaactgggaatgtagatcgtagaaagatatttgaccactgtagcacttccctgctcactatctattaatttcagtcatttgaaagatctctttaagtactgagtattatctttgttttctaagaaaaggaatgccatttttaaagttcaccttgccagcagtcatctgtaaatctatcaagataaaaactgagatgtgaatcttgataactctctctgatttacccacctctcccaggtcttacataggcataataatttaatagcaaaatccagcc

SEQ ID NO: 701072 - DNA, 1897 bp, Homo sapiens
ggatgcagagaggttttgcatcacacaccacagagtgacttggtaataaatttaaattacacatttccgataacaccaaagttcccctggcgaagcctagaaaatctgcttccctctggtcccactttctagatcttccttcccagcttctctttgtctttctctggcaggaaatagctatcccttaatgcttccattcttacagagcacactcaacaactggctcccagaaaaagacacactttgatctctagaacctaccctcgtaagaaagaagcaaggagactggaaaatatagatatacttttctccgtcacatacttaacgataatttgttgggttttgaatagctagaagagagttcaataatgtggaacagtaatcaatgtcccacaaggagatatcacaaaagttggacagaatactacctataaattatccatgaggaacatttgttttagccaaacctagttagttaactaataaatccagaatgtagaaggatggtttaaaacgatatttctctgagaaagaataatttagttttgtgagtctctacttttttctctttttctttaattaatcattaatttttaaatcaatacatgtatactgagcctaaaaatttagacaatcaagatattatccatccataagtatgtaaagactccatatgcatagatttaaattttttagaaatagcacagtcattgcaaacatacactctgaatgtactttgtctataatcttacttagctatcaactctcttcagaaaaaaatggattctatttggttctagttgaagtcttacaagttccaaataaagctttattgtgtttggggacctccgaagttgaagtactgatcccttcagccatttgccatttgtttcctactaatgcaatgggtaactcgtgtgtgtgtgtgtatgtgtgtgggtgtgtgtgtgtgtggtttgttttgaaccaacaatatactgttagtaaatggcacgcaaacataaagacactgtgyaaaattatccctcaggtccattcgaagggattcagttgattttattgtcttcccctaagtgtgtacaacacatatatgaaagaaaaacactggaacttttagttatttagtaaagatggaaattttcactattttgctgaaggttcatatttaaatataaatcaagacattaatctacacagtttgggagattttattttttatattataatttttttaaattttaactgccacataataattgtatatatttatggggtacaatatgacgtttcatgcacatttagtataatgatcaaatcaagataattagcatatccatcaactgaaacatttatcatttctttgtagtgagcataatattcaatacattattacctatagtcactctacggtgcaatagtgtatcagaacttatttctcctaattgtacctttgtactcattagaaatgattctgtgtgcaaataatggacagatattctacccatagattctctactctgttttctactagaagaattaaggaaaaatttaatcctcaaatcgatattccccactcatagaaattaaacattggtgtttttactcattgtcttttttaaatggacttaaaatactgtgttgacttaaaactgaactatcctttcataaaaattgcaaagatggaaataaactttgattcacatgtttttttttttaaatgactgtaaaatttaaggcattggatgcagcatacttcctaaaaaaacactttggttaaaatactgccagaatggtgtcacttgatttgattggttctttattctcctcaacttttaaaatacaggaaccttgatgatcgagattacaaattattttaactgtttaacatactatgaca

SEQ ID NO: 701073 - DNA, 1897 bp, Homo sapiens
ggatgcagagaggttttgcatcacacaccacagagtgacttggtaataaatttaaattacacatttccgataacaccaaagttcccctggcgaagcctagaaaatctgcttccctctggtcccactttctagatcttccttcccagcttctctttgtctttctctggcaggaaatagctatcccttaatgcttccattcttacagagcacactcaacaactggctcccagaaaaagacacactttgatctctagaacctaccctcgtaagaaagaagcaaggagactggaaaatatagatatacttttctccgtcacatacttaacgataatttgttgggttttgaatagctagaagagagttcaataatgtggaacagtaatcaatgtcccacaaggagatatcacaaaagttggacagaatactacctataaattatccatgaggaacatttgttttagccaaacctagttagttaactaataaatccagaatgtagaaggatggtttaaaacgatatttctctgagaaagaataatttagttttgtgagtctctacttttttctctttttctttaattaatcattaatttttaaatcaatacatgtatactgagcctaaaaatttagacaatcaagatattatccatccataagtatgtaaagactccatatgcatagatttaaattttttagaaatagcacagtcattgcaaacatacactctgaatgtactttgtctataatcttacttagctatcaactctcttcagaaaaaaatggattctatttggttctagttgaagtcttacaagttccaaataaagctttattgtgtttggggacctccgaagttgaagtactgatcccttcagccatttgccatttgtttcctactaatgcaatgggtaactcgtgtgtgtgtgtgtatgtgtgtgggtgtgtgtgtgtgtggtttgttttgaaccaacaatatactgttagtaaatggcacgcaaacataaagacactgtgcaaaattatccctcaggtccattcgaagggattcagttgattttattgtcttcccctaagtgtgtacaacacatatatgaaagaaaaacactggaacttttagttatttagtaaagatggaaattttcactattttgctgaaggttcatatttaaatataaatcaagacattaatctacacagtttgggagattttattttttatattataatttttttaaattttaactgccacataataattgtatatatttatggggtacaatatgacgtttcatgcacatttagtataatgatcaaatcaagataattagcatatccatcaactgaaacatttatcatttctttgtagtgagcataatattcaatacattattacctatagtcactctacggtgcaatagtgtatcagaacttatttctcctaattgtacctttgtactcattagaaatgattctrtgtgcaaataatggacagatattctacccatagattctctactctgttttctactagaagaattaaggaaaaatttaatcctcaaatcgatattccccactcatagaaattaaacattggtgtttttactcattgtcttttttaaatggacttaaaatactgtgttgacttaaaactgaactatcctttcataaaaattgcaaagatggaaataaactttgattcacatgtttttttttttaaatgactgtaaaatttaaggcattggatgcagcatacttcctaaaaaaacactttggttaaaatactgccagaatggtgtcacttgatttgattggttctttattctcctcaacttttaaaatacaggaaccttgatgatcgagattacaaattattttaactgtttaacatactatgaca

SEQ ID NO: 701074 - DNA, 3378 bp, Homo sapiens
gggcttctctggccatccagtcatctcaggaccgtatgtgagttcttcacagggtcctccagagcctttctcatgtacagttctctgacttgggacatccacccatctccattgcccgaaaagtaaaacctgtcctaaccaatatcacatacatggattattgtccctcagcctataattctgtgcctattttaaaatcgtcacactgtattgtgacctcagtcacatcaaagtcatatctccatatctccttccccacacgtgtaagacatttctcactacaccaagacgccttcaaaaagcagaacgcagagggattacacaatatccttgtgttcaactgacaaatagatcttaattcaaagagattagatgtgtcactaggggtaggtagttttatgtaaattcagagaatattaattacagaagagactacagaaatatttcagaagatcttaaaatattttaggtatattttagaaatattttagacacattagacacctcatttctatagattaatttagtcacagatatgtaactagcaaataaaaatctgtttggttcttgtcaatattatagtcaagattcatatctttgacactcattttatcatatcaaaatgagtggtaaacttttcatctcaaaagttagatgacatttgggaaataaaaaggaagtttcccacatgtatcatttattagctttaatcttttaaattatataccaataaggatatttaaaatgatagagtccataaaatattttttaaaaactaaaatttatcattcatcttaaagttaaacttaktttgaattatcactactactaacttgtatttattttaccatttcaagtagtgcatatttgattaataaaaaggcattcagttttattaatatgccaacaaatagactgtaacacctcattagtttagaagctggagaaataaatgagttttgagtgtgccaatttactaataagttttgaaattgactttttccctcttgatttgtgtctaaatctattaatgcttctgataattaagttaaaatcaggtccctaccacacactcacaagagactaaacagatgcaaaagaaatgtttaatcatattagtggcatccttcattcaaagccctttataaaattctaagcaatttgctcaattatttttatatctcaacttaagagtgttaaataccttttttctgctcatggtaagaaattataattccattccaactgataccacaggtgataaggagtatttctttttgtgtgtgaaaatttgccaaagttaatgattacttggagaagaatattttaagttacataatattaacttgtattaatgaattggttcctttcaaagagctcagaattaatcctataaaagtgtattatgatgaccatattaccgaaagcacatctgcagcaaagtaaaagctgaggaaaacgttgtattcctgtaatcccagaaccctgcaaaacatgcttctacatttcatctcatgtattaactggctcgacatcccttttatattgagggctaggtatgggaatcacattcttcccttactctagcccataccatgaaatgtatcacatgttgctagcttgtataccaactcatgttactgtatcctctctgagtcacctaagaacccttccttgatttttattctcatattttcaacttttcactggaatccttcaggactaaacttgtttactacaaacttaatatctccattcctctcctccctctggcaaataccctatttcctggtttgttctattttagtttataataaccactagttcccgagaacaggcaacatgcatttatctcttagttacatgcttccttacctcccaatgcaagcatccttcagtgtgctgagcactcaagaaacagtttagcaaaaatgaaacggacaaaatatctaaattggatgtatactgaaaatgtcttaatttgtgtcttaatttatgttaattgaaatctatactacaatctggtggtctttttctataactgaaaacctgtactaaatttaagaactattcagtgcatttttgtatcataaattggatcctggtacagagaaaaaaacatcagtggcaaagcccatgatatccaaataaagtgtggggtttagttaacagtaatgtaccaatattggtttctgagttttaataaatgtatcatggtaatggaagatgttaactttagaggatattggataaatagtaaactctctgtataatcttggtgaattttctgtaaattaaaacttattccaataaaaaatcatgaaataaatgtgtactatcagaatcagaaaacaacactaatcttacaatggcatatattgaatttgtttctcaaagaaaatgatcaaattgactgaggaggttgtagttaggaaactagaacattaactattttttcccatttgttttagattaggaaataaaacagtaagtttaaagtgactactttctaataatgatttaaataaaacaaaggagaaaaaggaggagaaggaaggggaggggaggaagaaccaaattagataggtgtcagattagaaattcaagccccaaaacatggatttatgttcaacgtacaagaaaattccttagaataaatgatggctgatataatttaacaggcaaatgccctatgctaaaataagactgctaatctgatttttaaactatgcatgaaatattaagtctagtgcccaaaatagcgtgattcggaaagcctcttctctcttccaccacactgagctaatgggagtatagaataaacacacacgtatttaagtattttgtgaagtacagattagtttatcaatgcaatgaacattaatacttgaacactcaatttaaggtaatattagtgtaattttctgtatcttaaaagaaagacaatataagttttccttaccatttgttaacgataatacttttttaaatttcattcaccactgaaaaattttgtgacagattcggcctaaatgagatcaaagctaaaggctcaaatactacagtagtgttcttttcacagttaggtttcaataaaccaaatgtaggaggaagataacggatacgaaaacctgattttaaggtcaaattcatgctaatatgtaaggttatcttcttggctgttaaactgataaatgaatattgatcatgcaggaaatcactttaaaagttatcaatgttcaaaaatttttctttgacatttctatacagtcacagtatacctaaccaaaaacaagaattgggtcatctttgaattttaaaacatgcatagaatagcctgtactaaatatacattagcttctattcaaatataaagaa

SEQ ID NO: 701075 - DNA, 3378 bp, Homo sapiens
gggcttctctggccatccagtcatctcaggaccgtatgtgagttcttcacagggtcctccagagcctttctcatgtacagttctctgacttgggacatccacccatctccattgcccgaaaagtaaaacctgtcctaaccaatatcacatacatggattattgtccctcagcctataattctgtgcctattttaaaatcgtcacactgtattgtgacctcagtcacatcaaagtcatatctccatatctccttccccacacgtgtaagacatttctcactacaccaagacgccttcaaaaagcagaacgcagagggattacacaatatccttgtgttcaactgacaaatagatcttaattcaaagagattagatgtgtcactaggggtaggtagttttatgtaaattcagagaatattaattacagaagagactacagaaatatttcagaagatcttaaaatattttaggtatattttagaaatattttagacacattagacacctcatttctatagattaatttagtcacagatatgtaactagcaaataaaaatctgtttggttcttgtcaatattatagtcaagattcatatctttgacactcattttatcatatcaaaatgagtggtaaacttttcatctcaaaagttagatgacatttgggaaataaaaaggaagtttcccacatgtatcatttattagctttaatcttttaaattatataccaataaggatatttaaaatgatagagtccataaaatattttttaaaaactaaaatttatcattcatcttaaagttaaacttattttgaattatcactactactaacttgtatttattttaccatttcaagtagtgcatatttgattaataaaaaggcattcagttttattaatatgccaacaaatagactgtaacacctcattagtttagawgctggagaaataaatgagttttgagtgtgccaatttactaataagttttgaaattgactttttccctcttgatttgtgtctaaatctattaatgcttctgataattaagttaaaatcaggtccctaccacacactcacaagagactaaacagatgcaaaagaaatgtttaatcatattagtggcatccttcattcaaagccctttataaaattctaagcaatttgctcaattatttttatatctcaacttaagagtgttaaataccttttttctgctcatggtaagaaattataattccattccaactgataccacaggtgataaggagtatttctttttgtgtgtgaaaatttgccaaagttaatgattacttggagaagaatattttaagttacataatattaacttgtattaatgaattggttcctttcaaagagctcagaattaatcctataaaagtgtattatgatgaccatattaccgaaagcacatctgcagcaaagtaaaagctgaggaaaacgttgtattcctgtaatcccagaaccctgcaaaacatgcttctacatttcatctcatgtattaactggctcgacatcccttttatattgagggctaggtatgggaatcacattcttcccttactctagcccataccatgaaatgtatcacatgttgctagcttgtataccaactcatgttactgtatcctctctgagtcacctaagaacccttccttgatttttattctcatattttcaacttttcactggaatccttcaggactaaacttgtttactacaaacttaatatctccattcctctcctccctctggcaaataccctatttcctggtttgttctattttagtttataataaccactagttcccgagaacaggcaacatgcatttatctcttagttacatgcttccttacctcccaatgcaagcatccttcagtgtgctgagcactcaagaaacagtttagcaaaaatgaaacggacaaaatatctaaattggatgtatactgaaaatgtcttaatttgtgtcttaatttatgttaattgaaatctatactacaatctggtggtctttttctataactgaaaacctgtactaaatttaagaactattcagtgcatttttgtatcataaattggatcctggtacagagaaaaaaacatcagtggcaaagcccatgatatccaaataaagtgtggggtttagttaacagtaatgtaccaatattggtttctgagttttaataaatgtatcatggtaatggaagatgttaactttagaggatattggataaatagtaaactctctgtataatcttggtgaattttctgtaaattaaaacttattccaataaaaaatcatgaaataaatgtgtactatcagaatcagaaaacaacactaatcttacaatggcatatattgaatttgtttctcaaagaaaatgatcaaattgactgaggaggttgtagttaggaaactagaacattaactattttttcccatttgttttagattaggaaataaaacagtaagtttaaagtgactactttctaataatgatttaaataaaacaaaggagaaaaaggaggagaaggaaggggaggggaggaagaaccaaattagataggtgtcagattagaaattcaagccccaaaacatggatttatgttcaacgtacaagaaaattccttagaataaatgatggctgatataatttaacaggcaaatgccctatgctaaaataagactgctaatctgatttttaaactatgcatgaaatattaagtctagtgcccaaaatagcgtgattcggaaagcctcttctctcttccaccacactgagctaatgggagtatagaataaacacacacgtatttaagtattttgtgaagtacagattagtttatcaatgcaatgaacattaatacttgaacactcaatttaaggtaatattagtgtaattttctgtatcttaaaagaaagacaatataagttttccttaccatttgttaacgataatacttttttaaatttcattcaccactgaaaaattttgtgacagattcggcctaaatgagatcaaagctaaaggctcaaatactacagtagtgttcttttcacagttaggtttcaataaaccaaatgtaggaggaagataacggatacgaaaacctgattttaaggtcaaattcatgctaatatgtaaggttatcttcttggctgttaaactgataaatgaatattgatcatgcaggaaatcactttaaaagttatcaatgttcaaaaatttttctttgacatttctatacagtcacagtatacctaaccaaaaacaagaattgggtcatctttgaattttaaaacatgcatagaatagcctgtactaaatatacattagcttctattcaaatataaagaa

SEQ ID NO: 701076 - DNA, 3378 bp, Homo sapiens
gggcttctctggccatccagtcatctcaggaccgtatgtgagttcttcacagggtcctccagagcctttctcatgtacagttctctgacttgggacatccacccatctccattgcccgaaaagtaaaacctgtcctaaccaatatcacatacatggattattgtccctcagcctataattctgtgcctattttaaaatcgtcacactgtattgtgacctcagtcacatcaaagtcatatctccatatctccttccccacacgtgtaagacatttctcactacaccaagacgccttcaaaaagcagaacgcagagggattacacaatatccttgtgttcaactgacaaatagatcttaattcaaagagattagatgtgtcactaggggtaggtagttttatgtaaattcagagaatattaattacagaagagactacagaaatatttcagaagatcttaaaatattttaggtatattttagaaatattttagacacattagacacctcatttctatagattaatttagtcacagatatgtaactagcaaataaaaatctgtttggttcttgtcaatattatagtcaagattcatatctttgacactcattttatcatatcaaaatgagtggtaaacttttcatctcaaaagttagatgacatttgggaaataaaaaggaagtttcccacatgtatcatttattagctttaatcttttaaattatataccaataaggatatttaaaatgatagagtccataaaatattttttaaaaactaaaatttatcattcatcttaaagttaaacttattttgaattatcactactactaacttgtatttattttaccatttcaagtagtgcatatttgattaataaaaaggcattcagttttattaatatgccaacaaatagactgtaacacctcattagtttagaagctggagaaataaatgagttttgagtgtgccaatttactaataagttttgaaattgactttttccctcttgatttgtgtctaaatctattaatgcttctgataattaagttaaaatcaggtccctaccacacactcacaagagactaaacagatgcaaaagaaatgtttaatcatattagtggcatccttcattcaaagccctttataaaattctaagcaatttgctcaattatttttatatctcaacttaagagtgttaaataccttttttctgctcatggtaagaaattataattccattccaactgataccacaggtgataaggagtatttctttttgtgtgtgaaaatttgccaaagttaatgattacttggagaagaatattttaagttacataatattaacttgtattaatgaattggttcctttcaaagagctcagaattaatcctataaaagtgtattatgatgaccatattaccgaaagcacatctgcagcaaagtaaaagctgaggaaaacgttgtattcctgtaatcccagaaccctgcaaaacatgcttctacatttcatctcatgtattaactggctcgacatcccttttatattgagggctaggtatgggaatcacattcttcccttactctagcccataccatgaaatgtatcacatgttgctagcttgtataccaactcatgttactgtatcctctctgagtcacctaagaacccttccttgatttttattctcatattttcaacttttcactggaatccttcaggactaaacttgtttactacaaacttaatatctccattcctctcctccctctggcaaataccctatttcctggtttgttctattttagtttataataaccactagttcccgagaacaggcaacatgcatttatctcttagttacatgcttccttacctcccaatgcaagcatccttcagtgtgctgagcactcaagaaacagtttagcaaaaatgaaacggacaaaatatctaaattggatgtatactgaaaatgtcttaatttgtgtcttaatttatgttaattgaaatctatactacaatctggtggtctttttctataactgaaaacctgtactaaatttaagaactattcagtgcatttttgtatcataaattggatcctggtacagagaaaaaaacatcagtggcaaagcccatgatatccaaataaagtgtggggtttagttaacagtaatgtaccaatattggtttctgagttttaataaatgtatcatggtaatggaagatgttaactttagaggatattggataaatagtaaactctctgtataatcttggtgaattttctgtaaattaaaacttattccaataaaaaatcatgaaataaatgtgtactatcagaatcagaaaacaacactaatcttacaatggcatatattgaatttgtttctcaaagaaaatgatcaaattgactgaggaggttgtagttaggaaactagaacattaactattttttcccatttgttttagattaggaaataaaacagtaagtttaaagtgactactttctaataatgatttaaataaaacaaaggagaaaaaggaggagaaggaaggggaggggaggaagaaccaaattagataggtgtcagattagaaattcaagccccaaaacatggatttatgttcaacgtacaagaaaattccttagaataaatgatggctgatataatttaacaggcaaatgccctatgctaaaataagactgctaatctgatttttaaactatgcatgaaatattaagtctagtgcccaaaatagcgtgattcggaaagcctcttctctcttccaccacactgagctaatgggagtatagaataaacacacacgtatttaagtattttgtgaagtacagattagtttatcaatgcaatgaacattaatacttgaacactcaatttaaggtaatattagtgtaattttctgtatcttaaaagaaagacaatataagttttccttaccatttgttaacgataatacttttttaaatttcattcaccactgaaaaattttgtgacagattcggcctaaatgagatcaaagctaaaggctcaaatactacagtagtgttcttttcacagttaggtttcaataaaccaaatgtaggaggaagataacggatacgaaaacctgattttaaggtcaaattcatgctaatatgtaaggttatcttcttggctgttaaactgataaatgaatattgatcatgcaggaaatcactttaaaagttatcaatgttcaaaaatttttctttgacatttctatacagtcacagtatacctaaccaaaaacaagaattggrtcatctttgaattttaaaacatgcatagaatagcctgtactaaatatacattagcttctattcaaatataaagaa

SEQ ID NO: 701077 - DNA, 1038 bp, Homo sapiens
cccgggaggtggagcttgcagtgagccgagatcgcgccgctgcactccagcctgggcaacagagctaggctctgyctcaaaaaaaaaaaaaaaaaaaaaaaaaccccccaagtcagaatatttgtactttctgtgtcagactttcatttctccttacccccaataacactttcccaaataaattgttcacttaatatttaagctgcacatttaacagctctcatttaaataaaactgtctctacatatttttattctagggtgaacacaactaaattgtaattgtgccatcgttgagattctcagggtgttatgtatttatgcaagagcaaatggatgtgaaatgcttccattatttcaaacttcaatgcagaaacagcagtgacagctgcatttttttgctggtaatgttcaacttgatcaaactgtcctgttttattaaatcaatgttgccgcatacaagactaatggaagaatggcaattagatgtagcttttaccctgagactactttgctaggagactaatgctctaatttgtgtttcagaaacttgctattattttaaagtcattttggctaaagtttgaatattcttgaaacaaacgaatcctaacattcttattaagcacagagagcaatgaaatacaagtttattacactgaattggagctgctggatattgcatttaattcttcattacttgtatattctttttggtgctattggaatcatacaatattgcttttagttaatattaaccattaagtaatgaaaacatcttcaatcacttaccagggtatcttaatactcactgttcaggccataaatttgcttttgtaaatatggactactgattttattaacttctttactaattgcctttaagacactcatgcccagtattttttaaaagtccaaatgagatgaattggagttttgttgtttagcttattacatttaaataccaaacagagcgccaaatgtttttaattttttctatgattttatgaatggccattaccaacgtgaatacattgtg

SEQ ID NO: 701078 - DNA, 1038 bp, Homo sapiens
cccgggaggtggagcttgcagtgagccgagatcgcgccgctgcactccagcctgggcaacagagctaggctctgtctcaaaaaaaaaaaamaaaaaaaaaaaaccccccaagtcagaatatttgtactttctgtgtcagactttcatttctccttacccccaataacactttcccaaataaattgttcacttaatatttaagctgcacatttaacagctctcatttaaataaaactgtctctacatatttttattctagggtgaacacaactaaattgtaattgtgccatcgttgagattctcagggtgttatgtatttatgcaagagcaaatggatgtgaaatgcttccattatttcaaacttcaatgcagaaacagcagtgacagctgcatttttttgctggtaatgttcaacttgatcaaactgtcctgttttattaaatcaatgttgccgcatacaagactaatggaagaatggcaattagatgtagcttttaccctgagactactttgctaggagactaatgctctaatttgtgtttcagaaacttgctattattttaaagtcattttggctaaagtttgaatattcttgaaacaaacgaatcctaacattcttattaagcacagagagcaatgaaatacaagtttattacactgaattggagctgctggatattgcatttaattcttcattacttgtatattctttttggtgctattggaatcatacaatattgcttttagttaatattaaccattaagtaatgaaaacatcttcaatcacttaccagggtatcttaatactcactgttcaggccataaatttgcttttgtaaatatggactactgattttattaacttctttactaattgcctttaagacactcatgcccagtattttttaaaagtccaaatgagatgaattggagttttgttgtttagcttattacatttaaataccaaacagagcgccaaatgtttttaattttttctatgattttatgaatggccattaccaacgtgaatacattgtg

SEQ ID NO: 701079 - DNA, 1038 bp, Homo sapiens
cccgggaggtggagcttgcagtgagccgagatcgcgccgctgcactccagcctgggcaacagagctaggctctgtctcaaaaaaaaaaaaaaaaaaaaaaaaaccccccaagtcagaatatttgtactttctgtgtcagactttcatttctccttacccccaataacactttcccaaataaattgttcacttaatatttaagctgcacatttracagctctcatttaaataaaactgtctctacatatttttattctagggtgaacacaactaaattgtaattgtgccatcgttgagattctcagggtgttatgtatttatgcaagagcaaatggatgtgaaatgcttccattatttcaaacttcaatgcagaaacagcagtgacagctgcatttttttgctggtaatgttcaacttgatcaaactgtcctgttttattaaatcaatgttgccgcatacaagactaatggaagaatggcaattagatgtagcttttaccctgagactactttgctaggagactaatgctctaatttgtgtttcagaaacttgctattattttaaagtcattttggctaaagtttgaatattcttgaaacaaacgaatcctaacattcttattaagcacagagagcaatgaaatacaagtttattacactgaattggagctgctggatattgcatttaattcttcattacttgtatattctttttggtgctattggaatcatacaatattgcttttagttaatattaaccattaagtaatgaaaacatcttcaatcacttaccagggtatcttaatactcactgttcaggccataaatttgcttttgtaaatatggactactgattttattaacttctttactaattgcctttaagacactcatgcccagtattttttaaaagtccaaatgagatgaattggagttttgttgtttagcttattacatttaaataccaaacagagcgccaaatgtttttaattttttctatgattttatgaatggccattaccaacgtgaatacattgtg

SEQ ID NO: 701080 - DNA, 1038 bp, Homo sapiens
cccgggaggtggagcttgcagtgagccgagatcgcgccgctgcactccagcctgggcaacagagctaggctctgtctcaaaaaaaaaaaaaaaaaaaaaaaaaccccccaagtcagaatatttgtactttctgtgtcagactttcatttctccttacccccaataacactttcccaaataaattgttcacttaatatttaagctgcacatttaayagctctcatttaaataaaactgtctctacatatttttattctagggtgaacacaactaaattgtaattgtgccatcgttgagattctcagggtgttatgtatttatgcaagagcaaatggatgtgaaatgcttccattatttcaaacttcaatgcagaaacagcagtgacagctgcatttttttgctggtaatgttcaacttgatcaaactgtcctgttttattaaatcaatgttgccgcatacaagactaatggaagaatggcaattagatgtagcttttaccctgagactactttgctaggagactaatgctctaatttgtgtttcagaaacttgctattattttaaagtcattttggctaaagtttgaatattcttgaaacaaacgaatcctaacattcttattaagcacagagagcaatgaaatacaagtttattacactgaattggagctgctggatattgcatttaattcttcattacttgtatattctttttggtgctattggaatcatacaatattgcttttagttaatattaaccattaagtaatgaaaacatcttcaatcacttaccagggtatcttaatactcactgttcaggccataaatttgcttttgtaaatatggactactgattttattaacttctttactaattgcctttaagacactcatgcccagtattttttaaaagtccaaatgagatgaattggagttttgttgtttagcttattacatttaaataccaaacagagcgccaaatgtttttaattttttctatgattttatgaatggccattaccaacgtgaatacattgtg

SEQ ID NO: 701081 - DNA, 656 bp, Homo sapiens
tggagctaaaagtgttctaacaaatacatgaatgcatccttacaagtataatgacattatagaagtaagcttgaatcaccccaatctattaaaaagaagataattgacaaatgttgttactttagtgatcagtaacaaatcacttgtgccgtgccttatgtctgatcaagtgtttgaaggtactgtagttgagaactgtactacatactagttatggggaaaggcaacagataggaacagctagagaatgttgagttcaatatatctcccaatattggaagtcaaagtaaatctagtgaatatggcaactgatatcaaaatcatcatctataaacttagagtggatcaaggtttatggggcttgaagcctttacaatttgggggttcctcttcaaggaaaggagtttcaaaatacaaatgcaaaactgccaagaactgtgaaggatctgagattttgctstactcacaagctaaatagcctctcaaagtttcatagatgctggtggaagacatgagacccctgggtcagagatagagacatagggaagcaagcagctctcaatctgtttttaccaggatgcagtctattactttagctcgttaccttattacggtacagcaaaccacacgagcttcatatttgcctcagttccttt

SEQ ID NO: 701082 - DNA, 1797 bp, Homo sapiens
atcaagaatataaaaatatatactataatatatattttaatatatgttaatatattataatatatattaatatattttaatatatattttaatattgctaccaaaaaatgtgttacattgattaaaaataataaaataaagtgacttaaagcagaatggaagcaaagggggtgtgggggaaggagagttgcagccacccaagggcagaactggaggaacagacgaagctgccagagacctccggagtggagggagattttgaggacctctgagcgcaaatctctctcccttttccagtggttctgctagttcgtttttctacttgtttactacttgacatggcctgaaaatgtgctgcctagagacagggcttctgtcccctctcatctcttctaatctgttcagcacactggcatggcagccccgtgacattcaggcactgtgcccagggctggagaatgcctgggctgccatgggatttgcaggatctctgcctttattatatatcattcctccttagtccgtggcactgcaccagcaagtggcctgtgtcagccacgtgcccttaaatgtgtgtatttcaggagcacagttgtcctcgcacacagccacccatgtattgatgaagctcatgctgtcttcccagcaccactctacgagggccttgagttgacattcaaaatcctgtgagccttcctcatagaaagcattagactgcctcaaaaccctgcacaaagagcaggacagcgatagatctcaatcaaccgatacaaaccacctgatattttgcagtagagtcacccttttagtttcgtaccagtgctgaaaatatgagagacctcattcatgtatcctgacctataactaagttttaaaaaataagctaaaaccttcaggtcacattgtcagtaagttgcaaaattgtcactggcactgtgcagatcagtgccacagcgatgccaggaaagggctggggacaggaaggctgcagccgagggtggaggagtatagttaatgccttaatgatggcttgggcgggaggtcataattggtttgtagtaattgtttttactttcccatagcatggcttcctttgacctaatttctcctgggcccgagcccagtgccctctgctaattaagctggccgtatatgggcctttggacatcactgttccaatgtatgcttcagtaggctgcttcatgttttgatcttcaaactgcatactcaatacaggtaacaatcgatttttctttatttcagaattaacatacatgttgccaaaaggttttttttattgtattttgaaaagttgttttggattgccaaaaacaccttcagtacaaaaattgttggaagctagaggcttttgttcacaatttataagatattttatttctaatacagaaaaaaaccttaaaaaaatttagatctgcagctggaggcagtggctcaggcctgtaattccagcacttcgggaggctgaggcaggaggatcacttgaggccaggaattcaagaccagtctgggctacatagcaagacctcacctcttttttaaaaaataaaaattaaatcaaattttttaaaaagagaaaaatttagatctgcttatggcttgaagttttagggcaagggaaagaaactagttttccaagcaaagggattagcatgtgcwaaggctcagaggcaagggtgggaggaagaaagacaagcccagactctgaagggcctgtaaaccgacatttgcctgtgaagccacagtagaaattagataagtcaatatacaagcagagca

SEQ ID NO: 701083 - DNA, 642 bp, Homo sapiens
ttttttttttaaagcaatgattgctcccaaaatgcattgaattacagctcatttcccatctttataggaaggctcctttttcactgtagtgattataatgaattatttacataattaagataagcagtgggataacttttgttagaaaagatttctaacctagaattagattgatatttaagccacaggtttgaaaaagaaaggctatggccaaacaacaaccacaaaataacctataaaagctatagattcacccttacagatatatgaatgggtgttgagttgcactcacagtatgcaaataggaaattatttgggtgtctgtcgtcataagattgagaagtcaaacgaggcaagtgtgttaattatttgcacacagtttccagaactgatgacataaaggtcctttacattttcatttccccaaagcccacttatggaaatatgttgaaaatgtcttcctctcacagctgtgaaagtgtttcattgattgatagcctatcaagcttgactggaaggtaccatcaagaaatattttgagccactaaggtttgctagtttacctggaggtgaattgtttttaatatataaattctgccatgaatrccacttggctgtttgctagtaaatgagactgtgctt

SEQ ID NO: 701084 - DNA, 1092 bp, Homo sapiens
aaaattagtttacaaaacataaaggtacataacagatgagtgtttctaataataacatgctaggcagtagatgctcaataaacattttttgaatgaatagtctgaattttcaagccatgaaatgaaatcatgcaaatattaaattatgttgcgacattaaaagtcatctgccctagatcttcacccggcaatatcaacattcaggaactcgtccagtatcagcaaataacaatctatcagtaagtatcaacattcagcaatataacccagcaatagcaactttcagaaactcctccaggatcagcaagaaactcttgataatgaacggcaacagactgcagtaatgtcaagggtcaggaactttcttaggcagatcatctgagagagttgcagggataactgaaggcattaactgccctacatgaagtagcactatacaccagcaatttcttcatgatttatttatagatgcccctcaacttacaatagggtcatgtctgataaatacacaaatacattgtaagctaaaaatattgtatattggtttcaacttacaatatgctcaatgtataatgggtttgtcagaacatgaccccattgtaattgaagacatactgaatgcgtattgctgtggccccgtcataaagtcagaaaatcattaagtcgaactgtcttaagtcgaaccatgtaaagtcagggaccaactgtgtatcattttaagaaagcacagagtgttcatgagtgagaaggctaattatgccaacattatatggggaaggcaaccatttcattttaattccaagaaatcacttattgaattttttaatactgaaatgtggcctgattggtaaaaactgttttttctcaattagaaattttttcagattgattgggcattaaccatgactctttccaatgtttaattgcaatgttatcattttctgggcatgcccttgatcatcgcyggtgaatagggtcacttgggcttgcagtcagaacatcgcagtctaaaattcattccttaactgtctactgtagttgccttaggcaagtccctacattttcttaaatttcaactttttcatctgcgaa

SEQ ID NO: 701085 - DNA, 607 bp, Homo sapiens
ggagttcgagaccagcttggccaatgtggtgaaaccctgtctttactaaaaatacgaaaattagccaggcgtgttggcgggcttctgtaattccagctactcaggaggctgaggcggaggttgcagtgagccgagatcgtgccactgggctcctgcctaggcgacaagagcgaaaytccatctaaaaaaaaaaaaaaaaaaaaatctgaggctcaagaggctaaccgaattgccaggcataagccctttaactggcccacagctgtctgtagtagagagcacgttgtctgcagcccttgttaaataatgcttgacgaatgcccagaaaaacaactcccagcctactaatcgaaatattcaccaaggtacttgtccatttatattccatgttactcccgaatggacttggggaggctgataaaaatgacaaacaatcacaaatagttgaagaggaggaaacgatttgcaatattttaagatgtcaccatccagaactaaatcaatgattcttaatattttgtgggtcatgaacacttggagattctgatggaattatgaatcttatctttagaaaaatgaacatatcataacctttcataaatactca

SEQ ID NO: 701086 - DNA, 607 bp, Homo sapiens
ggagttcgagaccagcttggccaatgtggtgaaaccctgtctttactaaaaatacgaaaattagccaggcgtgttggcgggcttctgtaattccagctactcaggaggctgaggcggaggttgcagtgagccgagatcgtgccactgggctcctgcctaggcgacaagagcgaaactccatctaaaaaaaaaaaaaaaaaaaaatctgaggctcaagaggctaaccgaattgccaggcataagccctttaactggcccacagctgtctgtagtagasagcacgttgtctgcagcccttgttaaataatgcttgacgaatgcccagaaaaacaactcccagcctactaatcgaaatattcaccaaggtacttgtccatttatattccatgttactcccgaatggacttggggaggctgataaaaatgacaaacaatcacaaatagttgaagaggaggaaacgatttgcaatattttaagatgtcaccatccagaactaaatcaatgattcttaatattttgtgggtcatgaacacttggagattctgatggaattatgaatcttatctttagaaaaatgaacatatcataacctttcataaatactca

SEQ ID NO: 701087 - DNA, 2157 bp, Homo sapiens
gtcagccaattctctggtaaggctgtttctaatttctgcacctccctttaccattctggttttgtttggagagtaaagaaagtttctaaatattttgaacctcagggtcttttgtggcattcttgtgtcttctctcctttcactgaaacgtgaaacaacccacaattgtttgcttgtataaccctttcttttttatatacrtgccgtaggatgaagcataatttaccaaataggttctctcccagcttctgtcacattctttctgatgtgaaagggttagaatcatcacaagaaatgttcatttaaacggagtcaacccagatgagttatctcaaagggttagcatatgagaaagggtgctggcttaatactcaagtcacacagggtacaattaggagctccctcatttgcctcccacgtccctaataaatattcctggtaaatgataattaagttgtggctttgaggcactgtggtgtgtctctcacaaatgggccaacttgttttttcaaaatcctatccgaatgactctttgatcccacctggaagccacacctgttgctctctggctcagcagcctgctggggtggtgcagagcttcttctcgctccttgtgcccagacacacatccacctgctgccctggcccatgtcccctggctttgatctctaggcattgtggaaagcatcagctgtgacagaattttggttaagcctcattgccttggaatgcaattctcaagggttctgcccctggaaatttgataatgaggtagtacatgttccagaaggtgagctggtatgttgggatgtttcaaaggaactattccacaacttcattcttctaggggactggccagtaatgatgagtagcccataactcttgaagtcgaagaatcttccaaaggatagcatgaactcattcccacgctcagatccataactgtctgtatacaattgcactttgcaaaggcagcttgaatcagtctgcttacctccctctctgcaagcaggtgggagatctatataaaagttaaggcttcgggcattgtaaggggctaggaatagtttttacaagaaaaaaaaaaaaaccagttgacccttatttaaatcaaatccttctcagcgtacaaaaggcgaatgctttcttatttttttaaaagggccacctaaaatgtatcagtcatttgccaaaagccacatctgactcaaataagcaaatctgttgtatatagcctgtgcatgtaaaacaaaatccaaatgcaagtatgcatgcttttatgttgttcaacgacggcaacccgtatcttatttgtgtgtatctttgatgtctattacgttatgtcatctgaagtgattacattgcttttatttaataaaattttttcaagttgttttatgtctctgaatggaaagaccagaaaaaaaaaaaaaagctgaattcttacttgctgcatctcagcttttatgttggaagcagcttatgttgaagttcttagtctaaacagtttacagttttccggattaagatcatgtggaagaaagatgaaaatcttaaaagcctcattacataaatgctcctgatactcacgggtaaattggacatttgtgaacttgaacttctgggaacgatgggaattttctgaagtgggcagaaggcaagtctttgggagagttactggaggacagaagattaaatctactccccaaacctgaatgcccacgaatgcaaatatacccctgcacagaaacaaggagggaatacaaagctttcaagttatttgaggggaaaacaagctcatttcatgcccatctgttgatagggatggtaggaaaggcctgggttgctgacagagcagttccccataaatttgactattatttcaggtttctattttttcctctttggtaggaagatattaaaaatgagtttctggcaaagagtacagaaaaacatagagtctctgaaattgcaactcatataaattcctggccaagaatcttagtttttactgcttgtcattaatgagcactttacagaatctactttcttaacatattaggaaacactggactcgcagaatatttcatgaatattttagaagcctagaaatgtactaactctaggagtacttgttatgtgcctagaagaatttca

SEQ ID NO: 701088 - DNA, 2400 bp, Homo sapiens
attgctaccacgatgaacaacagtgtcctaatttttatctaggctgattttacacattctggatagttattgtgtaggcaaatgacgtgttagatgcagtattaaagttaaaagtctctgtttttaacctcacataaatttccaaaataatgggcaacagtatgaagactcattaggcacttaatcttacagagagaatataataacattgcaaaagtaaaacaagtctagaattattttgcacgttaaaaattaagggactgtgactcagacaggtctagtgatttattcaaagtcacaaaaccacatatagttggatttaggacattgcccctcaatctagtacccattcttagtaggtggtagatttgatagagacgggtccgtaccgttccgttccaagggatatttaggacacagctcatagggaggtaaactgctgaaggccaactcctttcagactggcctcttcaagaggcccatggaagtcattatggactagtgcttaggcattcaatatgggtcaaggtgtgagcttgcagctgaaaccagtttctgccacaagtccttggctccagtatcctgatcacaccagtagagggactggggcagctcaagtgacgctgtccagtgcggggatcccggctgcagaatctcagggctggagtccgacatctggccacactaggtatccagacactggcctagagagtagtgtgcaacaagcccctgaactctgcttttccactctccctatttggagaattcacccgcacatacacacataatccagaatgcccggcatgtggctgcttgctccttcacactatggcttcgtgacaatatcattcctgtgacgctgccatcactcaaacacttccatgtttgaaattccttttgtgaatcattttctaagcttttctttggaattttgtcattggtaaacaatcttcagactttgtatgtggccttcatttctggataggggggaaaaggcaatggctattcagagccaagtttggtgaataagggtgaataatccacctgcataatgttatttggtcaaaataagtgctgtgcccagaagaaatagatggattatgtttttrgttcctaaactgactccaagagtaattccaagagaagagttgtaagcacatttgagtaacatcaatcattaaacaaattcgtaatattaaggaaggtatttgaagaatagtacttatcgtctgaataagttttagggttttgttaaaaaaatgtaatagattctatccatattgcaaaggcacaacacacgtaattgctcaactcttgtcttcaactcaatcattcatgtcctcctcatccccctaggagaagttctatacacatacctgcttagcaaactgaaaaatttgaaaccttgaaacgttaaaataagactcaacatagtgtttctatgccaaaaaaagaagtacattaggaatattactcttactgagtcaaaatgtttaacaagtccagataataccctctgaatcagtgcctcagtaaatccaaatgcacgcatgtgacaacacagtcaatagcattaggttggtacaaaagtaattgtggtttttgccattacttttgcaccatgttaatatttataaaggattgtcaatcagtcatttgttgagctacattgcacactgaggttgatgaagcgagctggttgacctgttgcctggtgatggctgagcgagaggacgtcagcatgtctttgcatctggggttcccagatcagagccctgaaaagcagccacagttgttcctgacccagttgttcgcaagttctccattgagttttcccttctgtggttttcaaagaaactgaaccgggaggaactgataacaagaatgagaagacacaggcaagacaccacatattgcacacgtggattgcagtatggttaataacaataataaaagtcacctgaatcaaaagtggtattaatagaagtggctaaatatcagacatcaactaagtaaatatagtaaatattaagattccctttctcagggaaataaaacatagaaaaatagagaaagcttaatggaatttaagttctagcaccttcaaaatccctaacctaccaattaatattcagcgatgccttcctcattctttcttttttttctaatttctttcatatcatttttacgtttactttctcttcgtaaaaatttccatgtctattttgtatatatcaaaaccatttatcatttagtttgtggtatttttgcaccttctcttttcacagtaatataatacctctctctgtatatttgtacctttatcaatcaaaattatatatactaattaaatacaattttatataggtcaatataataaaattatatgaatatgcatat

SEQ ID NO: 701089 - DNA, 685 bp, Homo sapiens
ttttcaggattagtctgtcaccaatatctccatcttactcaaaagcagaagtcccataaaagctttttcataygtgcttccaaatttatctttgatttattatacacttccaaatttattcctccttgggaggtggagtatgaggatcaaagcaaactctggaggttttctagggtctccacctgaagaacaatcataaggttattcccagaactgagagaactgcagaaattaagggccagtcgatggagtcaagttaactttggatagatctgaaagagagggcaacagggcattgcatccaggctctgattggagcagttcatctaatctccaagtctttatttcatctgtctactgcattaacaacttcccacgtcaattgccaagacaaactaaaacaatcataaaaaacaaacttgtcgtatatgtctagatgtacaaagttttgctttgggaagtaatgaagaaatataagacatcatgaactcaagactccttgagacaaggcacggcaattagatcctcacttatgtggcccttggacgtcccgacttcaacaagcatccttccatctctgcaaacacagcttcgggaccgaaaccagttggagacccaggagtgatcacttaactgggacttgaatggaaaaacgctcaaagaatatcaggctgtgaactgggca

SEQ ID NO: 701090 - DNA, 645 bp, Homo sapiens
ggtctcctgagagggaaaatgtggtgttactctctaaatcttttcccactgtgtcgggtttccatagctctgcttcttcttattcatgttgcagctgactgcctgatcctaaaggctgagaacaaggacttggtttctgtaagttacataaatgagttccatttttctagtagtaaagatcacatgcttttttattttttttgtcttttggacacctgtattggttagagttctccaggaaaatagaactgataggatgtatatrtgtgcatgtatgtgtgtgtgtgcatgtatgtgtatacatgtgcacacatgtttttgtgtgtgcttgtatgtgtgcatgatgtgtatatgtgcgtgcatgttcgtgtgtgtgcatgtgtgtgtgtgtgcacgtgtgtgtgtgcgtgcatgtaagtaaatgtatttataaggaattggctcacatgattatggaggccaagttcaagatcagcagtcggcacggtggagacccaggagagccgatgtgtggtttcaatctgaaggctgtcaggcttgagacccaagaagacctgctgtttctgtttgagtcccaaagcaggaaaaatctgttgccccggttcaagggcagagacagagaattctttcctattcagcctgttg

SEQ ID NO: 701091 - DNA, 825 bp, Homo sapiens
tgccattatatataccagagttgagctgttcttactatttgtagtattagagtactagctataagtagatgtcatgcacaaattaggataagttgaagaaaatattacatttaataaaggaaattttgcagttttaaaagatgtgagcagaaatagcaaaagcactagtaatggtgcagttcccaaagacttataacaatgggactctgctgtcatcgttagcctgaaggagaagaagaatcattaccacaaccgacagacagagaartacaagtggaggaggactctgaacaggagtagcctctctggcaagggacccagtcagcctaaggccgtcctgcacagagggagccaggagctggactaaccaagtaatttgtgggtgcaaaatgaaaatgaggggctccttgttaaaaactataaagaattttaagatggtaccagcagagaattaaaccaagcaaggagcccttctgagtgtgaggaggccctgaaagactgcacaattctaacaaacccatgaagccaggcttgggccagagaagaaaacaaacaaacaaacaaaaaccaaaaaataacacacccaaagcttcactttcttctctcagaatcctttctgttgttccaacttgctgaatggagtgaggatccaggaggcaagttaacccatttatgtaggcaggccaacatgctgagacagagtgggaagcggggatccagagggacagagatgacattcaatacatccagtcttttcaatcagcgaaagctgtttatcaaataccagtttaaaaaatttcacaatcccattgcaagtggtgaaga

SEQ ID NO: 701092 - DNA, 825 bp, Homo sapiens
tgccattatatataccagagttgagctgttcttactatttgtagtattagagtactagctataagtagatgtcatgcacaaattaggataagttgaagaaaatattacatttaataaaggaaattttgcagttttaaaagatgtgagcagaaatagcaaaagcactagtaatggtgcagttcccaaagacttataacaatgggactctgctgtcatcgttagcctgaaggagaagaagaatcattaccacaaccgacagacagagaaatacaagtggaggaggactctgaacaggagtagcctctctggcaagggacccagtcagcctaaggccgtcctgcacagagggagccaggagctggactaaccaagtaatttgtgggtgcaaaatgaaaatgaggggstccttgttaaaaactataaagaattttaagatggtaccagcagagaattaaaccaagcaaggagcccttctgagtgtgaggaggccctgaaagactgcacaattctaacaaacccatgaagccaggcttgggccagagaagaaaacaaacaaacaaacaaaaaccaaaaaataacacacccaaagcttcactttcttctctcagaatcctttctgttgttccaacttgctgaatggagtgaggatccaggaggcaagttaacccatttatgtaggcaggccaacatgctgagacagagtgggaagcggggatccagagggacagagatgacattcaatacatccagtcttttcaatcagcgaaagctgtttatcaaataccagtttaaaaaatttcacaatcccattgcaagtggtgaaga

SEQ ID NO: 701093 - DNA, 825 bp, Homo sapiens
tgccattatatataccagagttgagctgttcttactatttgtagtattagagtactagctataagtagatgtcatgcacaaattaggataagttgaagaaaatattacatttaataaaggaaattttgcagttttaaaagatgtgagcagaaatagcaaaagcactagtaatggtgcagttcccaaagacttataacaatgggactctgctgtcatcgttagcctgaaggagaagaagaatcattaccacaaccgacagacagagaaatacaagtggaggaggactctgaacaggagtagcctctctggcaagggacccagtcagcctaaggccgtcctgcacagagggagccaggagctggactaaccaagtaatttgtgggtgcaaaatgaaaatgaggggctccttgttaaaaactataaagaattttaagatggtaccagcagagaattaaaccaagcaaggagcccttctgagtgtgaggaggccctgaaagactgcacaattctaacaaacccatgaagccaggcttgggmcagagaagaaaacaaacaaacaaacaaaaaccaaaaaataacacacccaaagcttcactttcttctctcagaatcctttctgttgttccaacttgctgaatggagtgaggatccaggaggcaagttaacccatttatgtaggcaggccaacatgctgagacagagtgggaagcggggatccagagggacagagatgacattcaatacatccagtcttttcaatcagcgaaagctgtttatcaaataccagtttaaaaaatttcacaatcccattgcaagtggtgaaga

SEQ ID NO: 701094 - DNA, 1637 bp, Homo sapiens
catataaacttattataaaataaatgtattttatatagggttgagaggttaccaaatatacacttggggataaggcaggaatggtatatttaaaatgttgggaaatgtctatggtcctgaagctgccattcattcatttattcagttattcaacaattatttattggatgcttactatgggcaaggcactgtgaaaataaatgaaggaaaagaagaataaaattgtccctaccctrtatgaaaagaattatccttcagtgatattaatagaaatgtgaaagcaaaacaagacaaaacactacaagaatggtgaaaaattaatagaaacatatatattaatttgttatttgttgaatacctccactgctagaatttaagtttcagaagagtagaacattttcattttatgcagtgctgaatctcctgtggatcaaatggtatctggtacatacaaggccctcaataaatcgttgaattttttaaaaagtgaatgaataaatgaaagagaatgtgagatcacagaaagtaagggttaactaccaatgagacagagcctaaataataaaatcataagaatgataaaaataatgacaagtaaaatttattgtttatgccagagtgtgaagtattttacatgcagttattgattaacctatatcattgtctcataatagagtactatttgtttttttactttataagttaaaaaaaaaaggaagaagagagggaataagaaatctgcccaaggtcagataagggacagagtcttgtcccaagtagactatacattgtttggtctaaaccacaagatcaacttgttactgacagaattatcagagcatcggagaatttattattaaaggatgagtggtagtagatctggcagacggggaaattgttgactcttttagagaaccacaaatgtattaggatactggagacagcatgcttttaagaaggcatgaggataagtgtgaaagtatagcttagacagattacaaaacaaatgagggttatcctaaagaatctgtatgttatcccaaaagagatagagtcatcaaaatatgtattaaggaaaaaacagaaggaatggtgcatgtttactgattatccattctttctaagttcctccaaatattatacttcaaataatatgtcaaaaatctggaaaaacagaccttaacttatttagaaacaaatttacctgagtgcaaatttatttgttactctaaatacaaatttatttgtctcccttaacttacttaaacactaacttacttagtataatatgttatatcatcagatatattgccacaaaatttgcacatatttctaaaaggcagagataacacaagttaaataatttctcatattagaatgagaagaacaaagcttagagaaacatggctgaatacatgtttacattacatatttcagatgggaaattcgttggtgacatttgatagcacattaaattgaaacctatcaagtttttaaaatttacattcattgaaacacactacttatcctcagagaaggagcagatattttgtaataatatttcataaaactatcaagaaagcttttgtgctatttactgcacaggaaatatcatctggtgaacagaaaataattgt

SEQ ID NO: 701095 - DNA, 1637 bp, Homo sapiens
catataaacttattataaaataaatgtattttatatagggttgagaggttaccaaatatacacttggggataaggcaggaatggtatatttaaaatgttgggaaatgtctatggtcctgaagctgccattcattcatttattcagttattcaacaattatttattggatgcttactatgggcaaggcactgtgaaaataaatgaaggaaaagaagaataaaattgtccctaccctgtatgaaaagaattatccttcagtgatattaatagaaatgtgaaagcaaaacaagacaaaacactacaagaatggtgaaaaattaatagaaacatatatattaatttgttatttgttgaatacctccactgctagaatttaagtttcagaagagtagaacattktcattttatgcagtgctgaatctcctgtggatcaaatggtatctggtacatacaaggccctcaataaatcgttgaattttttaaaaagtgaatgaataaatgaaagagaatgtgagatcacagaaagtaagggttaactaccaatgagacagagcctaaataataaaatcataagaatgataaaaataatgacaagtaaaatttattgtttatgccagagtgtgaagtattttacatgcagttattgattaacctatatcattgtctcataatagagtactatttgtttttttactttataagttaaaaaaaaaaggaagaagagagggaataagaaatctgcccaaggtcagataagggacagagtcttgtcccaagtagactatacattgtttggtctaaaccacaagatcaacttgttactgacagaattatcagagcatcggagaatttattattaaaggatgagtggtagtagatctggcagacggggaaattgttgactcttttagagaaccacaaatgtattaggatactggagacagcatgcttttaagaaggcatgaggataagtgtgaaagtatagcttagacagattacaaaacaaatgagggttatcctaaagaatctgtatgttatcccaaaagagatagagtcatcaaaatatgtattaaggaaaaaacagaaggaatggtgcatgtttactgattatccattctttctaagttcctccaaatattatacttcaaataatatgtcaaaaatctggaaaaacagaccttaacttatttagaaacaaatttacctgagtgcaaatttatttgttactctaaatacaaatttatttgtctcccttaacttacttaaacactaacttacttagtataatatgttatatcatcagatatattgccacaaaatttgcacatatttctaaaaggcagagataacacaagttaaataatttctcatattagaatgagaagaacaaagcttagagaaacatggctgaatacatgtttacattacatatttcagatgggaaattcgttggtgacatttgatagcacattaaattgaaacctatcaagtttttaaaatttacattcattgaaacacactacttatcctcagagaaggagcagatattttgtaataatatttcataaaactatcaagaaagcttttgtgctatttactgcacaggaaatatcatctggtgaacagaaaataattgt

SEQ ID NO: 701096 - DNA, 1637 bp, Homo sapiens
catataaacttattataaaataaatgtattttatatagggttgagaggttaccaaatatacacttggggataaggcaggaatggtatatttaaaatgttgggaaatgtctatggtcctgaagctgccattcattcatttattcagttattcaacaattatttattggatgcttactatgggcaaggcactgtgaaaataaatgaaggaaaagaagaataaaattgtccctaccctgtatgaaaagaattatccttcagtgatattaatagaaatgtgaaagcaaaacaagacaaaacactacaagaatggtgaaaaattaatagaaacatatatattaatttgttatttgttgaatacctccactgctagaatttaagtttcagaagagtagaacattttcattttatgcagtgmtgaatctcctgtggatcaaatggtatctggtacatacaaggccctcaataaatcgttgaattttttaaaaagtgaatgaataaatgaaagagaatgtgagatcacagaaagtaagggttaactaccaatgagacagagcctaaataataaaatcataagaatgataaaaataatgacaagtaaaatttattgtttatgccagagtgtgaagtattttacatgcagttattgattaacctatatcattgtctcataatagagtactatttgtttttttactttataagttaaaaaaaaaaggaagaagagagggaataagaaatctgcccaaggtcagataagggacagagtcttgtcccaagtagactatacattgtttggtctaaaccacaagatcaacttgttactgacagaattatcagagcatcggagaatttattattaaaggatgagtggtagtagatctggcagacggggaaattgttgactcttttagagaaccacaaatgtattaggatactggagacagcatgcttttaagaaggcatgaggataagtgtgaaagtatagcttagacagattacaaaacaaatgagggttatcctaaagaatctgtatgttatcccaaaagagatagagtcatcaaaatatgtattaaggaaaaaacagaaggaatggtgcatgtttactgattatccattctttctaagttcctccaaatattatacttcaaataatatgtcaaaaatctggaaaaacagaccttaacttatttagaaacaaatttacctgagtgcaaatttatttgttactctaaatacaaatttatttgtctcccttaacttacttaaacactaacttacttagtataatatgttatatcatcagatatattgccacaaaatttgcacatatttctaaaaggcagagataacacaagttaaataatttctcatattagaatgagaagaacaaagcttagagaaacatggctgaatacatgtttacattacatatttcagatgggaaattcgttggtgacatttgatagcacattaaattgaaacctatcaagtttttaaaatttacattcattgaaacacactacttatcctcagagaaggagcagatattttgtaataatatttcataaaactatcaagaaagcttttgtgctatttactgcacaggaaatatcatctggtgaacagaaaataattgt

SEQ ID NO: 701097 - DNA, 1637 bp, Homo sapiens
catataaacttattataaaataaatgtattttatatagggttgagaggttaccaaatatacacttggggataaggcaggaatggtatatttaaaatgttgggaaatgtctatggtcctgaagctgccattcattcatttattcagttattcaacaattatttattggatgcttactatgggcaaggcactgtgaaaataaatgaaggaaaagaagaataaaattgtccctaccctgtatgaaaagaattatccttcagtgatattaatagaaatgtgaaagcaaaacaagacaaaacactacaagaatggtgaaaaattaatagaaacatatatattaatttgttatttgttgaatacctccactgctagaatttaagtttcagaagagtagaacattttcattttatgcagtgctgaatctcctgtggatcaaatggtatctggtacatacaaggccctcaataaatcgttgaattttttaaaaagtgaatgaataaatgaaagagaatgtgagatcacagaaagtaagggttaactaccaatgagacagagcctaaataataaaatcataagaatgataaaaataatgacaagtaaaatttattgtttatgccagagtgtgaagtattttacatgcagttattgattaacctatatcattgtctcataatagagtactatttgtttttttactttataagttaaaaaaaaaaggaagaagagagggaataagaaatctgcccaaggtcagataagggacagagtcttgtcccaagtagactatacattgtttggtctaaaccacaagatcaacttgttactgacagaattatcagagcatcggagaatttattattaaaggatgagtggtagtagatctggcagacggggaaattgttgactcttttagagaaccacaaatgtattaggatactggagacagcatgcttttaagaaggcatgaggrtaagtgtgaaagtatagcttagacagattacaaaacaaatgagggttatcctaaagaatctgtatgttatcccaaaagagatagagtcatcaaaatatgtattaaggaaaaaacagaaggaatggtgcatgtttactgattatccattctttctaagttcctccaaatattatacttcaaataatatgtcaaaaatctggaaaaacagaccttaacttatttagaaacaaatttacctgagtgcaaatttatttgttactctaaatacaaatttatttgtctcccttaacttacttaaacactaacttacttagtataatatgttatatcatcagatatattgccacaaaatttgcacatatttctaaaaggcagagataacacaagttaaataatttctcatattagaatgagaagaacaaagcttagagaaacatggctgaatacatgtttacattacatatttcagatgggaaattcgttggtgacatttgatagcacattaaattgaaacctatcaagtttttaaaatttacattcattgaaacacactacttatcctcagagaaggagcagatattttgtaataatatttcataaaactatcaagaaagcttttgtgctatttactgcacaggaaatatcatctggtgaacagaaaataattgt

SEQ ID NO: 701098 - DNA, 1844 bp, Homo sapiens
gtttattgcagaagatgtgaaaaattgaagaaaataaaattatctttatttagagattatcattgctaatagtctcttgtttatatgtatattttaatgaagttcttataattttataaatataaaatacattctgtattccttttaacagtatattatgagcattttctatactttaaaattcttcgtaagtgtattttataatagtgcttactctttatgtttatagatgcaccatgatgtaatcattcattgcaggacatttggcttgcttccaactgtttgctgccataaataatggcatgataaaatctctgtacattaatctttgtccccatttctgataatttctttaggagagattcccagaaatggaattgctgggtcaaagagaatgaatatgtttaagatctttgatatatttccaaatttgcttccataagtctttgtgaatttgtataaccaccatgagtttataaccaggcctgtcttactcactaagttctgtcagatttgtatgttaaaaagtgttttaattaactgcccaatactactgtgatatttgattaagttacgataccatcactagatggaataatatgcatttcattacaattaaaattattgcaacattaaacttactgatgatacactattaagtaaaacacatgagatgaaatggactatactctagcattgcaaatattcaagtaggtaggcatatagaaattactggacaaagatgatgaccaataaaaataaaacttagtaataatagattaccttaataactgacagcttactgtgtagttaatgtacaacagtataatgttaagtgcttaaaattcatgattatattctattttataatagctatatgaagggagtcctgatgctcgaagattctatacaaaggtctcataatcatacaggatttcagtatggttctggaatttatacccaggttgctggcttcaacctcaattagggtagtaaactttcatttaaatctcttaaacatttttctgttttctaaaccttgtaaaatgctgctgaattttctttatagcagagtaatgtaaaatggtacatttaagagaaaccacaatgaaaaagcttcttataatatcttagaaaagaaagaagtcactaaaaaccaaataaaggaactacatatacattaaactaaatagaaaatataatatttggaaaaacgtgaaataataatatttgacctaaccattactcagtgaaatccaagcaaagcaataaaatagcattcgttcaagctaatctgaggatgaagaatcactaaactttgcccaggattcactcttcatattttattattaagacagtagcataaataattattttaatataacaaattctctatccttattgctataagtaaagatgcattatagtaaataactaggccaattcttaatataattcaggaatttgttttcttaaatattcagtacatttaacattttctattgaaatgataaaaattattctttaattcattcaaaagttatttactggctgtttaccaggtgctaggcattattgctgaagctctggatatatgaccacatttaatgaacaaaattacctgccctcagctatcttatattctaatatgaaatacagaaaataagcacaataaatatgcaaatgtgaaatatatgcacatatgtgtatatatagcaygcaaagtttcaattgagggcaatagagggcatagcttatgttctcttctttactctgaaattcaaagagccaatcttcctgcaactcaccaatccaaatcaccaaagccagtcttgcctatcgta

SEQ ID NO: 701099 - DNA, 1429 bp, Homo sapiens
tctatctatctatctatctatctatctatctatctatctatctacctacctacctacctgtctacctgtctatctatatctcttgttggttctattcccctggagaactctaactaatacaacctctatgctataacatgataggatattattcaacaacattcagaatataagaattaatagccaggcttggtggtacatgcctgtagtcccagctactcaggaggctaaggcaggatgattacttaagcccaggaatttgaggttgcagtgagctatgatcacaccactgcattccagcatggggaacacagtgagactctgtctctgaaaaaaaaaaaatacacacacataaaagcatttagatwgggacaacaactgagacaatttaacgccagttaagtgttttctgtctactagactgtattggaaataagtatgtatgttgccaccatctgcttccccagcttatccccagggtgcctctaggatgcacctaattctctaacactttcaattctgtcccctaaatgcatattcaataaaaatataccaattctaggccctgctttttgagagtgcactctttaggggctctgctctatcttttttggagggcaatagtgaattcaataatctttttgctaatatttaaagatgctaatggccatctcttatcaactcacaaataaaagctatagaaaggaattatagaagaaagctggtgcctcttcaatgtgatgtccagccatgggtattttccgggtaggcttgacagtgaagtgtctaatttgcagtaatttgcttaatcatggacacaaattggaaaatttccctccttggcagcaatataaagaagtagagggtcttttattctgtaaatggaaataaataggcttttgcattaccttggtacatctgtttagcatatattcttgaagcatttctcttaagcattagtgcaacttcaacatccatgtactctcaaagatacttataaaatgcccatctataactttctgttttaaaattacaaatagtttttaattctcttgatgtttgtttaattctctcttgcagatgatctatgagcacttattcacttcctaagaatggctatttagagacagagtattgcatgcacggcagtgatttcactcaaagaaatatcaggataaaatctatttaatcttacattggtgtcgtttaatgaaaaatatattttaatattaaaaattcaaaatctttaggagagtgtctgcagatatttgcaggaaccagtacattaagaaagactcaataacagaatattgcctttatatagaacttatataatcataaccttttgtacagcatcaactacaatatttaatttttaatatgacagaagcattcaaacagatcccctaacagattgcctgaactaagc

SEQ ID NO: 701100 - DNA, 1045 bp, Homo sapiens
caaaacaccatgttgggaatcttctgcacaccaagacacattttattcaagttgtcgaaagttaaggamaaataaagaattttcaaagcagcaagagaaaagtgatttgtcatttttaagagaatttctgtaagaatattagtggatttcttggcagaaacttcgcagactaggagacagttggatgatatgttctaaatattgaacaaaacacaacttttaatcaggagtactatgccaggcaaaattatcctttaaaattgatggagagatagtttttctcaaacaaacaaaaatgaggagttcattaccactagacctaacttacttatcatttacttgtcatgtctttttgtttcttctatctgaaacaaacaatgcttcagagacttcttcaaattgaaataaaattatcctaaacagcaacacacacacataagcatatgaaagcataaatcacacagggaaaggtaaatatatagatgcagacagattcatgtaacactgtaaagatggtatgtaaattacttttaaccccaatgtaaaagttaatagagaaaatgtcgctaatggatatatgatataaaaagaagcattctttgtctacaagaatacaaagtgcttgtgtgggggagtaaaatggtagtgtttttttatacatttgaacttaaaatagaaggttaaaaactgtaagatattttacacaagcctttatctaatagcaaagaaaaaaacctgtaacagatacacaagagatgaaaaatcaaagcatattactacaaaaatcatcaaacaacaaagacagcgagaaaacaagagttaaaacaatgcaagacaaatagaaaataattaacaaaatggcaatggtaaatcctcattaataattacttaaatgtaaatggattaatctcaccaatcaaaaggtgtagaggctgggtgtggtggctaatgcctgtaatcccaacaatctgggaggcccaggtgggaagattgcttgagcccaggagtttgagaccagtctgggctcaaactatgtctttaacat

SEQ ID NO: 701101 - DNA, 1045 bp, Homo sapiens
caaaacaccatgttgggaatcttctgcacaccaagacacattttattcaagttgtcgaaagttaaggacaaataaagaattttcaaagcagcaagagaaaagtgatttgtcatttttaagagaatttctgtaagaatattagtggatttcttggcagaaacttcgcagactaggagacagttggatgatatgttctaaatattgaacaaaacacaacttttaatcaggagtactatgccaggcaaaattatcctttaaaattgatggagagatagtttttctcaaacaaacaaaaatgaggagttcattaccactagacctaacttacttatcatttacttgtcatgtctttttgtttcttctatctgaaacaaacaatgcttcagagacttcttcaaattgaaataaaattatcctaaacagcaacacacacacataagcatatgaaagcataaatcacacagggaaaggtaaatatatagatgcagacagattcatgtaacactgtaaagatggtatgtaaattacttttaaccccaatgtaaaagttaatagagaaaatgtcgctaatggatatatgatataaaaagaagcatyctttgtctacaagaatacaaagtgcttgtgtgggggagtaaaatggtagtgtttttttatacatttgaacttaaaatagaaggttaaaaactgtaagatattttacacaagcctttatctaatagcaaagaaaaaaacctgtaacagatacacaagagatgaaaaatcaaagcatattactacaaaaatcatcaaacaacaaagacagcgagaaaacaagagttaaaacaatgcaagacaaatagaaaataattaacaaaatggcaatggtaaatcctcattaataattacttaaatgtaaatggattaatctcaccaatcaaaaggtgtagaggctgggtgtggtggctaatgcctgtaatcccaacaatctgggaggcccaggtgggaagattgcttgagcccaggagtttgagaccagtctgggctcaaactatgtctttaacat

SEQ ID NO: 701102 - DNA, 1045 bp, Homo sapiens
caaaacaccatgttgggaatcttctgcacaccaagacacattttattcaagttgtcgaaagttaaggacaaataaagaattttcaaagcagcaagagaaaagtgatttgtcatttttaagagaatttctgtaagaatattagtggatttcttggcagaaacttcgcagactaggagacagttggatgatatgttctaaatattgaacaaaacacaacttttaatcaggagtactatgccaggcaaaattatcctttaaaattgatggagagatagtttttctcaaacaaacaaaaatgaggagttcattaccactagacctaacttacttatcatttacttgtcatgtctttttgtttcttctatctgaaacaaacaatgcttcagagacttcttcaaattgaaataaaattatcctaaacagcaacacacacacataagcatatgaaagcataaatcacacagggaaaggtaaatatatagatgcagacagattcatgtaacactgtaaagatggtatgtaaattacttttaaccccaatgtaaaagttaatagagaaaatgtcgctaatggatatatgatataaaaagaagcattctttgtctacaagaatacaaagtgcttgtgtgggggagtaaaatggtagtgtttttttatacatttgaacttaaaatagaaggttaaaaactgtaagatattttacacaagcctttatctaatagcaaagaaaaaaacctgtaacagatacacaagagatgaaaaatcaaagcatattactacaaaaatcatcaaacaacaaagacagcragaaaacaagagttaaaacaatgcaagacaaatagaaaataattaacaaaatggcaatggtaaatcctcattaataattacttaaatgtaaatggattaatctcaccaatcaaaaggtgtagaggctgggtgtggtggctaatgcctgtaatcccaacaatctgggaggcccaggtgggaagattgcttgagcccaggagtttgagaccagtctgggctcaaactatgtctttaacat

SEQ ID NO: 701103 - DNA, 1045 bp, Homo sapiens
caaaacaccatgttgggaatcttctgcacaccaagacacattttattcaagttgtcgaaagttaaggacaaataaagaattttcaaagcagcaagagaaaagtgatttgtcatttttaagagaatttctgtaagaatattagtggatttcttggcagaaacttcgcagactaggagacagttggatgatatgttctaaatattgaacaaaacacaacttttaatcaggagtactatgccaggcaaaattatcctttaaaattgatggagagatagtttttctcaaacaaacaaaaatgaggagttcattaccactagacctaacttacttatcatttacttgtcatgtctttttgtttcttctatctgaaacaaacaatgcttcagagacttcttcaaattgaaataaaattatcctaaacagcaacacacacacataagcatatgaaagcataaatcacacagggaaaggtaaatatatagatgcagacagattcatgtaacactgtaaagatggtatgtaaattacttttaaccccaatgtaaaagttaatagagaaaatgtcgctaatggatatatgatataaaaagaagcattctttgtctacaagaatacaaagtgcttgtgtgggggagtaaaatggtagtgtttttttatacatttgaacttaaaatagaaggttaaaaactgtaagatattttacacaagcctttatctaatagcaaagaaaaaaacctgtaacagatacacaagagatgaaaaatcaaagcatattactacaaaaatcatcaaacaacaaagacagcgagaaaacaagagttaaaacaatgcaagacaaatagaaaataattaacaaaatggcaatggtaaatcctcattaataattacttaaatgtaaatggattaatytcaccaatcaaaaggtgtagaggctgggtgtggtggctaatgcctgtaatcccaacaatctgggaggcccaggtgggaagattgcttgagcccaggagtttgagaccagtctgggctcaaactatgtctttaacat

SEQ ID NO: 701104 - DNA, 2693 bp, Homo sapiens
tagaagtggacgataaaatgaatagacaaaaatgacctaaatcttctaggagccaaaggtctttgaatagctcaaaaaaaatccttcaggccaggcgcggtggctcacacctgtaatcccagcacgaggtcaggagatcgagaccaacctggctaacatggtgaaaccccatctctactaaaaactcaaaaaattagccgggcgtgatgttaggcacctgtagtcccagctactcgggaggctgaggcaggagaatggcgtgaacccgggaggcggagcttgcagtgagccaagatggcaccactgcactccagcctgggagacagagcgagactccatcaaaaaaaaaaaaaaaaaaaaaaattgcttcatcattttccagtgtgtaatttactcaacaaagctaattgttttttcccattgagggatacatttgaagaaaatgataggctcacttcttcccttgactaggaaaatgaccccctgttttcagtaaaatttttgttcagcgctttttcaagatctatttgtaatccaaacaagctatcaaatatttgtcctagaaaaagacttttttttcctttatgagaaggtcagaaattgaatgtttcaagaaaatgttactatcttgaaaagcatagagtcttctattgacagagggcggctgtaaagggaagatgctgtgctcttaaccatggactgactggggatagttgcacttactaggtctcctgacactaaaccgagtttacaaaaccctgtctctattggcgttcaaatgatgctgggagaaatggcccataaattaacagttacttaaattatatcatcctttgtgctctttaagctttcagagtacatatgttgatttatcagattttcctcatgtgtgcatttattcattaatttatttaaaaatttatttaaaaatttaaaatatttatcaaaaccctacatgtgacaggcatttagctaggccttgaaaactcaccgtaactgtgatagggctcctgactcagaggggtttccagagtctaagaagcgaggctgatttgtaagcaaagtgattccatgcttcagtcccattactttcagcatacctctgttcattgagcatttcaaatgtgccaagcaacatgctaagaactaggagtacaaaacagaataaagatgttttcctgcttcttgtgaaacttagtctgttgggggcatacagataaaaataggttcttttagagtaatactatttgaagaagagaagaagtttgttctgaccaggagaaacagactcaacaaaaagcatagcattatgtaaattgaatgttcatatagggtaataaaataacttccttcatggttgtgaacagtagaccctatcagggcagttgtttacttcatagactattcttcagcttacaactgtcccataggttaaaaataaactgcttcttacagcatgagattagaagtttccaaagatggctttccttcagggcgctttgaatctgggttattcagagaagacagtatgatggggttaggatcctatgaattctaagtttgagacaagaaaactggagaaagagtaggaaaaaaggaagttaggaagatgccacttagctgaattggctgcaatgtatgcatgtgctggcaaagagacaaaaacagaggacccaaaagacagacaggagtaatcataatgaacaacctggcctcctcacatgagcatctgagatatcgtggaggtgcaactataagatagtgacatgaaactatctggattctatattttcaaaatttgaacgtctgtttccaaattcttactcagtcatagatttcaaatatcagaatattgtgggctgaaagtttattggtttcaagtgaagggcagataatgtggtcctcagtgtgaacagctgagatgtgaactaccaaagagatattatggcttacaggagaaccaaggcatacttttccctctaaagtgaatattactcattatttgatattatctatttaaatcaaatgcataaatccacatagttatgtagtataaattacttttaatcacagaaccaataatttgacgtgacgtaaaacacaaatttgtacattacagtatttgtggaagaaagaagaaatggaaggtagagaatggttaggtaatgaaggagagaaggataagtaagttttcataataggcccttctatttgctttattattagttataatttaattatattttacaattaataaaatagctataatatctaaattaataacaaatatagatattgccataaaatgtagtttacacactgagaatatattttagaatctctgctaccaaacacatgcttaatatacccaatacgttatagttgcaagtaaaagaagtgggtgaaattaacttgataggcttacttatgaacagataggaagctgttgtgtcttgtgaaaggtccgtcaggtagataagagaagaaaaaaggctaggcctagaggattgcattttcttatttatttatttatttatttattttattatactttaagttttagggtacrtgtgcacaacatgcaggttagttatgtatgtatacatgtgccatgttggtgtgctgcacccagcaactcgtcatttaacattaggtatatctcctaatgctgtcccttccccctccccccaccc

SEQ ID NO: 701105 - DNA, 774 bp, Homo sapiens
agcatattttcatatacatcttgtcaatttttgtgtctttgttggggaaatatctgttcaaatcctctggccatttttcaattgggttattatttgtctatttgaaactgcagtggtctcatatatctttaggaattaaccccttatcagttatatggtttccaaatattttctcccatkctgcaaactgactttttgttctgtagaatgtttcctttgctgtgcagacgcttttttgtcttatgtattctcatatgtctatttttccttttgtggcctgcttttagtgtcatatccaaaaagtttattgcaaagaccaatgtaaaaaagttttcctctgtgctttcctctaggggtttcaggatttacatttcagcttttattgtttctaaagaaaagatcttgaaagtatcttaaaatggcttgtaaagctctagttatgaactaactttttagaagcctatgtgacaatagatcagaaacatactgattatgtttatcctaaaatgcttaagcgtttaaggattaataggcaaagatataggaaacacaggttagacatttccaaaggcaatagttttgagtttaggtctttaacccattttgagtttatttttgtgtatggtgtatggtaggagttcaattttactttttgattttcttttcatgtggatatccagttttcctaacaccatttgctgaagaaaccatccttttcccatcgcaaattcttggcaccttttcaaagatcagatatatatatatatatacaca

SEQ ID NO: 701106 - DNA, 605 bp, Homo sapiens
gtagaactgcccttgttacagttggtggaggggacctaaaatgcctgctgcctaccctacttcccactgccacagataaatgtctccccacacgcccccaccccccactccattgttaccaaggcagctgctggtggtcagcattgcctgacattcaccagggacttgacctcaacaagaggaacactggacaatacttccatttgccttgttagtaccatgtgttccttctcgtttgtcttgccttgcttcttatttcctgtcaatctccccgtcctttgaccagccacctttttgtggctaggggactccatcagctttatcagctcctaactgccttctaggatctgagcccacccctgycccccattgttttctgccaaccagaacctgtgtctttctggttcatagaggttcccccaacttttcagccactgctgcctgtcatcacaggaatgctcccaccttctccctacgtcatgcagacctctgccaccccttcctagctcccaccctgacctctcaagagagggaaagtgactgatgtgattgatcaaaattctagaacatttttcatgtcacattttctttgggggtaagatcgc

SEQ ID NO: 701107 - DNA, 698 bp, Homo sapiens
tgggaatatcttatcactgaatttttgtttagatgttgtcattgaattcttgaattttcactctagatgttgtatagggagaattcagagagattcttttaaataatttcaccactatcatttaaacctctctctttactttatatctttaggtcttgtggagattttcgtattagtttaatggattgagtaagagctattctagatatcggaaaggttatcttcgtttctctagtttgtgtttggggtactaattttcaccttaaaaaaatggcatgagaacaaaaggcagcagaaacttctgcagacttaaatgtccctgtctgacagctttgaagagagtagtggttctcccagcatggagtttgagatctgagaacggacagactgcctcctcaagtgggtccctgacccctgagtagcctaactgggagacaccgcccattaggggcagactgacacctcacacagccyggtacccctctgagacaaagcttccagaggaagaatcaggcagcaacatttgctgttcagcaatattcactgttctgcagcctctgctgctgatacctaggaaaacagggtctggagtggacctccagcaaactccaacagacctgcagctgagagtcctgactgttagaaggaaaactaacaaacagaaaggacatccacaccaaaaccccatctgtacgtca

SEQ ID NO: 701108 - DNA, 698 bp, Homo sapiens
tgggaatatcttatcactgaatttttgtttagatgttgtcattgaattcttgaattttcactctagatgttgtatagggagaattcagagagattcttttaaataatttcaccactatcatttaaacctctctctttactttatatctttaggtcttgtggagattttcgtattagtttaatggattgagtaagagctattctagatatcggaaaggttatcttcgtttctctagtttgtgtttggggtactaattttcaccttaaaaaaatggcatgagaacaaaaggcagcagaaacttctgcagacttaaatgtccctgtctgacagctttgaagagagtagtggttctcccagcatggagtttgagatctgagaacggacagactgcctcctcaagtgggtccctgacccctgagtagcctaactgggagacaccgcccattaggggcagactgacacctcacacagcctggtacccctctgagacaaagcttccagaggaagaatcaggcagcaacatttgctgttcagcaatattcactgttctgcagcctctgctgctgatacctaggaaaacagggtctggagtggacctccagcaaactccaacagacctgcagctgagagtcctgactgttagaaggaaaactaacaaacagaaargacatccacaccaaaaccccatctgtacgtca

SEQ ID NO: 701109 - DNA, 1249 bp, Homo sapiens
  misc_feature 410, 411, 412, 413, 414, 415, 416, 417, 418, 419, 420, 421,422, 423, 424, 425, 426, 427, 428, 429, 430, 431, 432, 433,434, 435, 436, 437, 438, 439, 440, 441, 442, 443, 444, 445,446, 447, 448, 449, 450, 451, 452, 453, 454, 455, 456: n = A,T,C or G
  misc_feature 457, 458, 459, 460, 461, 462, 463, 464, 465, 466, 467, 468,469, 470, 471, 472, 473, 474, 475, 476, 477, 478, 479, 480,481, 482, 483, 484, 485, 486, 487, 488, 489, 490, 491, 492,493, 494, 495, 496, 497, 498, 499, 500, 501, 502, 503: n = A,T,C or G
  misc_feature 504, 505, 506, 507, 508, 509: n = A,T,C or G
tgtcctctggaatacagtgcttcttccagacgctataaaattcaagcctaatatttggtaaacttccctagtgtttgtgtttcgtaaactgtctcccagctgtagcctcagctctctttatatgttcctaaataaacaccaggtcctgctcactgccttctggtcagagcagaactctgctgtcacccagcctcttggttctcattggtacctaccatattttccattattttatagatgctcaaaaggacaaaagaagtttttaaccctacaggcacaaaaatgtgctttgttttttagggaaaataagtgaaactttaaaaaaaaagtttattgtgatggctaaatgacccaggaaaagcagttctcatgccatctgttgcagctctgttttaaattaggatgatggnnnnnnnnnnnnnnnnnnnnnnnnnnnnnnnnnnnnnnnnnnnnnnnnnnnnnnnnnnnnnnnnnnnnnnnnnnnnnnnnnnnnnnnnnnnnnnnnnnnnttatcacctggtaagaaaatatccagacatttttcaaggcagaaaagatgggaccagagaatgtggatcctgggagttagagagaatgatggggttcctggcaaataaaagaaataccaggaaaagaggactggtttgggaagaaaggtgatcgatgacattatagcatcagaaactaactgtgcaaatcaaacaacaatgttttaggtgatattacagcctgtgagtacagttggcaaccacaccaatttgaaaaactttttttgggagagttccagacacactgtttaaattttgatgaggggaggggcagggggagtcgtggtggctgtatgtttctgtggagctggttttcctgcgcacagaccctccctggggtccagcccttggggaggcatctttccaaagcgctaaagcaaatacactggtgcctctttgctgggcccaatgcctccagttcacrgaacatgaaatcctggagcatgggaacgatgaaaacatgaggaaaggcagcaagctgggaggccacagtggggtggggtatttattcaaagacttcatgtgactatcattggctgtaggattcgctgtgattaattttcctcttcagtgtttgcttgagcattgagcctatattgctttggcgattagaaaagaagttgttgaaacaaaacaattaaaaaacgacaagtggtcatctctgagttgtgaacttacaggatgatttgtgttgctttgtg

SEQ ID NO: 701110 - DNA, 1249 bp, Homo sapiens
  misc_feature 410, 411, 412, 413, 414, 415, 416, 417, 418, 419, 420, 421,422, 423, 424, 425, 426, 427, 428, 429, 430, 431, 432, 433,434, 435, 436, 437, 438, 439, 440, 441, 442, 443, 444, 445,446, 447, 448, 449, 450, 451, 452, 453, 454, 455, 456: n = A,T,C or G
  misc_feature 457, 458, 459, 460, 461, 462, 463, 464, 465, 466, 467, 468,469, 470, 471, 472, 473, 474, 475, 476, 477, 478, 479, 480,481, 482, 483, 484, 485, 486, 487, 488, 489, 490, 491, 492,493, 494, 495, 496, 497, 498, 499, 500, 501, 502, 503: n = A,T,C or G
  misc_feature 504, 505, 506, 507, 508, 509: n = A,T,C or G
tgtcctctggaatacagtgcttcttccagacgctataaaattcaagcctaatatttggtaaacttccctagtgtttgtgtttcgtaaactgtctcccagctgtagcctcagctctctttatatgttcctaaataaacaccaggtcctgctcactgccttctggtcagagcagaactctgctgtcacccagcctcttggttctcattggtacctaccatattttccattattttatagatgctcaaaaggacaaaagaagtttttaaccctacaggcacaaaaatgtgctttgttttttagggaaaataagtgaaactttaaaaaaaaagtttattgtgatggctaaatgacccaggaaaagcagttctcatgccatctgttgcagctctgttttaaattaggatgatggnnnnnnnnnnnnnnnnnnnnnnnnnnnnnnnnnnnnnnnnnnnnnnnnnnnnnnnnnnnnnnnnnnnnnnnnnnnnnnnnnnnnnnnnnnnnnnnnnnnnttatcacctggtaagaaaatatccagacatttttcaaggcagaaaagatgggaccagagaatgtggatcctgggagttagagagaatgatggggttcctggcaaataaaagaaataccaggaaaagaggactggtttgggaagaaaggtgatcgatgacattatagcatcagaaactaactgtgcaaatcaaacaacaatgttttaggtgatattacagcctgtgagtacagttggcaaccacaccaatttgaaaaactttttttgggagagttccagacacactgtttaaattttgatgaggggaggggcagggggagtcgtggtggctgtatgtttctgtggagctggttttcctgcgcacagaccctccctggggtccagcccttggggaggcatctttccaaagcgctaaagcaaatacactggtgcctctttgctgggcccaatgcctccagttcacagaacatgaaatcctggagcatgggaacratgaaaacatgaggaaaggcagcaagctgggaggccacagtggggtggggtatttattcaaagacttcatgtgactatcattggctgtaggattcgctgtgattaattttcctcttcagtgtttgcttgagcattgagcctatattgctttggcgattagaaaagaagttgttgaaacaaaacaattaaaaaacgacaagtggtcatctctgagttgtgaacttacaggatgatttgtgttgctttgtg

SEQ ID NO: 701111 - DNA, 1249 bp, Homo sapiens
  misc_feature 410, 411, 412, 413, 414, 415, 416, 417, 418, 419, 420, 421,422, 423, 424, 425, 426, 427, 428, 429, 430, 431, 432, 433,434, 435, 436, 437, 438, 439, 440, 441, 442, 443, 444, 445,446, 447, 448, 449, 450, 451, 452, 453, 454, 455, 456: n = A,T,C or G
  misc_feature 457, 458, 459, 460, 461, 462, 463, 464, 465, 466, 467, 468,469, 470, 471, 472, 473, 474, 475, 476, 477, 478, 479, 480,481, 482, 483, 484, 485, 486, 487, 488, 489, 490, 491, 492,493, 494, 495, 496, 497, 498, 499, 500, 501, 502, 503: n = A,T,C or G
  misc_feature 504, 505, 506, 507, 508, 509: n = A,T,C or G
tgtcctctggaatacagtgcttcttccagacgctataaaattcaagcctaatatttggtaaacttccctagtgtttgtgtttcgtaaactgtctcccagctgtagcctcagctctctttatatgttcctaaataaacaccaggtcctgctcactgccttctggtcagagcagaactctgctgtcacccagcctcttggttctcattggtacctaccatattttccattattttatagatgctcaaaaggacaaaagaagtttttaaccctacaggcacaaaaatgtgctttgttttttagggaaaataagtgaaactttaaaaaaaaagtttattgtgatggctaaatgacccaggaaaagcagttctcatgccatctgttgcagctctgttttaaattaggatgatggnnnnnnnnnnnnnnnnnnnnnnnnnnnnnnnnnnnnnnnnnnnnnnnnnnnnnnnnnnnnnnnnnnnnnnnnnnnnnnnnnnnnnnnnnnnnnnnnnnnnttatcacctggtaagaaaatatccagacatttttcaaggcagaaaagatgggaccagagaatgtggatcctgggagttagagagaatgatggggttcctggcaaataaaagaaataccaggaaaagaggactggtttgggaagaaaggtgatcgatgacattatagcatcagaaactaactgtgcaaatcaaacaacaatgttttaggtgatattacagcctgtgagtacagttggcaaccacaccaatttgaaaaactttttttgggagagttccagacacactgtttaaattttgatgaggggaggggcagggggagtcgtggtggctgtatgtttctgtggagctggttttcctgcgcacagaccctccctggggtccagcccttggggaggcatctttccaaagcgctaaagcaaatacactggtgcctctttgctgggcccaatgcctccagttcacagaacatgaaatcctggagcatgggaacgatgaaaacatgaggaaaggcagcaagctgggaggccacagtggggtggggtatttattcaaagacttcatgtgactatcattggctgtaggattcgctgtgattaattttcctcttcagtgtttgcttgagcattgagcctatattgctttggygattagaaaagaagttgttgaaacaaaacaattaaaaaacgacaagtggtcatctctgagttgtgaacttacaggatgatttgtgttgctttgtg

SEQ ID NO: 701112 - DNA, 1126 bp, Homo sapiens
tgctcttggggtttgaacccagatttttctgactccataacccatgcttttaatcactgtactacttcaagtgccccctcaacgtcaggcaagggcagacaccaggaataggctgtgttggtttttggttgccccactgactatccatctgcagttgtttttcttccattctgatcatcaatcatagtgtgacttaaatgggtcaggataaggagtccccagctgccatgcacagccacagcagccactgcccacagtcctttctgtgggctttctgggcagcattagtggaaagtcctatctgtgaagtaaactaacaagattgggggaggggtccccttatttatttaatcatcactccccaaggctaaactggtggcctggcaacagtgagtattttctctgagctcagaagccaactccaagtgttcagggtgaacaggttgggaaacttgagaaccacacagacatcaggaaaaattccgtgagtggttgtctgtggtgaaatgatgatatggccctgagtttgctctccccaggagaacttggaagctgcccccttttccacctcccacctcacttggaactaagtaaaccaagaaattctaggaagcagcccaacctgaaagagctggcttctccaggaaaagagaggggagggtgaagagacccagggtctgtccgtcccaaggggatggtcagtcacagaagtcactgaccagcactccaggccagatctcactggtccggccacagatttttctaatcctgtgagttgaactgcacccaaatgactgcagatgggatcagagatggaggtctcaccagtcagaggaaaagcatccaagtatcaggagagatgcatagttcyaagaggagccatctaaaagcaggcagagtttgaaagaaacttccaattaaaaaaaaaaaatgcctttctgtgaggtcactccctgtgaggcaggagaatagggtctggaggcagggaacataaagccgattcatgctgacttcctagaactaaatcaaatggaaacacttcagctatgacaggaaataccctctccatttacacagggcatacactgagtaaatgactttgtaacttctttgtaactttgcttct

SEQ ID NO: 701113 - DNA, 1965 bp, Homo sapiens
gtgttttcttcacacatcatatgaaagggtgagtatattttgacccctctacacaagttatagacaaagctgtagagccaacaaaactcacaaaagtcactcaggtaccactgttaacaagccaacctagctaccctccctttcactgggagtattggtggaataaaactgctctggaaatcaactggcaacagctcagcacttaaagtgaattatgagcatatatgggtgtcactagcaagaactttccaaaaatagcaggaggcacaaaaaataaaagaaggaaatgattctttaaacataattaaacagtaatgccatcagataaaacagaggaggatcagtatgagctgaatagaacacagattattccctgtgtccctggctagcaatttctctcaatacaaagactagtaaactgaaaatatttatatatttacatcattttttcctttcaagagaaatccaaaaccctaatccattctgcatgttattcttgaagctttatacccaagagttgtgcaaaggtccaagaatcagacttaatgtcaagatattggagtagcccttccaggcactagtcctcagtccacaccagctatatccaagatacccagtaagaaagttttcatggtccttttgatttaggagtctgtgcttttgtaccatccttaagacatgaaaatatttgtagtggctagaaatcccagtatctaaaactcagtatgcaccattaagccagatcccttgaggctcaccatctgccttggggcactgccagggagcagggcatgtgtgcctgttactttgaaacccacaaacttttctgtttttacagcaacagctgctacaaatctgattatatttcttatgagtaaataaaattatatmttataaattatttgaagggactgaatactaaagttgcaacccaaattgctctgtgaattatatttttcttaaagtaaattaaactctccaaagtagaaaaacagatataggttaatgtcattgttttgctgtaaatctttttatgaaaagttatttcatagcatttatggaagttttatatatatatgtatatatatacacacacatatataaacatatatatgaaacaatatgcccacatccatacatatcattataaattataaattatatttatatttttataatttaaaatatataaattatatttcatatatttatattttttatatattttatatatttataattttataaatatgtttataattttataaattataattataaattataaataaacacatattaaaattaatatatagtaaattacatatagttgtaatttaagaatacaggtttaattatcctttacagtttgtttggatattcacttaaagtgctaaggtaaggaaggaagccttccaggtattgctatataaaaaaacctgaaccccatgggcaatatctgcaggtttgtagtgccaagagtagaaaaaagttatgcagatcttgcttctcactgaacaccggcttaaaaaggtttgtttctctctgtatttgtagtgcactctgctttcattacacatggtggaatgacacagaaaaatattttgatttaattttacaccagtctatcaattttaagttgtgctctatgaatatacattgtagaggataatctctcactattaaatcaatcaaatttgaaagattattaaataatgtatgtgagaatgcctagaatagtgcaccttatgtcatataggctttcggtttatttaatccaggtatgaaacataaggaggggggataacaccaaggatgatcctagattttagacatttgtccactaattttacacgtgaaaagatggaaattcacagtgtttatctgactgcttaaggtcacacccttggggtaagaattaagagcctaggaaacatgtccagtttgacaagctttccatatgct

SEQ ID NO: 701114 - DNA, 1476 bp, Homo sapiens
ttatctttttatttgcaaggtgatgtcaataaccctttttctctttcactacttctttttagagctgcactctccaatgtgatagcgaccggcagcatgtggttattgagcacttaatgatggcctaatgttaagggctaatcagaatttagatatgaaataaatgtgaagcttatattgaaacttaaagacctcataaaaataatgaatgcaaaataactcattaaaaaattgttggttaccttttgaaatattttagatataatgtgttaaataaaatatattttaaaattaatatcacttctttttttatctgataggattactttagatataaattaaatatcagtataaaattaagtgctttctttgaaaagacatttattaaacaggaagaattttgtgggaaggtgatgaaaatgctattggttatattttggaatgccagtctatgaaatgtaattatttcaattcaaaggagctatatattcaaaaagaaaaactaggtgatattttctcttgtggttyactactgtatgtctttgtatttcttttttcatgcttggaattgatgttctgatggattacacagtgcaacatttatgacgaaagtagctttagaaaagactgttaaaaaaccaccattagccctagagttcttagcaaagttattgacatcagaatgttttgttataatattaaattttttcaaacattcctgatactatttatatagtcattcaaagcaaagctagcatgatattcttctgtcttgactattgcattacaactacattacttctcactgaggcaggcattcacctgaagatacattctgctgaagcacagaatttcttataaacctcctaggtcacggatttaatctaatactgtgcactgattataaaaccttttagtgttcttatatgtcatattattatatttatttttcttagtactacaattttgaaagttataaatttccctatttattagactcacatctgtttcaagacctctcattcttagctacggaactcacattgtatatgtattttaggtttttaatatataccacattatggttgttttatagattaaatgagagataatttacattttgaaaaagataaatgctggtaatgcaacttgttcaccccttcttcctcttctttcccctttggttattttgcaaacactttgttagtttagggattcacatgtttgcctcacatttttaaatagttgtgtttttatacagaaaaaacaaaatttctacttcaaagtgtataccagtgagcatttgggtaagaaaacacctccaaaatctagtaattcaaatcaaaacaactatttaagtgatgcgtctgcagggtatatattaggctagtgtagtagttctctgctattgcaaattacaactttagtaactttattacaaatttagtaacttaacagaaatttattatcttacag

SEQ ID NO: 701115 - DNA, 2847 bp, Homo sapiens
  misc_feature 707, 708, 709, 710, 711, 712, 713, 714, 715, 716, 717, 718,719, 720, 721, 722, 723, 724, 725, 726, 727, 728, 729, 730,731, 732, 733, 734, 735, 736, 737, 738, 739, 740, 741, 742,743, 744, 745, 746, 747, 748, 749, 750, 751, 752, 753: n = A,T,C or G
  misc_feature 754, 755, 756, 757, 758, 759, 760, 761, 762, 763, 764, 765,766, 767, 768, 769, 770, 771, 772, 773, 774, 775, 776, 777,778, 779, 780, 781, 782, 783, 784, 785, 786, 787, 788, 789,790, 791, 792, 793, 794, 795, 796, 797, 798, 799, 800: n = A,T,C or G
  misc_feature 801, 802, 803, 804, 805, 806: n = A,T,C or G
ctgtcagttataggagaaaatgtatttacagaaacatatttattgagcacctcttatgtatcagtcactactataggcacttgtattaaaacaataagccagatacgatgcaagccttctgataccttccagaagagacttgcaaacagacacttgtaatgcaaagaagaacgtgataagtgaacttttcttatagaagattagattataaagcaatcaaagatatgggaagtgaaactccagacacctggctgcgcttaagtattcctataatatactttgattttatggcataaaatcaaatcttaaaatgcaaaatataaggtctgtaacccctacttggcaattgtgtatctgtgagaataatactgtgttggcaaggagaaaaataaggtatattatttcaccttaaatgttgtatttctggccaagaattcaaatatatcatgaaacaaatgatctagaaatcataatacaagcattactctggcaatcaaaaactcacataatagcttttagaaagtttagattttgtgcaaatacattttatcttctttgcagttctgatgaattgtgaattatatttgtttgaaatatgccataatttagacataagaaaatctttcaaaactgtgatatataatacacatgcacttttaaagaaacatttgaatatattaatgtagtgctatgctgtacttcacaannnnnnnnnnnnnnnnnnnnnnnnnnnnnnnnnnnnnnnnnnnnnnnnnnnnnnnnnnnnnnnnnnnnnnnnnnnnnnnnnnnnnnnnnnnnnnnnnnnnaacaatggtaactgacaaactggtttcagagtgaataatttcaccagtgtgttttatagagtatagagagaaaaagcataaaaaattcaaacttctaacagttaagcaaagtggaataaacacacgatgaagaggtgatcatagttggttgaattcagattattttgacctaacaaaagttatattatctctctagtgtggggcaaaattatctttgggatcttgtcaacctaggattttattaattagcataggtatttgcagactttacaaagagaataatttataaaatcgaatttttagctttatataatgaaaattttcacatttgctattataacctcaaattaaaaatgaccaaatgaatttggtcttaaaattgaatttgatgcaattctatttctataatatgttacaattatacatatatcagcagaaggaaatagtcctaatgatgcttacaaataagtataaaagtattgtgatactgaaataatcacttgaatattttaggtgctgaaagaaaagtttactgaataacataattgatcttaatggctaaatattttaatatctccaacactgcaagatcgtgctggttmacaaatgccaaaccaaagtgattcaaagaaacaacatgatatcctttctttgatcacagatagaaaaattaaatcacaaaatttgtttgtgttcttccctctaagaataccacagagttttaattaggcttactattttgtaagtcttaaagtcaagtaaactgattcctcccactttatttttctttttcataattcttcagctattctaggtcctgtgcccttctatgtaaatgtcacaacaagcttgtctattaaaatttaaatcaaaaatttttatttaagtctactaaaatccatggtacaatcttgatagaaactgcatgaaaccagtttcaatatcagttttggaagaatggacatttttacattgttgaatcttccagttcatgaacatggtatgtctctccacttatttagagagcaaagcttagtatacttacagtaaagttaaaaatgagcaaaattttgcttattatcaactgagtaaaattgtgcagggtttatttcaccaaattgaaatttttgtgacattagatagacttgcattcatttattttgacttttccaaattattttatcttctattgctcaaaccagatggaataatagacaaatgagctgatcacaatgtccgtgtgtaaaatctttttgggagtattaagcattttaaatagtatgcagtttatcctgaaaagagaaaaatagttgcttattgtcatattcaggttaggacaaactagagaagttgccccatggtgaccaggcgtttggagtggaagagaaaggaagtaggtgaagaaaggagagatagatagtacacaatcacctcaataggcagactacttacttcacaaaactccagggcttgtgatttgtcttcagcattattggtttcctttttaccccagctatttcactaagttatgtggagttaaccacaaaatgtgtgtcctgagggtgtggtagggaagagtgagaatagataagtgactcaaagcaattcctatgggggctgcgagcctctttaaatatggtctggtcacaagttcaccaaaatgggccagggttctgaaaccacgtgttccaatcttgttcctcaatgtaccttctgattatggagaaagataattctcaattgagctatgcattagattcatccctgatatgatatacagatttgccagcattcatcctcacctctctaggaaatggaatgaaaagctcttgactatatatgccactttaaactccactggtgattctgagtcagagccagggtgcagagcactaatgtgaggactgaggtaggaaatgccagttattaaagcctgctgatgcagacggtttatggaaaagccactgtaactacctactaatctccaccttttctattagcttaagttatattttcaagggtatttgtgtttgggactgaa

SEQ ID NO: 701116 - DNA, 502 bp, Homo sapiens
ggctatgggcatcattcctacttccttgagcctgctcactgcagagatggagggaagcttcaaaaataagtaaccatgaaatgtgtgcatatgagtattccttgtcattacacagaattaaaagcattagaatctgagtcacattctaatcaattctctaacttgaaagatagaacttggccatcattaccacaatcgtcctgaaatagctatcattaacattaggtgatgccatcccatacattaaatactttcccaccctaagcagaaacatgaattaaataatggatagattgaatatatgacacattattttattaaaatgagatgataatatataaactcaatgaatgttakatttaatttatttgactaaacaggagaaaaataaacaagaaaaactgaaggatctgataaacttcacataaatgtttcttcatcacaggatatgttatttgataaggataggggtttatgagcacattatgaggttgattcatta

SEQ ID NO: 701117 - DNA, 502 bp, Homo sapiens
ggctatgggcatcattcctacttccttgagcctgctcactgcagagatggagggaagcttcaaaaataagtaaccatgaaatgtgtgcatatgagtattccttgtcattacacagaattaaaagcattagaatctgagtcacattctaatcaattctctaacttgaaagatagaacttggccatcattaccacaatcgtcctgaaatagctatcattaacattaggtgatgccatcccatacattaaatactttcccaccctaagcagaaacatgaattaaataatggatagattgaatatatgacacattattttattaaaatgagatgataatatataaactcaatgaatgttatatttaatttatttgactaaacaggagaaaaataaacaagaaaaactgaaggatctgatraacttcacataaatgtttcttcatcacaggatatgttatttgataaggataggggtttatgagcacattatgaggttgattcatta

SEQ ID NO: 701118 - DNA, 631 bp, Homo sapiens
tgcttataaaagtaatataaatttgttttatcaacttcagaaagcagtaacaaattgaagaaaatttaagagctgaagttccaagctgcacccctgctcayagttatgatagtatggtaactatcataactatcctaaaattctacttccagataataaccattattagcattgtgtcagatacccttttgtttcttatatttatataaacacatttttaaacaaaaattttaccatatacctgctgtttcattttgtgtacacttttcacctaacaaacaatggatcaatgtctacccatgatactaaactttcctttatcacaagaatagaaaatagtttagttttaatccaaatgctgactttaatctattagaagtgcttggttgagaagcaaccaggagccatgtcttgagtcactgggaaagactgacataattgggcaacaatgtctaccatagacttgaggggatactcttgcagtatgtgccataaatatcttgtcccatatctatattgttttacctggttatattcatattttaaaaaataaacagaaatatcaagaacaacataaagaatcctcaaatgtagggccgggcacagaggctcacacctgtaatcccagcac

SEQ ID NO: 701119 - DNA, 1710 bp, Homo sapiens
tccaacccacagccaagtttgagagagccagtgatctggaacaggggctgcaaactttttctgtaaaggaccagagaatgacaacttttggcttcatgggcgatagggcctctgtcctgacygctcaactctgccatcatacggcaaaggtagccacagacagtacatgaacaaatgggcatggctgtgttccaggcagagccagcctcatgggcgttcagcctgtgcaagcaaagggcccacacttaaaaggacccctgtgcctagcttagttctctgccgttgctgtcttgacagtcttcataatttttgaacaaagggtctcacgttttcatattgcactgggttccacaaattctgtagccaatcctggttccaataaaactctgtttacgaaaacagacattgggtcacatttgccccgtgggccacagtttgccaaccaatcagtgatctagagccttgtgcccaaagttcagtccactcggagctggtatggagaccagcaaaagcagcagcagcagctggtggcttgttagaaaccctgagtctctcggccaggcatggtggctcacacctgtaaccccagcattttgggaggccaaggtgcgaggatcacttgagctcaggagttcgagaccagcctgggcaacatagcaagctcttgcctctactaaaaataaaagttaaaaattagctgagcatggtggtgtgtgcccatagtcccagcctgctcaggaggctgaggtgagaggatcatttaagcccagcagtttgaggctacagtgagccgtgatcatgccattacacttcagtctagatgacagagtgaggccatgtctcaaaataacgacaaaaaaaattaatcccaagtctcaccctaggcctgctgaaacagagtctgcagtttagcaagatccccagatgattcctctgcacagcaaagcttgagaagcactgcccaaagaaaggggtttaagaatggggttgaccacagaaatgaagtgggggtgttttaggcaggcattttcttaaagctggctccttgaagctctgtgtgtgcgtgtatgcacatacccatgtgtgtacaggtatgtggaaataaacaaaggtcttgatttgcttgaaacagagccaaactaaacaaaaagctttgtcctcaatataacctgcacacccattcatccattcactcatttacgcaccacacacattctcacacacatgcagtggtttacattcacacgcaggcacacgttcacaggcatacccgctcactcacctgcacatatacattctcaccaccattgctgcccgctgcaggaagcacagaggaaatgtggtgaggtgctggcagggccagccctgttacgagaggaaagaggcattcccggaggggatgccagcccccaggcctggaggggagggtgctgggatcagcagtttagcatgagtgggcggggggtggggggggtcagaagcaaagaccaaagggaccatagaggcaggaggagggcagagccgagtgagggcagcctggagcgctctgaaggtcctcaggcctgaacgtgaccccacgccaaccacatcacaggctgccagaaactaacattctaaggaacagtaagatctgtcctcccttagtgtcaaaggggagactgagacccagagaggagcagagacttgccaaggtcacactgctggcagacc

SEQ ID NO: 701120 - DNA, 1710 bp, Homo sapiens
tccaacccacagccaagtttgagagagccagtgatctggaacaggggctgcaaactttttctgtaaaggaccagagaatgacaacttttggcttcatgggcgatagggcctctgtcctgactgctcaactctgccatcatacggcaaaggtagccacagacagtacatgaacaaatgggcatggctgtgttccaggcagagccagcctcatgggcgttcagcctgtgcaagcaaagggcccacacttaaaaggacccctgtgcctagcttagttctctgccgttgctgtcttgacagtcttcataatttttgaacaaaggktctcacgttttcatattgcactgggttccacaaattctgtagccaatcctggttccaataaaactctgtttacgaaaacagacattgggtcacatttgccccgtgggccacagtttgccaaccaatcagtgatctagagccttgtgcccaaagttcagtccactcggagctggtatggagaccagcaaaagcagcagcagcagctggtggcttgttagaaaccctgagtctctcggccaggcatggtggctcacacctgtaaccccagcattttgggaggccaaggtgcgaggatcacttgagctcaggagttcgagaccagcctgggcaacatagcaagctcttgcctctactaaaaataaaagttaaaaattagctgagcatggtggtgtgtgcccatagtcccagcctgctcaggaggctgaggtgagaggatcatttaagcccagcagtttgaggctacagtgagccgtgatcatgccattacacttcagtctagatgacagagtgaggccatgtctcaaaataacgacaaaaaaaattaatcccaagtctcaccctaggcctgctgaaacagagtctgcagtttagcaagatccccagatgattcctctgcacagcaaagcttgagaagcactgcccaaagaaaggggtttaagaatggggttgaccacagaaatgaagtgggggtgttttaggcaggcattttcttaaagctggctccttgaagctctgtgtgtgcgtgtatgcacatacccatgtgtgtacaggtatgtggaaataaacaaaggtcttgatttgcttgaaacagagccaaactaaacaaaaagctttgtcctcaatataacctgcacacccattcatccattcactcatttacgcaccacacacattctcacacacatgcagtggtttacattcacacgcaggcacacgttcacaggcatacccgctcactcacctgcacatatacattctcaccaccattgctgcccgctgcaggaagcacagaggaaatgtggtgaggtgctggcagggccagccctgttacgagaggaaagaggcattcccggaggggatgccagcccccaggcctggaggggagggtgctgggatcagcagtttagcatgagtgggcggggggtggggggggtcagaagcaaagaccaaagggaccatagaggcaggaggagggcagagccgagtgagggcagcctggagcgctctgaaggtcctcaggcctgaacgtgaccccacgccaaccacatcacaggctgccagaaactaacattctaaggaacagtaagatctgtcctcccttagtgtcaaaggggagactgagacccagagaggagcagagacttgccaaggtcacactgctggcagacc

SEQ ID NO: 701121 - DNA, 1390 bp, Homo sapiens
aatacgtatatacaaaaaagtgttaagaatagttatttgggggaggttggaggaagttaatgagtaatttttttattgttttacatattgtctctttttcccaatttcctacagtaacatacattgcttttagaatcaaaaaagtaaaaaaaaaaaaaattaagattccctgcccaaggccaggtaggaccctctgagagggccagcctcattcatcccttagtgcagcaaactaccactatcttatttcaggcccttgtgtttccagacactggaaatgttttagacrtgtggatccctgtttttttgtttgtttgtttttttgtttttttgagagagggtctcagtctgtcaccgaggctggagtgtaatgatgtgatcactgctcactgcagcctcaacctcccaaggctcgaatgattgtcccacctcagcctgccaaacagttggaactactggtgcacaccactacacctggttaatttttgcatttttttttgtagagactgggttttgccatgttgcccaggctggtcttgaactgggatcaagtgatctgcccgcctcagcctcccaaagtgctggaattacaggcatgagccaccgtgcttggtcttggatgccatctttaatccatttcatgagtcagttgccaaatattaaaaatattaataggctccttcttaattgctgagtaaagcattaaagattctcaaagtgtcataatatgtattttgcatttagggaagcagtttaaatgttcaaattttaaaacaccaaaagctattatttttgtctttagtgccctgtagattaccctctgcattctaagaaggaaacatgcccactcttgtccctgcctagactttagcagttccttttttcttccaactaaacttatcactggtgctaatggtccctggtgcactgtgtgactttgaacaagttacttgacctccctggacttcagctacccctctataagggcctttctggcttgagattcttactctctctcagcttcagttccctcgtggcagccagctggcagttttcagcctccagatgcgttggctgcgcccttacatggtgcccctcaaatgttaggtcagttgatttcagcacccagagttccaagagaagtcagagaagcagcggcaccttccaggggcggtgctaaggtagatttggcatcctaaatggacaaatcattctcatctaaatctttatgggctcccagtgcctcattaaacatccaagcccccaaggctctgaatcacagctcctcttccctcacagccctccaggaggagttctgattaccccatcaattacatgctgtcggagggtatctgcaggcccttcatcttgcaacatttttatgggatat

SEQ ID NO: 701122 - DNA, 1390 bp, Homo sapiens
aatacgtatatacaaaaaagtgttaagaatagttatttgggggaggttggaggaagttaatgagtaatttttttattgttttacatattgtctctttttcccaatttcctacagtaacatacattgcttttagaatcaaaaaagtaaaaaaaaaaaaaattaagattccctgcccaaggccaggtaggaccctctgagagggccagcctcattcatcccttagtgcagcaaactaccactatcttatttcaggcccttgtgtttccagacactggaaatgttttagacgtgtggatccctgtttttttgtttgtttgtttttttgtttttttgagagagggtctcagtctgtcaccgaggctggagtgtaatgatgtgatcactgctcactgcagcctcaacctcccraggctcgaatgattgtcccacctcagcctgccaaacagttggaactactggtgcacaccactacacctggttaatttttgcatttttttttgtagagactgggttttgccatgttgcccaggctggtcttgaactgggatcaagtgatctgcccgcctcagcctcccaaagtgctggaattacaggcatgagccaccgtgcttggtcttggatgccatctttaatccatttcatgagtcagttgccaaatattaaaaatattaataggctccttcttaattgctgagtaaagcattaaagattctcaaagtgtcataatatgtattttgcatttagggaagcagtttaaatgttcaaattttaaaacaccaaaagctattatttttgtctttagtgccctgtagattaccctctgcattctaagaaggaaacatgcccactcttgtccctgcctagactttagcagttccttttttcttccaactaaacttatcactggtgctaatggtccctggtgcactgtgtgactttgaacaagttacttgacctccctggacttcagctacccctctataagggcctttctggcttgagattcttactctctctcagcttcagttccctcgtggcagccagctggcagttttcagcctccagatgcgttggctgcgcccttacatggtgcccctcaaatgttaggtcagttgatttcagcacccagagttccaagagaagtcagagaagcagcggcaccttccaggggcggtgctaaggtagatttggcatcctaaatggacaaatcattctcatctaaatctttatgggctcccagtgcctcattaaacatccaagcccccaaggctctgaatcacagctcctcttccctcacagccctccaggaggagttctgattaccccatcaattacatgctgtcggagggtatctgcaggcccttcatcttgcaacatttttatgggatat

SEQ ID NO: 701123 - DNA, 612 bp, Homo sapiens
ccacctgtaatgatcttctccacccagcagactcctattcatgttccaagattgagccacagagtaatctctgagatgccttctcaaccctctgaaccacatagagccctgcatctcctatccctttctctacgtctatactggcaatgttggctgacttcttggtgaatctctacttttcttggttcagggtaagcctggacacaatggagtgaaacatcccagaatataatcattttgtgacataaaacaaagatggctcaattctctgatgagagcagagacttgtttccataagaaccctctctgggagctcatttctcagctgagggctgcttgatgctataggatgrattcctttggctcatgctcaggcctttcatgggggctgggctgaggtcaggcaatggccaggtgggccccatggctgggcctgacctcatgaaagagcttatatttaatcttttgatgttatctcctgtctttacccatttttgtgttgctataaaggaatacctgaggcttggtaatttattttaaaaagaggttaatttggctcatggttctgcaggatgtacaagaaacatcgtgcttccttccccctctctggtt

SEQ ID NO: 701124 - DNA, 1211 bp, Homo sapiens
tagatatgcaaatacttaccactctgttacagttgcctgcagtgttcagtacagtcacatgctgtacaggtttgtagcctaggcgcaataggctataccatatagcctaggcacatagttctgccatctatgtttatgtaagtacactctatgatgttcacacaacaacaaartcacctaaggatgaatttctcagaacatatcccacaccgttaagcgatgcatgactgactgtatatcacaattttggtaattgtttcttcatatcttcatttatcagtatgttaggcaccttaaaaattggaagtggcccaggcttctctcagcctctgagaggccccacttgtctaggagtatgtttgcaaacctacacagtagctgtgtgaccttgggcaagttacttaaactgtctccctagcttcagtttcctcatgtactcatttacaaaatggtgaaaataactctattttgcagggtttcaaagatgagttaatgtgatgtaagtgaagtacctaacagttttagatacacaagtttctcagtatacagtaagtagatgcccagtaattggtagcagttgtcataattttttctggtgtatttctagctgttttgatccagaaacctttttttttttttttggagatggagtttcgctcttgttgccgaggctggagtgcaatggcatgatcttggctcaccgcaacctctgcctcccgggttcaagcgattctcctgcctcagcctcctgagtagctgggattacaggcatgcaccaccatgcctggctaattttgtatttttagtagagatggggtttctccatgttggtcaggctggtttagaactcccgacctcaggtgatctgcctgctttggacttccaaagtgctgggattacaggcatgagccaccatgcctggctaattttgtatttttagtagagatggggtttctccatgttggtcaggctggtctagaactcccgacctcaggtgatctgcctgctttggacttccaaagtgctgggattacaggcatgagccactgcacttggcctttttattttattattatttttttgagacaagatctgactgtcacctaggctggagtgcaatggtgcaatctctgcttactgcaacctctgcctcccgggcacaacccatcctcccacttcagcctcccaagtagctgggaccacaggtatgc

SEQ ID NO: 701125 - DNA, 1211 bp, Homo sapiens
tagatatgcaaatacttaccactctgttacagttgcctgcagtgttcagtacagtcacatgctgtacaggtttgtagcctaggcgcaataggctataccatatagcctaggcacatagttctgccatctatgtttatgtaagtacactctatgatgttcacacaacaacaaagtcacctaaggatgaatttctcagaacatatcccacaccgttaagcgatgcatgactgactgtatatcacaattttggtaattgtttcttcatatcttcatttatcagtatgttaggcaccttaaaaattggaagtggcccaggcttctctcagcctctgagaggccccactygtctaggagtatgtttgcaaacctacacagtagctgtgtgaccttgggcaagttacttaaactgtctccctagcttcagtttcctcatgtactcatttacaaaatggtgaaaataactctattttgcagggtttcaaagatgagttaatgtgatgtaagtgaagtacctaacagttttagatacacaagtttctcagtatacagtaagtagatgcccagtaattggtagcagttgtcataattttttctggtgtatttctagctgttttgatccagaaacctttttttttttttttggagatggagtttcgctcttgttgccgaggctggagtgcaatggcatgatcttggctcaccgcaacctctgcctcccgggttcaagcgattctcctgcctcagcctcctgagtagctgggattacaggcatgcaccaccatgcctggctaattttgtatttttagtagagatggggtttctccatgttggtcaggctggtttagaactcccgacctcaggtgatctgcctgctttggacttccaaagtgctgggattacaggcatgagccaccatgcctggctaattttgtatttttagtagagatggggtttctccatgttggtcaggctggtctagaactcccgacctcaggtgatctgcctgctttggacttccaaagtgctgggattacaggcatgagccactgcacttggcctttttattttattattatttttttgagacaagatctgactgtcacctaggctggagtgcaatggtgcaatctctgcttactgcaacctctgcctcccgggcacaacccatcctcccacttcagcctcccaagtagctgggaccacaggtatgc

SEQ ID NO: 701126 - DNA, 1211 bp, Homo sapiens
tagatatgcaaatacttaccactctgttacagttgcctgcagtgttcagtacagtcacatgctgtacaggtttgtagcctaggcgcaataggctataccatatagcctaggcacatagttctgccatctatgtttatgtaagtacactctatgatgttcacacaacaacaaagtcacctaaggatgaatttctcagaacatatcccacaccgttaagcgatgcatgactgactgtatatcacaattttggtaattgtttcttcatatcttcatttatcagtatgttaggcaccttaaaaattggaagtggcccaggcttctctcagcctctgagaggccccacttgtctaggagtatgtttgcaaacctacacagtagctgtgtgaccttgggcaagttacttaaactgtctccctagcttcagtttcctcatgwactcatttacaaaatggtgaaaataactctattttgcagggtttcaaagatgagttaatgtgatgtaagtgaagtacctaacagttttagatacacaagtttctcagtatacagtaagtagatgcccagtaattggtagcagttgtcataattttttctggtgtatttctagctgttttgatccagaaacctttttttttttttttggagatggagtttcgctcttgttgccgaggctggagtgcaatggcatgatcttggctcaccgcaacctctgcctcccgggttcaagcgattctcctgcctcagcctcctgagtagctgggattacaggcatgcaccaccatgcctggctaattttgtatttttagtagagatggggtttctccatgttggtcaggctggtttagaactcccgacctcaggtgatctgcctgctttggacttccaaagtgctgggattacaggcatgagccaccatgcctggctaattttgtatttttagtagagatggggtttctccatgttggtcaggctggtctagaactcccgacctcaggtgatctgcctgctttggacttccaaagtgctgggattacaggcatgagccactgcacttggcctttttattttattattatttttttgagacaagatctgactgtcacctaggctggagtgcaatggtgcaatctctgcttactgcaacctctgcctcccgggcacaacccatcctcccacttcagcctcccaagtagctgggaccacaggtatgc

SEQ ID NO: 701127 - DNA, 762 bp, Homo sapiens
ggcctaggataaaaaaccttcatctggtggggcgtggtgtttcacacctataatcccagccttttgggaggtcaaggcagacggatcacttgaggtcgaaagtttgagaccagcctgaccaacatagagaaaccctgtctctactaaaagtacaaaattagccaggcgtggtggctcatgcctacagtcccagttatgtgggaggctgaggcaggagaatcgcttgaacccgggaggtggaggttgcagtgagctgagatcgcaccattgcattccagcatgggcaacaagagtgaaactccatctcaaaaaaaraaaaacaaaaaacaaaaacaacaacaacaacaacaacaaactttcatctgagggagatttatgtttgattcttccatgcaactatgcaccaaatctattgagggcaacctgaaaccaagtctggccacaaacatcacagggttgcaacatcgctgggactttgtttttatctttactattacatctctggtccatttaatgccaaaagaaaaacaattacacaaaacaaaacaatgcaaaacaaaatgaacaaacaacatacatgactggaagcccttctgcatagactgttgcagtcaaggtgcatgtcgtcagatgtatatcaggttcatacttcttatgagtctataggcctttgagatcttaactcaatacagaaaatatttttgtcaaactccctccttgtgttagcatttaaccttcatttctcaccttctcaacctgtga

SEQ ID NO: 701128 - DNA, 762 bp, Homo sapiens
ggcctaggataaaaaaccttcatctggtggggcgtggtgtttcacacctataatcccagccttttgggaggtcaaggcagacggatcacttgaggtcgaaagtttgagaccagcctgaccaacatagagaaaccctgtctctactaaaagtacaaaattagccaggcgtggtggctcatgcctacagtcccagttatgtgggaggctgaggcaggagaatcgcttgaacccgggaggtggaggttgcagtgagctgagatcgcaccattgcattccagcatgggcaacaagagtgaaactccatctcaaaaaaagaaaaacaaaaaacaaaaacaacaacaacaacaacaacaaactttcatctgagggagatttatgtttgattcttscatgcaactatgcaccaaatctattgagggcaacctgaaaccaagtctggccacaaacatcacagggttgcaacatcgctgggactttgtttttatctttactattacatctctggtccatttaatgccaaaagaaaaacaattacacaaaacaaaacaatgcaaaacaaaatgaacaaacaacatacatgactggaagcccttctgcatagactgttgcagtcaaggtgcatgtcgtcagatgtatatcaggttcatacttcttatgagtctataggcctttgagatcttaactcaatacagaaaatatttttgtcaaactccctccttgtgttagcatttaaccttcatttctcaccttctcaacctgtga

SEQ ID NO: 701129 - DNA, 762 bp, Homo sapiens
ggcctaggataaaaaaccttcatctggtggggcgtggtgtttcacacctataatcccagccttttgggaggtcaaggcagacggatcacttgaggtcgaaagtttgagaccagcctgaccaacatagagaaaccctgtctctactaaaagtacaaaattagccaggcgtggtggctcatgcctacagtcccagttatgtgggaggctgaggcaggagaatcgcttgaacccgggaggtggaggttgcagtgagctgagatcgcaccattgcattccagcatgggcaacaagagtgaaactccatctcaaaaaaagaaaaacaaaaaacaaaaacaacaacaacaacaacaacaaactttcatctgagggagatttatgtttgattcttccatgcaactatgcaccaaatctattgagggcaacctgaaaccaagtctggccacaaacatcacagggttgcmacatcgctgggactttgtttttatctttactattacatctctggtccatttaatgccaaaagaaaaacaattacacaaaacaaaacaatgcaaaacaaaatgaacaaacaacatacatgactggaagcccttctgcatagactgttgcagtcaaggtgcatgtcgtcagatgtatatcaggttcatacttcttatgagtctataggcctttgagatcttaactcaatacagaaaatatttttgtcaaactccctccttgtgttagcatttaaccttcatttctcaccttctcaacctgtga

SEQ ID NO: 701130 - DNA, 762 bp, Homo sapiens
ggcctaggataaaaaaccttcatctggtggggcgtggtgtttcacacctataatcccagccttttgggaggtcaaggcagacggatcacttgaggtcgaaagtttgagaccagcctgaccaacatagagaaaccctgtctctactaaaagtacaaaattagccaggcgtggtggctcatgcctacagtcccagttatgtgggaggctgaggcaggagaatcgcttgaacccgggaggtggaggttgcagtgagctgagatcgcaccattgcattccagcatgggcaacaagagtgaaactccatctcaaaaaaagaaaaacaaaaaacaaaaacaacaacaacaacaacaacaaactttcatctgagggagatttatgtttgattcttccatgcaactatgcaccaaatctattgagggcaacctgaaaccaagtctggccacaaacatcacagggttgcaacatcgctgggactttgtttttatctttactattayatctctggtccatttaatgccaaaagaaaaacaattacacaaaacaaaacaatgcaaaacaaaatgaacaaacaacatacatgactggaagcccttctgcatagactgttgcagtcaaggtgcatgtcgtcagatgtatatcaggttcatacttcttatgagtctataggcctttgagatcttaactcaatacagaaaatatttttgtcaaactccctccttgtgttagcatttaaccttcatttctcaccttctcaacctgtga

SEQ ID NO: 701131 - DNA, 773 bp, Homo sapiens
cttaagtaatgtgttatgmtaaaatgttatgatgactacaatgccattaggcaataggagtttttagctccattaaaatcttatgaaaccattgtcatctatgtggttcatcactgactgaaacatcattacgtggcacgtgagtgtagacggtaatggaatgtgtgcacaagaacaccaggataaataggaaagaatgttcatagcagcattgttctcaagatctcaaactagaaatatccaagggtccatcaactgtagaaaggataaagattgtgttccaataatgcaaattaagaatgctataaaaatcaatggattatggctgaacaataaaagaatagggccaggtgtgatggctcacacttgtaagctcagcactttgggagcccaaggtgggagaatcacttgaggccagaaggttgaagcttgcagtgagcctcagtgatcatgccagtgaactccagcccaggcaatagaatgagaccctgtctcataaaaaaaaaaatgaacaaaacaaacaaaaaaagatgatttttacaaacataatatggagtgaaggaaacaaaatttaaaaagtatattaagtgtgtttcattcatataaagttaaactaaattatagatggttgaattccattaagtaaaaaatttttcaaagcaaagaaattattatcagcattattgttatctcagtccttttctattcacaaccagttccttccctccttttgtatcctctgtgaaaaatagccaagattcaagttttcttca

SEQ ID NO: 701132 - DNA, 773 bp, Homo sapiens
cttaagtaatgtgttatgataaaatgttatgatgactacaatgccattaggcaataggagtttttagctccattaaaatcttatgaaaccattgtcatctatgtggttcatcactgactgaaacatcattacgtggcacgtgagtgtagacggtaatggaatgtgtgcacaagaacaccaggataaataggaaagaatgttcatagcagcattgttctcaagatctcaaactagaaatatccaagggtccatcaactgtagaarggataaagattgtgttccaataatgcaaattaagaatgctataaaaatcaatggattatggctgaacaataaaagaatagggccaggtgtgatggctcacacttgtaagctcagcactttgggagcccaaggtgggagaatcacttgaggccagaaggttgaagcttgcagtgagcctcagtgatcatgccagtgaactccagcccaggcaatagaatgagaccctgtctcataaaaaaaaaaatgaacaaaacaaacaaaaaaagatgatttttacaaacataatatggagtgaaggaaacaaaatttaaaaagtatattaagtgtgtttcattcatataaagttaaactaaattatagatggttgaattccattaagtaaaaaatttttcaaagcaaagaaattattatcagcattattgttatctcagtccttttctattcacaaccagttccttccctccttttgtatcctctgtgaaaaatagccaagattcaagttttcttca

SEQ ID NO: 701133 - DNA, 1434 bp, Homo sapiens
gtgatctccacgaagaaacaggatagacccatcccccaaagttttgcttggaatgtcaagactgatgatgccacatacacactaagaggttaaggaaacagtttattactctcataatgagactttctcaggagagcagggcaagcagcaagcaggtccaaaartggtttgagagagtatgaaaagttgcctggcttgggttttttgtgattagggaaaggttaaggtgaaggttctcacacgtgggctagggcttaattgctttgaactcctggcttccaaagaaggagtacctgtgctttcttttcggcgtgctcaaatatggggcagaagaggcagagggagtggtgggaattgaaagaagccagcagtaaaacataaaaaatgaagtcagaatctttattataaattagaagtaaattctattggagaaaaatttccttagaaagagacaaaggatgagactacatcacagcaagaaaactatgtgtctaagagattggaagtgaaatttatagcctatttaagcaatactgtttcgaaagatacaatggaaattctctttcaaaaaggtagagtgaaatcaaatttgagtacctaacacatgatattggagggaagaggaatttaaactctctaaattaaataggtatataaagagattatgtagaagaaaatatgataaaatatattttttttcttttattcttccttttctctccttccatcttttaccattttaatgcaattttctcaatacattggcttgttttaattatcctctctattttcttttttcatttccttttagacaaatgttgatatgtgaacaaaagcaaatattggaagcatatagtttactatattacttatatatataagcatatagtttatagtctggtttttaaagtcctaatttaatttaataaaaattccatagtctttctcttaaccataccaaatgattatctttagtttttgtggattcttctaccttactttcattaagaaaaagctgtagcttttctctaaaatttctctgagacatggagtttggcaaaataatgccaccattcaaaacatccctggagatttcccaatttagagctgtagattggattttatattcacaagatttggtgcaagaaaataattatttttgaaatattgttacttctacaaataaaaatgtcttataatgatgttactgaaaattaaaagcttgtttttattaaaatccaaagaggaaataagataatgaatacttcttaaaatataattagcctagcttttttaaggacttggggattcatatttcaaatcataaatttgtgttaggaaatgaagtaaatgtactagttaggtacattatttttctttttatcttctttaatggatgcatctaaaaacatacctatgttacataaattgaaa

SEQ ID NO: 701134 - DNA, 1434 bp, Homo sapiens
gtgatctccacgaagaaacaggatagacccatcccccaaagttttgcttggaatgtcaagactgatgatgccacatacacactaagaggttaaggaaacagtttattactctcataatgagactttctcaggagagcagggcaagcagcaagcaggtccaaaagtggtttgagagagtatgaaaagttgcctggcttgggttttttgtgattagggaaaggttaaggtgaaggttctcacacgtgggctagggcttaattgctttgaactcctggcttccaaagaaggagtacctgtgctttcttttcggcgtgctcaaatatggggcagaagaggcagagggagtggtgggaattgaaagaagccagcagtaaaacataaaaaatgaagtcagaatctttattataaattagaagtaaattctattggagaaaaatttccttagaaagagacaaaggatgagactacatcacagcaagaaaactatgtgtctaagagattggaagtgaaatttatagcctatttaagcaatactgtttcgaaagatacaatggaaattctctttcaaaaaggtagagtgaaatcaaatttgagtacctaacacatgatattggagggaagaggaatttaaactctctaaattaaataggtatataaagagattatgtagaagaaaatatgataaaatatattttttttcttttattcttccttttctctccttccatcttttaccattttaatgcaattttctcaatacattggcttgttttaattatcctctctattttcttttttcatttccttttagacaaatgttgatatgtgaacaaaagcaaatattggaagcatatagtttactatattacttatatatataagcatatagtttatagtctggtttttaaagtcctaatttaatttaataaaaattccatagtctttctcttaaccataccaaatgattatctttagtttttgtggattcttctaccttactttcattaagaaaaagctgtagcttttctctaaaatttctctgagacatggagtttggcaaaataatgccaccattcaaaacatccctggagatttcccaatttagagctgtagattggattttatattcacaagatttggtgcaagaaaataattatttttgaaatattgttacttctacaaataaaaatgtcttataatgatgttactgaaaattaaaagcttgtttttattaaaatccaaagaggaaataagataatgaatacttcttaaaatataattagcctagcttttttawggacttggggattcatatttcaaatcataaatttgtgttaggaaatgaagtaaatgtactagttaggtacattatttttctttttatcttctttaatggatgcatctaaaaacatacctatgttacataaattgaaa

SEQ ID NO: 701135 - DNA, 681 bp, Homo sapiens
tacagatattttgatatattttgatatattataaaactgttttctaaagactctttttatttgtaatgctacccataaggtatggcagtactagataaaatatgtctgttttaacactgaatattgacatataacaatgtttcaaatttgatacatagtagctaacacattgtgtgcccacacatccatataccttccctcaagggggacaattaaaagtctcattcactaactgtatcctgcttatagmcattgatacctgtgaggttgcctgggtaaggttggatgtggctttttaaggttgagaaacctagaaagaaaaagaggtattttgctttcctgctggccccttcatccctgatacgcctacaaaactaacagaaatatgcaaacatagtaagtcctttctatccagaaatttgataagcattcactcctatttttccctaacttctttttaagtagtttaaaaatattaaggtcacttactataaattttgatacgggatatgaatatagaagttttcttaatataatattttttcaaagctgaccaagttatgccaatataatttgataatttattttcctttctagttttattctccctttgtctgtttttggtctttcagctcccttcccattcccaggtactccttaaacttccccaaattattcaca

SEQ ID NO: 701136 - DNA, 681 bp, Homo sapiens
tacagatattttgatatattttgatatattataaaactgttttctaaagactctttttatttgtaatgctacccataaggtatggcagtactagataaaatatgtctgttttaacactgaatattgacatataacaatgtttcaaatttgatacatagtagctaacacattgtgtgcccacacatccatataccttccctcaagggggacaattaaaagtctcattcactaactgtatcctgcttatagacattgatacctgtgaggttgcctgggtaaggttggatgtggctttttaaggttgagaaacctagaaagaaaaagaggtattttgctttcctgctggccccttcatccctgatacgcctacaaaactaacagaaatatgcaaacatagtaagtcctttctatccagaaatttgataagcattcactcctatttttccctaacttctttttaagtagtttaaaaatattaaggtcacttactataaattttgatacgggatatgaatatagaagttttcttaatataatattttttcaaagctgaccaagttatgccaatataatttgataatttattttcctttctasttttattctccctttgtctgtttttggtctttcagctcccttcccattcccaggtactccttaaacttccccaaattattcaca

SEQ ID NO: 701137 - DNA, 603 bp, Homo sapiens
ctatattgtgacagagaatcaaaggtgcatctaaagcctactatagcatctttgaaacaagaaagaaaagacaaaaaaacatatttttcagcagtgtttttcttcagggacatgaaagagagccataagcatgcctattgtaacaacagtatatgtgagctgtggttcaacctgggctcacaattcagaattattaaatactttcataacctagaggaaggggggcaagggtagctatagtttgcattaaaggaataaaattaacaaaaataaagctgtctacagaaaacrtgcgtgtatgagagtgccagtctctatataaatattattagatatgtttaattttatataatgtagataaaaataaatataaataaaatattcatcaagcatcttaagggatcatcatgcacacgctcagtttggaaaccactatattacataagagaaacgtattctttaagcactagcagatttttatatctagctattgaatatatgtgtatataatttatatatgttattccaatttggcagtataaatcagattgacaacaagataacattagtgagcatctttaatttgtagtaaagggttaataa

SEQ ID NO: 701138 - DNA, 702 bp, Homo sapiens
gtgctaaatatgccacatgatctaataatcttaatacttttaaaatgtagctagccatatacttaaacctgagagaatccctattgcacattggcatacaattaaaggaaaaaactatcataagaaaaacaattaataatatacttgataaagaaaatgttttttaaaaagtcaaagaaagtcaaagtactagcagttctagtatgacaaagatgtacacaagtgtgggatttcatatctcgctctagataactatgactttataaggaataacaataatgttatttttaaaaacatacttttataaatgcaagttaaattttatcaaatcctaatgttttgagagcatagaatgaatagttttagggcaacrtttctcaagtaaaatttcaaagtttggtagcttgacatacattttgaataattttatatggctaccgaacaaacacgtaaaacttttgtaaatatccctctattcccaggtgcttcttttaggaaaattacttcattgaatatttgaatattctgttgtgtctcagaatagttatatagtcatccctgtgaattttcagctctgaagataaatatcacatatgacaagctaactgatgtggtcctacttcaggatcaatcatttcacccagactctcaacagcctatattgtgacagagaatcaaaggtgcatctaaagcctactatag

SEQ ID NO: 701139 - DNA, 474 bp, Homo sapiens
gggggcagtgggcaagttatcaagggactaggaaatcaataaacaatgcagacaatctaattttcagcgatgcaggcataacatggaggtattgcgaataacttggagatatttatttcagtggtttggttaatattacagtaaattgagtcatacaaaatttttcatttctcagtgcatacaaaagcatgcagtagcattatgtctaaaataccaatgtatataccttaagttaaagtattttattgctaaaaagtactaacaatcatcagaaccttcaatgagctgtgatctttctgctatttgagggtcttgccttgatgttaatggctgctgactgagcaggaaggtggttgttgaagcttggggtgactgtggtatttttgtaaatgaaagaacaatgaagtttgctgcatggattggctctttctttcacrtgagatttctctgaagcatgcaatactatttgatagt

SEQ ID NO: 701140 - DNA, 1293 bp, Homo sapiens
cgaagggaatggacaacatactctcttttgttctctgtttttttttctttaaacaatcataagtttttaaaggtaggggctatgtttttgtattctttcaacaaatatttatttgttgcaaggtgctcttaggggttgggagcacagtgtgagcaaagcagatatggtccttgccctcagaggttagactgtggtggattatgtccatttgtctttgagtttctcctttagccctatccttagccttatcaagaaccttctcaatatgtgtttggtaagtgtttagaatagtttcttcctttccagtccagtctcttaatatatgtttcttccaatgatctattaatactatttgtgaacaaccaacacaaaagtaaatgaaagcttaattgacataagtgcagcccttccattgatccatgtccttcttttccttcatagtttagccaagttctacctctgctgtgatgccatccaagccaacagcaatgtctttctggctatttttttactcagttgatgtgacatattttgttctgttttttaaaaatgttattattggccaggcgtggtggctcacacctgtaatcccagcactttgggagaccgaggcgggcagatcatgaggtcaggagatcgagaccatcctggctaacacagtgaaaccctgtctctacaaaaaattagctgggcgtggtggcacgcgcctgtaatcccagctacttgggaggctgaggcaggagaatcacttgaacccgggaggcggaggttgcagtgagccaagattgtgccactgctctccagcctgggtgacagagtgagaatctgtctcaaaaaaaaaaaaaaaagttgttacttaatctttcatgtgtccttgccatccctcttagatgatttggggcaggaaaaaagctgaaatccagtggtcaaacctcagcatcttcattttatagagaagtcaggcctgtagaaattaaatgatgacaggttaataaaagaatcaggactggtatcgaagtgtctagactccaagattcctcttctttactcttcatgtgccatttctgagaggaggcaccagcagctgctgtgctctcaacttaaagtgggagtcttgtagccatgggtggtgaacagagggctgatgctaggactgaactaggcataatgggtaacaacagtggttagataatgcagaactaaaggttgmagcactttatcagttttaatttgacatatgaagcagttggaaaccattgtaggcttctgagaagaagctaaacatgagcaaat

SEQ ID NO: 701141 - DNA, 1053 bp, Homo sapiens
tgaaaagatatatcctacatagcacagaagttatgatatatatgctgttcccaaatttcctagaattctttaatcaacttttaggatgcygcctttcatgacttaaaactattcataaatgcatattttcattctataacacctttgggggtagtaaatcccattcacatctaaactacatgaggatgtactttcctcgtctgttataaatgctgtctttaaaaaatacaaagagatatagaatatattattcctccaattcttaaatgtacgcaaggacttggagcaagaggttgaaacccaatgagtgacacgtttaccagtccatatcgctttaatattttaggcatgtcacgcctttgcaagccaaagcacatctttaaaaatagtctgttttgtgtgacaacattgtctttccctaatgatgcagaaatgtcagctattttaagaacaaagaaactgatgaggtcaaacggctgacacatctgattttttaatctattatataaaatctcatattactaaatttacgagggtcctctagatacattttcaaaatgcttagttttggttgtaaagtagtatgttttctgaattctgatatatttcctattcttttaatcacgcacttttttgaattgtaaatgtattataaaatagatttttaaagtaaaaaagcttttttttttttttgggtcagcactgacaatggcctcatatagagctcttcttcagcacattcaatacttaatcttatcaattttattatgaagttaattaaactaatatgtatcaaacgtcatattaattatgttgaatactagctaagagttaagaaatgtaaggcatgtgtcctatcttcaaggagcttaatatagttggggaggcaactataaagaaatgagatgattggttcaacttatgaaatgagtcatagttttcattccagaagtatgactctaaacttaaaacgtgtgacaataatgaaaaataattcctaacatggtacataattatcaaatgctgtgagttcagaaaagatgtttctgagta

SEQ ID NO: 701142 - DNA, 1053 bp, Homo sapiens
tgaaaagatatatcctacatagcacagaagttatgatatatatgctgttcccaaatttcctagaattctttaatcaacttttaggatgctgcctttcatgacttaaaactattcataaatgcatattttcattctataacacctttgggggtagtaaatcccattcacatctaaactacatgaggatgtactttcctcgtctgttataaatgctgtctttaaaaaatacaaagagatatagaatatattattcctccaattcttaaatgtacgcaaggacttggagcaagaggttgaaacccaatgagtgacacgtttaccagtccatatcgctttaatattttaggcatgtcacgcctttgcaagccaaagcacatctttaaaaatagtctgttttgtgtgacaacattgtctttccctaatgatgcagaaatgtcagctattttaagaacaaagaaactgatgaggtcaaacggctgacacatctgattttttaatctattatataaaatctcatattactaaatttacgagggtcctctagatacattttcaaaatgcttagttttggttgtaaagtagtatgttttctgaattctgatatatttcctattcttttaatcacgcacttttttgaattgtaaatgtattataaaatagatttttaaagtaaaaaagcttttttttttttttgggtcagcactgacaatggcctcatatagagctcttcttcagcacattcaatacttaatcttatcaattttattatgaagttaattaaactaatatgtatcaaacrtcatattaattatgttgaatactagctaagagttaagaaatgtaaggcatgtgtcctatcttcaaggagcttaatatagttggggaggcaactataaagaaatgagatgattggttcaacttatgaaatgagtcatagttttcattccagaagtatgactctaaacttaaaacgtgtgacaataatgaaaaataattcctaacatggtacataattatcaaatgctgtgagttcagaaaagatgtttctgagta

SEQ ID NO: 701143 - DNA, 1417 bp, Homo sapiens
tgttacagagcaaaactgactaatatacccttctgtttgtgcaatcttgaacaaattacttatccccccctaaatctcaagtttccttctgtttttctttcttttttttttttttttgagactgatctcactctgttgtccaggctggagtgccacagcacgatctcagctccctgcaaattccacctcccggattcaagcgattctcctgctttggactcccgagtagctgggattacaggcacgtgccactatgtggggctaatttttgtatttttagtagagatggggtttcatcatgttggccaggctggtctcgaactcctgacctcaggtgatctgcccgccttggcctcccaaagtgctgggattataagtgttagccaccatgtctggctaaatctcaactttcttatcataagatggaggtaacagtagaatattctcattgtaaatgaaatcatgtacaggaattgttttaattatagatgtttaatatattatggtgttattctacatactgtcattctagtagagggaggggacaggagttcttcccccaaacctaagtcgactgaggctgtgtttccctctcagccaagtcaaacaagtggggctccaggaagataactcttcaagactgggggtgccggcaagcagaggccatgggcagctcactccctgccagatgcttacagagctgccaagtctgcagtctcctttgttcctgctctcaggacagcctggggtatggagaaggtgtgcccaggagcttggcctgggttcccaggagtatagtgtatatgtgagcgtagagaccggggtctgcttcccatctygaaagaatccgactggagcagctggtgatggctgcgcaggtagggactgtgatgcaattgcccaggagaaaaggatagggagtcccccacccatatgtttacagcacttagaaaacattgcagaggacctcattgatacctgtggctccgtgtgaacgaccatgataccaaagggaagcaggagccgtgacccgcccagggtgccctcagtgagggacatctcacccagagaaggtggtaagggcatggaccactggcagagcttgaagggaaatatggacatcccttttcttttcttttctttacttttcttttcttctctttttctttctttttctttctttttgacagagttttgctcttgttacccaggctggagggcaatggcgtgatctcagctcactgccacctccgcctcctgggttcaagcgattctcctgcatcagcctcctgagtagctgggattacaggcacctgccaccatgcccagctaatttttaggaaagatgcggtttcaccatgctggccaggctggtctcgaactcctgacctcaggtgatccacctgcctcagcctcc

SEQ ID NO: 701144 - DNA, 1518 bp, Homo sapiens
atcccagcactttgggaggccgaggtgggtggatcacgaggtcaggagatcgagaccatcctggctaacacggtgaaaccccatctctactaaaaatacaaaaaaatatggtgggcacctgtagtcccagctacttgggaggctgaggcaggagaatggtgtgaacctgggaggtggagcttgcagtgagccaagatcgcgccactgcattccagcctgggcgacagagcgagactcaaaaaaaaaaaagagtacttaggcataatgggtcatgcctgtacttctagcactttgggaggccgaggtggaaggatcacttaagaccaggagttcgagaccagcctaggcagcaaagcaagactctttctctacaaaaaaattaatcaggcatagtgacatgtgcctgtagtcctagctacttcggaggctgaggtaggaggatcacttgagcccaagaggttgaggctgcactgagccaagatcgtaccacttcactccagcccagacattagagcaagaccttgtctcgaaaaacaaaaaaaagaaagaaaagaaaaataatgctttttactaggatttttacaataygtgaaacgaattctatcttgagaacagagtattggtattgccagtaatattttaaagttcttttgcttccaaaaaggaaggtcaccttccctgtctataagaagtcagtgccaccttggcccacagaacctcagattctcacctctgccttcccagccagccttcccttcttgggcacttttctgggacacaggctgaatgcacccaaaaatgcatcagcaggcttgataaagaacgagttaaggctgggctcagtggctcacacctgtaatctcagcactttgggaggccgaggcaggtggatcacctgagttcagcagttctagaccagcctggccaacatggtgaaaccctgtctctactaaaaatataaaaaaattagccaggtgtggtagcacatgcctgtagacccagctattcaaaaggctgaggcacgagaattgcttgaacccaggaagcagaggttgctatgagccgaaattgcgccactgcactccagcctgggtgacagagtgagactctgtctcaaaaagaaaagaaaagaaaaagttgaaacaccaaccaaggtaagttcatctcccttctaagccacccatgagacactgctggggtgaagaagtcactgtctgtggcaaaaaccatttagatgagaagtggacacccttaaagcttccgcttccctctgcagtacagcaaagagttaagcatgataggttagtttctattattcccaccttgtgcagagattcaatgtcccctaccctactcacaggcctaaaatgctccccaggcacagccttctggtcccaggagagagatcccggctgctaaatgcgggtgcaaataaaatcagcaaagggcgccctggatgtgaaggaggtgtgggtgtcagcctgcaatccccacctgcagcaagatcatttttataaa

SEQ ID NO: 701145 - DNA, 601 bp, Homo sapiens
tgggaatctattgagtatctctagcctagtacattgctatgctctagggataagaagtgggtaagatataaattctatttcttttctttctttttttttttttttgagagggagtcttgctcttgtcrcccaggctggagtgcaatggcatgatctctgctcactgcaacctctgcttcccaggctctagtgattctcctgcctcagcctcctgagtagctgggactacaggggcatgccaccacacctggctcacttttgtatttttagtagagacagggtttcaccatattggccaggctggtctcaaactcctgacttcaagtgatctgccagcctcagcctcccaaagtgctgaaattataggcataagccactgtgcccggctgctatgtctgaggggttcatagtccagtgggggagatgaaaaaatgtcaacacattaagtaccatagtaaatagtagggaatgaacagaagaccatggaaacagaggaacttccagtctttctatgatgtagtcctgtcaaccctgtaccccgataaggcttgcaatcaaagagcataaagagaaacaagagagttgggtatatttttaaaaa

SEQ ID NO: 701146 - DNA, 601 bp, Homo sapiens
tgggaatctattgagtatctctagcctagtacattgctatgctctagggataagaagtgggtaagatataaattctatttcttttctttctttttttttttttttgagagggagtcttgctcttgtcgcccaggctggagtgcaatggcrtgatctctgctcactgcaacctctgcttcccaggctctagtgattctcctgcctcagcctcctgagtagctgggactacaggggcatgccaccacacctggctcacttttgtatttttagtagagacagggtttcaccatattggccaggctggtctcaaactcctgacttcaagtgatctgccagcctcagcctcccaaagtgctgaaattataggcataagccactgtgcccggctgctatgtctgaggggttcatagtccagtgggggagatgaaaaaatgtcaacacattaagtaccatagtaaatagtagggaatgaacagaagaccatggaaacagaggaacttccagtctttctatgatgtagtcctgtcaaccctgtaccccgataaggcttgcaatcaaagagcataaagagaaacaagagagttgggtatatttttaaaaa

SEQ ID NO: 701147 - DNA, 628 bp, Homo sapiens
ggaatgtagccaggacaatgagaggtgagaccagccggaggtccagggatccaggcaacaggtgctgatagctcccatgaaacagctctccttttctcttcagctgggttagattgattcacagaaacgatgggcaggactttggccgtcatctcacccaagtggctacttggtggaagggctcaagccccctctgcctatagactcctccctggctcccctccagataagagaacatccttgccttgcgctgttgggttcctgttcctctctgacagaactcgcctgtaacacttagcctggaggaaatccacacaattcatgtctagacaatttgtgtctaaatccgtggatktagatccaagattcaaggttccacctgccatgaaggcaacctcttctgctctcccagcacccgcttaagtcttcttttggggagggaagtggattcttgtgtgtgtctgacctgagtggagtgtgtgtgtttgtggggagttgcacccttttcagctttctgcactcagcccacatggggcgacacagtgagcatgtgaccttccttcacttacggaccccacagggccagacagtactcattctcctttaaggaccagttaaggccagagcc

SEQ ID NO: 701148 - DNA, 596 bp, Homo sapiens
tgcrgctcacagaaccatgacccaaataaacctattttctttataaattacccagcctctggtattcctttatagcaatacaaaatggactaagacagccactgtcacagcatcaagctccattagccaatgaatggccagaagcaaaaagacccatgttttccgttttggtcttttgttttgagatagagacaagtagaaaattgcaataatcctaaaaatcaacaagataaagagcaacagcaataggtgggcaaggaacatgaactataaatttgccacatgggaaacctccaaagcctaaaagaagagacacatcagtaaccaacaaacagataaatagacatgaagtgcatgacaatgattgtctatgaggggtagggaggaaatggagataaaatgagatgagcacaaaacaaaccaaccaaattggcctcatatggaccaatgacgataatacaccatgaaatgaagaagatgaccaatagaatccttttgatctgaggtaaacaaatacacaacactttaaaaaaaaatgagaggggaggggtttctggatatctgtctggtgcatattttaaagtaattatatttcc

SEQ ID NO: 701149 - DNA, 596 bp, Homo sapiens
tgcagctcacagaaccatgacccaaataaacctattttctttataaattacccagcctctggtattcctttatagcaatacaaaatggactaagacagccactgtcacagcatcaagctccattagccaatgaatggccagaagcaaaaagacccatgttttccgttttggtcttttgttttgagatagagacaagtagaaaattgcaataatcctaaaaatcaacaagataaagagcaacagcaataggtgggcaaggaacatgaactrtaaatttgccacatgggaaacctccaaagcctaaaagaagagacacatcagtaaccaacaaacagataaatagacatgaagtgcatgacaatgattgtctatgaggggtagggaggaaatggagataaaatgagatgagcacaaaacaaaccaaccaaattggcctcatatggaccaatgacgataatacaccatgaaatgaagaagatgaccaatagaatccttttgatctgaggtaaacaaatacacaacactttaaaaaaaaatgagaggggaggggtttctggatatctgtctggtgcatattttaaagtaattatatttcc

SEQ ID NO: 701150 - DNA, 566 bp, Homo sapiens
tgcctgcccctgggaactgaatgtctcggtataaaacccgattgtacatttgttcaattctgagataggagaaaaaccgccctatggtgggaggtgagacatgtttgcagcaatgctgccttgttattctttactccactgagatgtttgggtggagagaaacataaatctggcctacgtgcacatccagycatagtaccttcccttgaacttaattatgacatagattctattgctcacgtgtttgttgctgaccttctccttattatcaccttgccctcctactacattcctttttgctgaaataatgaaaataataatcaataaaaattggggtaactcagagaccggtgctggtgcaggtccttgctgtgctgagcgctggtcccctgggcccactgttgtttttctatactttgtgtcttatttcttttctcagtctctcatcccacccaacttgaaatacccacaggtgtggaggggcaggccaccccttcacagtgatgttgagcttttcttccaatgcttattggtcacatgtatgttttcttttgaaaattgccttt

SEQ ID NO: 701151 - DNA, 897 bp, Homo sapiens
tgcccagttcctgctaccaattttctgtatttgcctgttcttgcattgctataaagaactacttgagactgggtaatttataaagaaaagaagtttacttgtctcatggttccacaggttgtacaggaagcatggctggggaaacctcaggaaacttacaatcatggcagaaggccaagaggaaggaggtacatgttatgtggctagagcaggaggaagagggtgaagggggaggtgctacacacttttaaacaagcagatctcatgagaactcgctcactatcatgagaacagaaagggggaagtccaccctcatgatccaatcacatcccaccaggcccctcttccaacactgcagattacaattcaacataagtgggacacaaatccaaaccatatcagaaagacataactaaggagccttgatagagacaaaataattaatgggatggcactgcattaggaaaaaaggtgggagcattcctcttaaagaagagaatggccacctctcgtttgaggttgagtggttccaattatacttaagtttgtagactgagaatgggaagacaaggaggttatttactaatatctctgagtttctatatgaattaggatcttctgctgagagtaagagagtgtatgtcaagagtggttgaggatarcagtgaagttttggagagtaattgagtagaagaagatgctgatccagtgcagggattggtggacttgacagtttagtacttatctattcacaacttacaattctgtcttctttctcattggtttaaagttaagattatgaattgataattcataggagccagacagatcccatagatttgttttgtttgtttcctgttattttaataagccaagttttaaaatgaagagcttcat

SEQ ID NO: 701152 - DNA, 801 bp, Homo sapiens
tggtggaagtgttactatcttggaactaagacctccaaacctactaagtctaaacctatgagggcgatatgcacaaatttcccaagtgtcactggcaataatagtaagtgggacaacttctactttatcccttggtttctggacctacaaattccactgaattgrtattgtagcaccatacaatgaaattgcatttgagatgagccttgaaggagccagttgcaacaagtctataaggtgggaaggattcccagaggaaaaagcattgtaagagcaaaatattggaggcaggaaaatacacagtgtgtttcagaatccatttcattggagcactaggtacacataggactatattgagatgaaggctgcaaaggaaagttgggtcatatgatgttgtgctgaaaaggttgtatgtaattctgtaatccattcagggctttgagagacaaattggctgatgatagctgcactttagggagattggtggatcgccaggccttagtatagatttatatggttcaagagaaaaggtggttataatgatcctctgattttccatatgacaagcctgcaaccgcccaaaactttggtgtttttacctacatctatattcttttccccatctagtgccctagaaataattatcttccacactgggcaaaatttaagagctagtttaatgttttaggtaaatttacattaagattagggtagtcttgctttttccctgtaactgactgtatgtctaattatctaggcttctagcttcccctctttctttaaaaaaattaatagataaaa

SEQ ID NO: 701153 - DNA, 678 bp, Homo sapiens
tgtaaaaagaggatcattagataaatcaattgactgcaaaagcatttttcatgaagtcagccagttgattagtagtggcaatcccactgtggtaagtgtgctatttgtatttataaatattaacaatttatattttctgttacacaaatagcattatagcaagagtaatggatatctacataaaaatagtgaaaaagctatcagtcaagcaattttcatttgttcaggttttcttctagtctttttttttttttttcccttgtgacaagagttttgctcttgttgcccaggctggagtgcaatggcatgatcttggctcaccgcaacctctgccttccgggttcaagcaattctcttgcctcagcctcccaagtagctgggattacaggcatgtgccaccacacctggctaattttgtatttttagtagagacagggtttcttcatgttggtcaggctcgtctcaaactcccgacctcaggtgatccgcctgcttcwgcctcccgaagtgctggtattacaggtgtgagccactgcgcctggcctagtctttttaaatatatatgtacataatataaatgcagtgtactttgctttttcgtttgattctgtattttccatgttgccataaatattcataatcattattttaattgttataaaatattataagttaata

SEQ ID NO: 701154 - DNA, 1431 bp, Homo sapiens
tggacacatagaaaataattttacacataattgatatctagcaatcaaaacattttacaattaacattttaagaatatcactattaacattttaacagctttgaaaattacctctatgcatttttccttccgtaaatctaagacatcatttcattttaattataaattattcagtatgtattcctaagagatacaatattttttacartaacctcaatgctattatatgcctgatatgattaaaatgcatctttattatcacctaaatccatatcatgtttatattttccagttatctcaaaaatgtctttttaaagtattttggtttaaattgaaaagtgtccatcagttgcattcagttaatatctcttaacttcttaaaattgataatttttatttttaaagtagttttttacatgttatttgctagtcctgtggaattagccatcaactttgagctgtagaattttctatatctttaatttggcacctctattcctcatgatattatttacatttttactctatctctcatgtattcagtatacggtacttttagagacttgcttagactcaagattaagttttttggcaagaccacattatagctggagctgtggaattgttaatataacactaggaagtacataagttctggctgtctgatatggtttggctctgtcttcctacccaaacctcttcttgcattgtaatccccataatccctacatgtcaagggagagaccaagtggagataactggatcatggaggcagtttcccccatgctgttctcataacagtgagtgagttctcacgagatctgatggttttataagtggttgccaagttcctccttcagttattctcattcctgccaccttgtgaacaagtttcctacctcccctttgccttccactgtgattgtaagtttcctgaggtttccccagccatatggaactgtgagtcaattaaacttctttcgtttatacattatccagtctcagaaagttctttatagcagtgtgaaaatgaactaatacactgtctcaccttagtaatgtttaaaactgacacttggattcaagtgtgggcagctggatccatctattatgatatgctccaccatgctttcaagtttctcaattaactattatttcctttgaatacctcaatggaatttcttgttttctagagtacatgataaggtgacgttgtaagttttttattccggcatttgttgttctgtaagaagctgtggttccttttagtaagaaaagcttttaaagatcccaacctagccagtagagttactcgttgttagtgatttgttactacttttaagactttatagtgggcagagattgaaaatatgtattcttcagaaagaaattaattataattaatattgagtttatactatttaaatatca

SEQ ID NO: 701155 - DNA, 1431 bp, Homo sapiens
tggacacatagaaaataattttacacataattgatatctagcaatcaaaacattttacaattaacattttaagaatatcactattaacattttaacagctttgaaaattacctctatgcatttttccttccgtaaatctaagacatcatttcattttaattataaattattcagtatgtattcctaagagatacaatattttttacagtaacctcaatgctattatatgcctgatatgattaaaatgcatctttattatcacctaaatccatatcatgtttatattttcmagttatctcaaaaatgtctttttaaagtattttggtttaaattgaaaagtgtccatcagttgcattcagttaatatctcttaacttcttaaaattgataatttttatttttaaagtagttttttacatgttatttgctagtcctgtggaattagccatcaactttgagctgtagaattttctatatctttaatttggcacctctattcctcatgatattatttacatttttactctatctctcatgtattcagtatacggtacttttagagacttgcttagactcaagattaagttttttggcaagaccacattatagctggagctgtggaattgttaatataacactaggaagtacataagttctggctgtctgatatggtttggctctgtcttcctacccaaacctcttcttgcattgtaatccccataatccctacatgtcaagggagagaccaagtggagataactggatcatggaggcagtttcccccatgctgttctcataacagtgagtgagttctcacgagatctgatggttttataagtggttgccaagttcctccttcagttattctcattcctgccaccttgtgaacaagtttcctacctcccctttgccttccactgtgattgtaagtttcctgaggtttccccagccatatggaactgtgagtcaattaaacttctttcgtttatacattatccagtctcagaaagttctttatagcagtgtgaaaatgaactaatacactgtctcaccttagtaatgtttaaaactgacacttggattcaagtgtgggcagctggatccatctattatgatatgctccaccatgctttcaagtttctcaattaactattatttcctttgaatacctcaatggaatttcttgttttctagagtacatgataaggtgacgttgtaagttttttattccggcatttgttgttctgtaagaagctgtggttccttttagtaagaaaagcttttaaagatcccaacctagccagtagagttactcgttgttagtgatttgttactacttttaagactttatagtgggcagagattgaaaatatgtattcttcagaaagaaattaattataattaatattgagtttatactatttaaatatca

SEQ ID NO: 701156 - DNA, 1525 bp, Homo sapiens
aatagctgggaatacaggtgcgcaccaccacacccggctaattgttattagagatgaggtttcaccatactggcctgggtggtactgaactcctaacttcaagtgatccctgccacttctgcctcccaaagtgctggggttacaggtatgagccactgtgcccagtcttatttactccctcttcatgaagatctttctttcctgaaaatattggtgattattattttagatgtaagtctgtcttacattgttagagagaatcattctcagataatttttctcatgtcaaatgcaaagaggagaggtactgtggcttaaaaaggccaaattgattggcaactcaaagggacagtgcaacagaatctgagtcaggtcatccacttacaaagagccaaggcatgtaggatcatttctgagtgtctagctgtcatgatttcagttcttgctactgactttagacatctaaaaacacaaaccataatcratttatgagtcaaaactatgatgcaatgaaaataactattaacataattaaaaatccaggtctaaaaagggttcctattcctgaaggtaaccaatcaaataaatcatgtaaggggtttgtctttctaatgctttgtagcaattgagccttttgagtgatccttttgaactgagtttccacttatcatcctgggcaagatcgacataactgggtgcagatcagattcagttggagatctctataggtggaagacatccacttagctggagctacattttcttaactaaaaaatgtgagtccatgagtgtatgcctttgagtttagctgcacaagttttggtttttaatacctggtatggtcacttcaaatgtggtcgcaaggattcctttatttaacagcatttctaatacacaaaatccccaggtcaaaggccatgatctttgatgtctttatctcccaggtcctcaatgttaaagaatcttaaatcaatttaaatattttttagtgataagttatataagactttggcaataatgaagaatattaactttaagctggtttgaaggctcttaaatccaggaatgtgggtcttcctgttattatttcaaaaggagaaagctgatgttttccaacatagtagaacataagttaagtaataccaatgaaagattattaggccagggaagtttcaaggtttctataactttattaatttttttttaattccatttgtacattccaccagttcagaggactaaaggtcgcatgcaaaattgaaatgctgaacagttggccataggttataaataaactgaattatttgaccaataaaatgggttcctaggtctctgcaaaactttaaagaaactccccaagaaagaataggacaagacttaaaatggccatggttaaagataaaattgatgaagcaatttggtcattttctttttttgtgtgctatcattcacaataacaataatgataatcattattattattgataatatttaccaagacgcattagatttttaggaatttcat

SEQ ID NO: 701157 - DNA, 949 bp, Homo sapiens
tgtcccacatgcaggagcctttcgctggtctcagccagtctcttgccaagtaagctgcctcaaacactctccttacttacttctggtgcatcctgtcatttctcttgtgaatcctagcagatctgtttgaaatgtgagtacctacttactattctcgttccttttagtggaggaccatattctacctgtatctagtccgccatctatctatcatgtgtttgaatatttgcttttttttttttttttttttttaagagaaggctcgctctgtcgcccaggctggagtgcagtggcgcaatctcggctcactgcaagctcagcctccagggttcacgctattctcctgcctcagcctccggagtagctgggactacaggcgctcactacctcgcccggctaattttttgtatttttactagagacgaggtttcaccgtgttagccaggatggtctcgatctcctgacctcgtgatccrcccgtctcggcttcccaaagtgttgggattacaggcgtgagccaccgcgcccggacgaatatttgctcttcaacaattgccttgaagcacagaggtgagtaattgaggatttcagtctttatgcttatgagacagagagagagagcaagtgagtgacagacagagagagaaaggaaagcacagatgataatgtgatatttggtaatttaaaattttgtattttttgactgattggcttctatgtttttagatgtggctatcagtgtgttgaataggaatccttattataagtggtcattgttcaagtgaaggaaagaaaaataagtcatgcgataaaactcttcggctgtacaaaacctagaaaatcttgtaagtaacagtttctactccaaaacaaaaggttattttcagtaaatcacacattgtgaagattttgatcacacataatccctacaggaacatttaagcatacc

SEQ ID NO: 701158 - DNA, 949 bp, Homo sapiens
tgtcccacatgcaggagcctttcgctggtctcagccagtctcttgccaagtaagctgcctcaaacactctccttacttacttctggtgcatcctgtcatttctcttgtgaatcctagcagatctgtttgaaatgtgagtacctacttactattctcgttccttttagtggaggaccatattctacctgtatctagtccgccatctatctatcatgtgtttgaatatttgcttttttttttttttttttttttaagagaaggctcgctctgtcgcccaggctggagtgcagtggcgcaatctcggctcactgcaagctcagcctccagggttcacgctattctcctgcctcagcctccggagtagctgggactacaggcgctcactacctcgcccggctaattttttgtatttttactagagacgaggtttcaccgtgttagccaggatggtctcgatctcctgacctcgtgatccacccgtctcggcttcccaaagtgttgggattacaggcgtgagccascgcgcccggacgaatatttgctcttcaacaattgccttgaagcacagaggtgagtaattgaggatttcagtctttatgcttatgagacagagagagagagcaagtgagtgacagacagagagagaaaggaaagcacagatgataatgtgatatttggtaatttaaaattttgtattttttgactgattggcttctatgtttttagatgtggctatcagtgtgttgaataggaatccttattataagtggtcattgttcaagtgaaggaaagaaaaataagtcatgcgataaaactcttcggctgtacaaaacctagaaaatcttgtaagtaacagtttctactccaaaacaaaaggttattttcagtaaatcacacattgtgaagattttgatcacacataatccctacaggaacatttaagcatacc

SEQ ID NO: 701159 - DNA, 949 bp, Homo sapiens
tgtcccacatgcaggagcctttcgctggtctcagccagtctcttgccaagtaagctgcctcaaacactctccttacttacttctggtgcatcctgtcatttctcttgtgaatcctagcagatctgtttgaaatgtgagtacctacttactattctcgttccttttagtggaggaccatattctacctgtatctagtccgccatctatctatcatgtgtttgaatatttgcttttttttttttttttttttttaagagaaggctcgctctgtcgcccaggctggagtgcagtggcgcaatctcggctcactgcaagctcagcctccagggttcacgctattctcctgcctcagcctccggagtagctgggactacaggcgctcactacctcgcccggctaattttttgtatttttactagagacgaggtttcaccgtgttagccaggatggtctcgatctcctgacctcgtgatccacccgtctcggcttcccaaagtgttgggattacaggcgtgagccaccgcgcccggacgaatatttgctcttcaacaattgccttgaagcacagaggtgagtaattgaggatttcagtctttatgcttatgagacagagagagagagcaagtgagtgacagacagagagagaaaggraagcacagatgataatgtgatatttggtaatttaaaattttgtattttttgactgattggcttctatgtttttagatgtggctatcagtgtgttgaataggaatccttattataagtggtcattgttcaagtgaaggaaagaaaaataagtcatgcgataaaactcttcggctgtacaaaacctagaaaatcttgtaagtaacagtttctactccaaaacaaaaggttattttcagtaaatcacacattgtgaagattttgatcacacataatccctacaggaacatttaagcatacc

SEQ ID NO: 701160 - DNA, 949 bp, Homo sapiens
tgtcccacatgcaggagcctttcgctggtctcagccagtctcttgccaagtaagctgcctcaaacactctccttacttacttctggtgcatcctgtcatttctcttgtgaatcctagcagatctgtttgaaatgtgagtacctacttactattctcgttccttttagtggaggaccatattctacctgtatctagtccgccatctatctatcatgtgtttgaatatttgcttttttttttttttttttttttaagagaaggctcgctctgtcgcccaggctggagtgcagtggcgcaatctcggctcactgcaagctcagcctccagggttcacgctattctcctgcctcagcctccggagtagctgggactacaggcgctcactacctcgcccggctaattttttgtatttttactagagacgaggtttcaccgtgttagccaggatggtctcgatctcctgacctcgtgatccacccgtctcggcttcccaaagtgttgggattacaggcgtgagccaccgcgcccggacgaatatttgctcttcaacaattgccttgaagcacagaggtgagtaattgaggatttcagtctttatgcttatgagacagagagagagagcaagtgagtgacagacagagagagaaaggaaagcacagatgataatgtgatatttggtaatttaaaattttgtattttttgactgattggcttctatgtttttagatgtggcyatcagtgtgttgaataggaatccttattataagtggtcattgttcaagtgaaggaaagaaaaataagtcatgcgataaaactcttcggctgtacaaaacctagaaaatcttgtaagtaacagtttctactccaaaacaaaaggttattttcagtaaatcacacattgtgaagattttgatcacacataatccctacaggaacatttaagcatacc

SEQ ID NO: 701161 - DNA, 591 bp, Homo sapiens
tttccaaagactaagacctcaatatagatatgtcataaaagrgcaaccaagcagtgccaaacattggggggaaaggataacaaaagaagatacagtttcagtaaccaagtaaaaagacacaaccaatatgaggattgcccctttaagatgcttcttcatcaaagtgaaaaccacattctctgggattatggtcccacaggaccattagctttgaccaccatccctaatgctcctcctcaagggtgcaatgaaatagaaagggggaaaagtaccacgaaagataatttaacagataaatctctggagaaagtttcattcaaaaactgaagaattagagacaaaagtatttttttcaaacactacttcatgttatttgtattaaagctcagagtaaagtttttggacccctgagtaaggctgaccccctaaagggaagcacaatgactgacaccagaaaggcttccgataaatggttattgacttgaatttctgcctagtttgaggaaaagaggatgcagacaaagaggagtccctggactggtgcaagaccactttggaaaacagtttgaaactttcttttatatatatata

SEQ ID NO: 701162 - DNA, 1583 bp, Homo sapiens
cccaagcagtacaatgcacagagaattgggacatattatcacaggcattggcctggcttgggtttggcagattgatcatattggacctttaacacccagctgtggtttctgctggtgcttcatggcagttgacacttactgttgatatgaaactgccaaccccttacagcatgaggatgctggtgccaccatagtcatctcagagaaagatctttaccatatgtttgagtcccctagtggactccaatcagaccagggcacttcctttacagcacaacacataacaatgggcacaatcccatggcataggctgaacctatcatgctccataccacccacacactaatggagcccttgaagagtggcatggaagactaagagaattaaagaagggacaccagaaagcgttattagcaagatgctgtctgcctcactaggaccatttggatgttcagtacttcattcctgcgaaagggaagcatgcccttccaacacgttttggaataccgagcgtggcaggggtggaagacctggcagttgtccagttaggaacctgaggaaccccagtatacacaatcactccttatttttttcccctctggaatgctcttcctagggtggtttgtggtcctgcagcagttgtacctgacacaggccccccagctctgaacccatagaagatgtcttgggctcctacttctagtggttggcactgctgtgatccatgctattccatgcagagggaatctcacttgggattggcagttgggtcttcctgtttggcatttttgtgcagattttagagctaacacttcgtggtttcctcctctccagaattaatttccagccactactgaagccttgaactttgacctctgcctcccaaatttcagtaacattgctgttttcttcttaggctctattcccagacttggcaaatattggaaatttctcttaggaggaaatttgggtaaatatggcagttacctcatttgagtcccttctttcaagggtcatgttccatctagtttttgtctgctttgcttgttcttcattcctttaaatatttcccttacccttaccttaaaacaacttgtgtaattattatcatcaggaggtttaatctgacacaaagtgatagtttcatgattggaagtggcactcattgattaggatgtaagtggtwcattgcacttggagaaataagacaggactttaaaatttggcatgataaattatttagtttctcaagtaaatatgagacattaaagtatttttgtgtttgaattaacttcagttacaggattgatgccattttgaacatgcatgaaaagctggaaagcacatggcttgtggacttctggttcctttggcagtaaagagcactttgaggacagcaacctgtccccagtgtagagatgaaatgtacttgtaagacataatgttaacacttgaaagctgccttccaatctgcagccattaagagtttgcaattctcagtctgttggaatgcatttccagctagtgcctgccaagaaacatgggtcagattctcagaagactgagacatttggtgccaccca

SEQ ID NO: 701163 - DNA, 1583 bp, Homo sapiens
cccaagcagtacaatgcacagagaattgggacatattatcacaggcattggcctggcttgggtttggcagattgatcatattggacctttaacacccagctgtggtttctgctggtgcttcatggcagttgacacttactgttgatatgaaactgccaaccccttacagcatgaggatgctggtgccaccatagtcatctcagagaaagatctttaccatatgtttgagtcccctagtggactccaatcagaccagggcacttcctttacagcacaacacataacaatgggcacaatcccatggcataggctgaacctatcatgctccataccacccacacactaatggagcccttgaagagtggcatggaagactaagagaattaaagaagggacaccagaaagcgttattagcaagatgctgtctgcctcactaggaccatttggatgttcagtacttcattcctgcgaaagggaagcatgcccttccaacacgttttggaataccgagcgtggcaggggtggaagacctggcagttgtccagttaggaacctgaggaaccccagtatacacaatcactccttatttttttcccctctggaatgctcttcctagggtggtttgtggtcctgcagcagttgtacctgacacaggccccccagctctgaacccatagaagatgtcttgggctcctacttctagtggttggcactgctgtgatccatgctattccatgcagagggaatctcacttgggattggcagttgggtcttcctgtttggcatttttgtgcagattttagagctaacacttcgtggtttcctcctctccagaattaatttccagccactactgaagccttgaactttgacctctgcctcccaaatttcagtaacattgctgttttcttcttaggctctattcccagacttggcaaatattggaaatttctcttaggaggaaatttgggtaaatatggcagttacctcatttgagtcccttctttcaagggtcatgttccatctagtttttgtctgctttgcttgttcttcattcctttaaatatttcccttacccttaccttaaaacaacttgtgtaattattatcatcaggaggtttaatctgacacaaagtgatagtttcatgattggaagtggcactcattgattaggatgtaagtggtacattgcacttggagaaataagacaggactttaaaatttggcatgataaattatttagtttctcaagtaaatatgagacattaaagtatttttgtgtttgaattaacttcagttacaggrttgatgccattttgaacatgcatgaaaagctggaaagcacatggcttgtggacttctggttcctttggcagtaaagagcactttgaggacagcaacctgtccccagtgtagagatgaaatgtacttgtaagacataatgttaacacttgaaagctgccttccaatctgcagccattaagagtttgcaattctcagtctgttggaatgcatttccagctagtgcctgccaagaaacatgggtcagattctcagaagactgagacatttggtgccaccca

SEQ ID NO: 701164 - DNA, 1583 bp, Homo sapiens
cccaagcagtacaatgcacagagaattgggacatattatcacaggcattggcctggcttgggtttggcagattgatcatattggacctttaacacccagctgtggtttctgctggtgcttcatggcagttgacacttactgttgatatgaaactgccaaccccttacagcatgaggatgctggtgccaccatagtcatctcagagaaagatctttaccatatgtttgagtcccctagtggactccaatcagaccagggcacttcctttacagcacaacacataacaatgggcacaatcccatggcataggctgaacctatcatgctccataccacccacacactaatggagcccttgaagagtggcatggaagactaagagaattaaagaagggacaccagaaagcgttattagcaagatgctgtctgcctcactaggaccatttggatgttcagtacttcattcctgcgaaagggaagcatgcccttccaacacgttttggaataccgagcgtggcaggggtggaagacctggcagttgtccagttaggaacctgaggaaccccagtatacacaatcactccttatttttttcccctctggaatgctcttcctagggtggtttgtggtcctgcagcagttgtacctgacacaggccccccagctctgaacccatagaagatgtcttgggctcctacttctagtggttggcactgctgtgatccatgctattccatgcagagggaatctcacttgggattggcagttgggtcttcctgtttggcatttttgtgcagattttagagctaacacttcgtggtttcctcctctccagaattaatttccagccactactgaagccttgaactttgacctctgcctcccaaatttcagtaacattgctgttttcttcttaggctctattcccagacttggcaaatattggaaatttctcttaggaggaaatttgggtaaatatggcagttacctcatttgagtcccttctttcaagggtcatgttccatctagtttttgtctgctttgcttgttcttcattcctttaaatatttcccttacccttaccttaaaacaacttgtgtaattattatcatcaggaggtttaatctgacacaaagtgatagtttcatgattggaagtggcactcattgattaggatgtaagtggtacattgcacttggagaaataagacaggactttaaaatttggcatgataaattatttagtttctcaagtaaatatgagacattaaagtatttttgtgtttgaattaacttcagttacaggattgatgccattttgaacatrcatgaaaagctggaaagcacatggcttgtggacttctggttcctttggcagtaaagagcactttgaggacagcaacctgtccccagtgtagagatgaaatgtacttgtaagacataatgttaacacttgaaagctgccttccaatctgcagccattaagagtttgcaattctcagtctgttggaatgcatttccagctagtgcctgccaagaaacatgggtcagattctcagaagactgagacatttggtgccaccca

SEQ ID NO: 701165 - DNA, 617 bp, Homo sapiens
aatcatgctgctataaagacacatgcacacgtatgtttattgcagcactattcacaatagcaaagacttggaaccaacccaaatgtccaacaatgatagactggattaagaaaatgtggcacatgtacaccatggaatactatgcagccataaaaaatgatgagttcatgtcctttgtagggacatggatgaaattggaaatcatcattctcagtaaactattgcaagaacaaaaaaccaaacaccacatattcccactcataggtgggaattgaacaatgagatcacatggacacaggaaggggaacatcacactctggggactgttgtggggtggggggaggggggagggatagcaytgggagatatacctaatgctagatgatgagttagtgggtgcagcacaccagcatggcacatgtatacataagtaactaacctgcacaatgtgcacatgtaccctaaaacttaaagtataataaaagaaaaaaaaaataagtaccccacccccccaaaaaaagagtaatggctactcagtatcattaaaaatatctataaagcaattattgaaaatggaagctatgtatgtatgcattattggtaaataaaaggtgatg

SEQ ID NO: 701166 - DNA, 617 bp, Homo sapiens
aatcatgctgctataaagacacatgcacacgtatgtttattgcagcactattcacaatagcaaagacttggaaccaacccaaatgtccaacaatgatagactggattaagaaaatgtggcacatgtacaccatggaatactatgcagccataaaaaatgatgagttcatgtcctttgtagggacatggatgaaattggaaatcatcattctcagtaaactattgcaagaacaaaaaaccaaacaccacatattcccactcataggtgggaattgaacaatgagatcacatggacacaggaaggggaacatcacactctggggactgttgtggggtggggggaggggggagggatagcactgggagatatacctaatgctagatgatgagttagtgggtgcagcacaccagcatggcacatgtatacataagtaactaacctgcacaatgtgcacatgtaccctaaaacttaaagtataataaaagaaaaaaaaaataagtaccccaccccccmaaaaaaagagtaatggctactcagtatcattaaaaatatctataaagcaattattgaaaatggaagctatgtatgtatgcattattggtaaataaaaggtgatg

SEQ ID NO: 701167 - DNA, 769 bp, Homo sapiens
cactgcctggatacttgatgatattaaaggattattattgtgaacagcagttgaacatgggtcagttggtcctgagagatgggtgagtgccattccgaaaggacctgcaatggcctccagtcccttcagctgatagaaagggagtcgggttcagatcccagaatccagaatgttcttaaaaaaaaaaaagaaaaaaaaaaggaaagaattattgttaagttgttgaagttgaacatggtatagtgagaatgtttttatttatttatttatttatttatttactgaggtggagtctgtctctgtcacccaggctgcagtgcagtggcgagatctcggctcaccacaacctccacttcccaggttcaagagattctcctgcctcagcctcccaagtagctgggattacaggtgcccgccaccatgcctrgctaactttttcttcttagtagaaacggggtttcactatgttggccaggctggtctcaaactcctgacctcaggtgatccacttgcctcggcctcccgaagtgctgggattacaggcatgagccaccgtgcccagccgagactgtttttaaaaagacttcatcttttagatttatatatagtgaactctttatggataaaataacgtaatgtttggcatttacttccaaataattggtggagaagaagaaagtgggtgggaatgctgatgaaacaagatttgaaaattattgaatctgggacaagggtacatggggtttattatactcttaaattttcctta

SEQ ID NO: 701168 - DNA, 1869 bp, Homo sapiens
tgtaatcataccttaaaataatagctaaaaatgttatttatgtaatgctccattactttaatttatatgtatcatcaaaagttctaaattgtatgttattcaaagacatttcagggaaagtgtcttaaaagttcagtcttaggaaaggtgtcttcctcttttttgcagctcggtgctgattatcacaactgtttggtgacctacttcactgacctgtgaggattccttcccttcargtactggattcttgatctttctgcatcatcaaggtcctaattgcaatgaattacactcttgcttaaaaaaaagctttataaatgtaaaactttctcatataaacatctttttatgtaatgatcattatttctgacatctccaattgaagtacttgataacttaagcaaaattaagatgtttgatattcatgatgtcaagagatttatagtagtcatttctaaatcttcaaaactatgtaaaaaagaaagggctcattttgtatgtataagaccaaatataatcttgagcagtatactgattatttttggaataaggtaaaatttggaaagccaaattttttttcctatataataagtcaatttgagctttcagttacccaacagattgctccagcaataattggtaattttataattaacttctgttgtttgtagcgagtgactaattctgtaaagtgctgtgagagacgagataaagagtctttaaaacattattaattgaaataggattggaggaatacattatacatttgctatgtaagtttttgaaatagctttacatatgttattataaattgcattcagcaagtagttctgacttttgtaatgtgcaaatgacattcagctgtaggaactccagcttcttaagatttttgctgataatttagagcagtggctgcacagcaaaatcactcaggagctctgaaaaaaataactcgtcttccagagattttgattttgtttttctgcagtgaggaaaatgtatctgtaattttataagctcttacaggtaattctaatgactagcttaaaggattttgaatgtcactatcttgaaggattttgaatattacacaaatagggcataacttggaaatagcaatggactgtgcagtgtaccagatcggtgtccatattgtcagaaaaaaattgagactccttctaaaaatgcatttaagagccaggtgtggtggcttgagcctgtagtctcaactactcaggcggctgaggtagtaggatggcttgagctcaggagttctaggctatagtgcacagtgatcacacctgtgaataaccactgcacgccagcctgggcaacatggtgagaccttgtctcttaaaatacaatgagtttcttaccagtctaatctaactccagtgtggtgagggggtgggactagaccttgaccacagtgcccaagtagataggaaatgaatgttgattgaatatgtgagtgagtgaagagttatgcttcattcacgacagcagatgcttaatccatatcagagaagtgaaactttacttttaaaacctgccaagcaaaaagaaagcacaatagctcaccataacttgttctgtaaagccttttgtacattccaaagcactttcacattaacttttctcattcatacatttcaaattttaacaatacatatagccaggaagatcttttttaaccccagttacagaagaaaagctaaaaccacatagcagcctggcagtaatatttgatcaagttagcgtgagaaattagaaataatatttttcaaaatataacatttgggtcagttcaaattaatggtgaaaagatgagttattcagtaaatggtattggtacagttggctatccat

SEQ ID NO: 701169 - DNA, 470 bp, Homo sapiens
taagtgtgagaatttttaaggtgtgcgacctatggaggtgttgattgaactcctttcagtgaggatgcacaccagagatcttattaaataaagttttcrtattcacaagcccttaactttgcctagatgtgacttcagaaaattgagatgcaaatgtcatcccagtctatagtgataacagtgttttaaaaaagttttttagttgacaaagcagttttacacatgacacctgagacttgctactttttggaggaaaggcacttggtgaattcaaagagagcacagcctggtctgtgcttcaccaagtccctgtcctagtagcaactggagagcaacaaatatgaacaaatagagccaaagaattctgctagaaccagctttggcctctttgcacctcaatttgctagtcaataatgaaaataactgaattaggtcttttttttttaatagtctttctggctttagaattc

SEQ ID NO: 701170 - DNA, 605 bp, Homo sapiens
caacaagagtgaaactccgtctcaaaaaaaaaaaaaaaaaaaaaaaaaaaaactagtaaaaaataaaaagcctgaacattctagaaaaggggacacaaaggtggaagtgtgtagcaaaggccaacactgagcttcagaggaggaaagtttccctctgcggagccagaccaaagaaggaaaggaagggckcagataaaggtatgtttacagtcaagtaaggaaaagcaaaactcaaaaaaatgatttacattgttttaatcctttgctcaatcaccaagaatttagtcattatcacaaatgaggctatattgtaataaacatttatttaagccctgcaataaaaaaaaaacctgactggtgggtacaagaaaacccaaacaaagcattacccggcatgaagacaacagtggtgccaagaactacaggacagagcatctctagctagattatcagggctactttgacaggagatatttaactaatttgtaaaaagtgattaagaaaacattttagatgtagcgaatggcactaattaatattcagtaaataatatagcttattatgcccaaagttgacactcagcgattccttggccccagggtgag

SEQ ID NO: 701171 - DNA, 630 bp, Homo sapiens
tggcaatgcccttcgccaagcctacacatgtggttcagcattacagtgggygtctacttggcactcattgtttttagctttggggtcacagctgaaactctgagatgacaaaaagtctcattttaatgacctgtttcacttccctttggttcactgggatacaaagagatgaatttttcccaatatatttttagaggcatatttatcataagagcaggccagcagcctctctgagtgctgaggccctaatagggacttgcagttattgtatacctacacccccacaaggcccccaaagatgcagagtggaccttttggtccctctcctccctttgtctaaggacatcagatagtgatcataaatattcatcccatctatttcctgatgctgggaagggaaaatattgcaaacaccacgagcacttgttgaagacacacatacgccaggcactgtacccagaactgactctacagtggtgatggacaggtcctgcccacgtggatcccccagtctagcagactggacaacaggatggtggcctggagaagagggtgaacataaactggtggacaaagggccacatggttcgcctccagagatcttctttagaaaggagtcaaagggctggg

SEQ ID NO: 701172 - DNA, 585 bp, Homo sapiens
ttattaaggattactttctcagaagtagaactggagaggaaraagatggaaagggaggagagaattgttactttgtacagtaggcctgagttactcaacaaatattttttattggcaaggaaaagggaaaaaacaaaacaaaaagaaacagtgaaagagccagaaaggaaattaaacagtgcatctcactgactttctcattcaatttttatagtagcctccataatcctaatagttgttgtaattagagccgagatggattcactgctattaatttagctgctaatactgttgctattgttctgatcaagtttctgctactttttgacctgctgtctccctcaacagctgtaggagtcacaattcccttgagctcttgttggtttcttgttccattttttttgggtttctatccttatacattgaaaaaattattacagtgtggatttagcaatcatttttagctataagaaaaggtgctgtgcactagagggaattgaattagagatgtcattcgttaatcagataattagttcccaatcttggctgcttgttcaaatcttttggcatgctttttaaaaattc

SEQ ID NO: 701173 - DNA, 1069 bp, Homo sapiens
  misc_feature 1041: n = A,T,C or G
tttttttgagatggagtctcgttcttgtcccccaggctgagtatagcggtgggtctcagctcactgcaacctccacctcctgggttcaagtgattctcctgcctcagcctcccgagtagctgggattacaggcacccgccaccatgctcagttaatttttgtttttttagtagagacggggtttcaccatgttggccaggctggtctcaaactcctgacctcaggtgatccacccacctcagcctcccaaagtgctggaactaacaggtgtgagccaccacgcccggccaaataataatttcttaaaaagaaaacgaatggaatataaactcatcaagtgccagaatctttgattttcaattaatgtgttccaagcacctggagcagcactctttctgggaatgaacctaaatttccagtgttgctgggcagcacttgttaccctaaaagatggggatttcttcatgttgtcttggttttttggcaccgctaaaatctaataggattgccctaacccagaactttaaactcgcggtttaattttcattacgactgcccttcttccttatggaactatgacaggttccaagatactgccattactggtccaaataactaccataccatgggtatcaatacgtactgtatataccgttcaaaataactatgtacaatgtgaaccartaactaccatatcacatattctagcctaagaaatattcttagaatttcagttatcctctgttaaaccccaaaagtattttagagcacaggtactatgaatcaatgtagcacttccattaaatgcaaaatgttaaaatgaacaatcctgactaggccagaactaatggactttacctgcacataataagctacatgtatgaatgcagtattagtggacaatgtatttcattttcaagctataagaaccaaccatctgcaagcattaagcactcatccacaaggggtcacccgaatgactactattcttttaatcacttatctctggtaaaaaaaaaaaaaaaaaaaaaaaaaaaaaantttttatatatatatatatatatatata

SEQ ID NO: 701174 - DNA, 1069 bp, Homo sapiens
  misc_feature 1041: n = A,T,C or G
tttttttgagatggagtctcgttcttgtcccccaggctgagtatagcggtgggtctcagctcactgcaacctccacctcctgggttcaagtgattctcctgcctcagcctcccgagtagctgggattacaggcacccgccaccatgctcagttaatttttgtttttttagtagagacggggtttcaccatgttggccaggctggtctcaaactcctgacctcaggtgatccacccacctcagcctcccaaagtgctggaactaacaggtgtgagccaccacgcccggccaaataataatttcttaaaaagaaaacgaatggaatataaactcatcaagtgccagaatctttgattttcaattaatgtgttccaagcacctggagcagcactctttctgggaatgaacctaaatttccagtgttgctgggcagcacttgttaccctaaaagatggggatttcttcatgttgtcttggttttttggcaccgctaaaatctaataggattgccctaacccagaactttaaactcgcggtttaattttcattacgactgcccttcttccttatggaactatgacaggttccaagatactgccattactggtccaaataactaccataccatgggtatcaatacgtactgtatataccgttcaaaataactatgtacaatgtgaaccagtaactaccatatcacatattytagcctaagaaatattcttagaatttcagttatcctctgttaaaccccaaaagtattttagagcacaggtactatgaatcaatgtagcacttccattaaatgcaaaatgttaaaatgaacaatcctgactaggccagaactaatggactttacctgcacataataagctacatgtatgaatgcagtattagtggacaatgtatttcattttcaagctataagaaccaaccatctgcaagcattaagcactcatccacaaggggtcacccgaatgactactattcttttaatcacttatctctggtaaaaaaaaaaaaaaaaaaaaaaaaaaaaaantttttatatatatatatatatatatata

SEQ ID NO: 701175 - DNA, 1069 bp, Homo sapiens
  misc_feature 1041: n = A,T,C or G
tttttttgagatggagtctcgttcttgtcccccaggctgagtatagcggtgggtctcagctcactgcaacctccacctcctgggttcaagtgattctcctgcctcagcctcccgagtagctgggattacaggcacccgccaccatgctcagttaatttttgtttttttagtagagacggggtttcaccatgttggccaggctggtctcaaactcctgacctcaggtgatccacccacctcagcctcccaaagtgctggaactaacaggtgtgagccaccacgcccggccaaataataatttcttaaaaagaaaacgaatggaatataaactcatcaagtgccagaatctttgattttcaattaatgtgttccaagcacctggagcagcactctttctgggaatgaacctaaatttccagtgttgctgggcagcacttgttaccctaaaagatggggatttcttcatgttgtcttggttttttggcaccgctaaaatctaataggattgccctaacccagaactttaaactcgcggtttaattttcattacgactgcccttcttccttatggaactatgacaggttccaagatactgccattactggtccaaataactaccataccatgggtatcaatacgtactgtatataccgttcaaaataactatgtacaatgtgaaccagtaactaccatatcacatattctagcctaagaaatattcttagaatttcagttatcctctgttaaaccccaaaagtattttagagcacaggtactatgaatcaatgtagcacttccattaaatgcaaaatgttaaaatgaacaatcctgactaggccagaactaatggactttacctgcacataataagctacatgtatgaatgcartattagtggacaatgtatttcattttcaagctataagaaccaaccatctgcaagcattaagcactcatccacaaggggtcacccgaatgactactattcttttaatcacttatctctggtaaaaaaaaaaaaaaaaaaaaaaaaaaaaaantttttatatatatatatatatatatata

SEQ ID NO: 701176 - DNA, 627 bp, Homo sapiens
atgacaagcagactttacccagcttatttttttactgtttggctctgactcaagctaaaaagttgctattcagcagagcttgagttatttttattgttatagccgggcttggtctaggatgtatttggctaaagttgatcttgaccttggatttccagctggctcaggctggaggaaggggaaaaggccctgggaggatgagtggcagatggtgggcatgcctcgcaggctgagccgctggcccttcttccctgacagatacaatctgtggggagagaagaccagagtaattgagaagaatgtcaattttttttttttttgagacagagtctcactgtgtctcccaggctgcagtgcagtggcaccatctcagctcgctgcaacctctgcctcccgggttcaagagattctcctgccttagcctcctgactagctgggattacaggcttgcaccaccatgcctggctaatttatgtatttttagtggtgatgggattttgccatgttggctgggctggtctcgaatccctgacctcaggtgatccacccgcctcrgcctcccaaagtgctgggattacaggcatgagccaccacgcccagccaaaaagaatgtcagtttctttccaa

SEQ ID NO: 701177 - DNA, 1599 bp, Homo sapiens
gaggaaggttttcagggcacagggaccagggacatcaacagatactttcttgtaattctgacagctgctataaggagaggagtctggggcatctggccgcgtttccaaatctgctcggcccttttcttccaaggatgatctggttctgctctttgatccagggcactgctttaaagagcctgtttgtttgtggcaggcaccagactagtattgtcactggttcatggactctgaaagcacctagaagatccactgttcctgtggcagtggatgatggcagctggtacaccctgggtgcagctggtgtctttgatttagtacaagcacctttcaaagatttcattacacttgaaagcctcacctccggaaggcagtgggtgggggagcagctgttcagcctctgtagagataggaccaatgggtgcatttctgaggaagtagacttcaactaaggaagaagtttttaacacagctgccagcaatggccttggctctcttgtgaagaagtgagctttctgctccagaaggtattctagcagtctgtcaaaaatcttgcagtgaggaaagcctacagtggcctacaaaagcctgctaaatgccttctccattgcttctaactttgcccaactctgaattctgtgggtgaacaactagctcctttcattctggccctctattctttcttttttctttttcttttcttttttttttttttttttttgagacgtatcactggtgtcgcccaggctagagtgcagtggggccatcttagctcactgcaacctctacttcctgggttcaagtgattctcctgcctcagcctcctgagtagctgggattacaggcatgcaccatgacacctggctagttcttttggtatttttagtagagacagggtttcaccatgttggccaggctggtctcgaactcctgacctcaagtgatctgcccgcctcagcctcccaaagtgttgagattacaggcatgagctaccatgcccagcctggccctctattcttgacacatccttctgcagaccaaccccatgtctgcaagtttcataaccccagtgagagagcatctgagggcagggtaggcatgtgccactcagtaggccttccctcctgtctcacttctcactcccatggccaactcatagcctggcttttggttgaggaaactggcacttggtgagtatagtagatcgaataacagcccctcaaagatgtccacatcttaattcctgaacctatgttaatttacatggcaaaaagaggtcttgcagatgtgattaaattagaaatcatgggatggggagatgatcccagattagccaggtgagcccaatgcaatcactagagtccttataaaagaaaggcagggcagagaagaagacagaagcaggggttggagtgatgttctttgtaaaaatggaggaagcagccatgagccaaagaatgcagatgacatcagaagctggaaaaggcaagggaatggatctcccctagggcctccagaaagaatgcagccctgctaacaccttgcttttagccccatragacccatttttttttcaggcttctgacctccagaactgca

SEQ ID NO: 701178 - DNA, 611 bp, Homo sapiens
aggattattataatattggaataaagagtaattgctacaaactaatgattattgatattcatatataatcatatctaagatctatatctggtataactattcttgttttatattttattatactggaacagctcgtgtcctcggtctcttgcctcagcgcctgggtggcttgctgcccacacttctggggtcgcacaggactttcccttggatyactcacgctttgctttcacactgcaaggttacaggaactcttgaagatctcttccagtcttcccagagactgtgggttgctgagcaggaacacccttcaccttagctagggttggctctttcaggctttgtttgagcaaggtaattctgaggtccttggccctcagagaactccagttaggacacaacattccctttacctatttcttttttttcttttttttttagatggagtctggctgtcacccaggctggagtgcagtggcacaatctcagctcactacaacctccgcctcctgggttcaagcaatcctcctgcctcagcctcccaagtagctgagactacaggcgtgcaccaccatgcccagctaatttttgtatttttagtagagaagggg

SEQ ID NO: 701179 - DNA, 611 bp, Homo sapiens
aggattattataatattggaataaagagtaattgctacaaactaatgattattgatattcatatataatcatatctaagatctatatctggtataactattcttgttttatattttattatactggaacagctcgtgtcctcggtctcttgcctcagcgcctgggtggcttgctgcccacacttctggggtcgcacaggactttcccttggatcactcacgctttgctttcacactgcaaggttacaggaactcttgaagatctcttccagtcttcccagagactgtgggttgctgagcaggaacaccyttcaccttagctagggttggctctttcaggctttgtttgagcaaggtaattctgaggtccttggccctcagagaactccagttaggacacaacattccctttacctatttcttttttttcttttttttttagatggagtctggctgtcacccaggctggagtgcagtggcacaatctcagctcactacaacctccgcctcctgggttcaagcaatcctcctgcctcagcctcccaagtagctgagactacaggcgtgcaccaccatgcccagctaatttttgtatttttagtagagaagggg

SEQ ID NO: 701180 - DNA, 595 bp, Homo sapiens
gtcttacagtcgaacctacatctccatgtccacaccttcctttaagtgcagcaaaatcattttttcaagtacacctaacagcaagctactgcccaagggccaaatctggcccaccacctcttttggtaaataaagttttattggaatgcagcacttggattcatttgcctgtcatctgcctgccttcacagcagcagagttgccacagagactgtatggcctgcaaaattttaaatatttactatgtggcctttcacagaaaaagttttcagaccactgctctagttctatcacgtagtttgtcataccaggaattaatgcatctcccttttattctcctcccactagtgcctatcccaraaatctgcactcctgttcctgccaaactcctgctctgcgtcatcaggtaattcccagcaaaaggcaaagtgtctccatgagtcacttcgtcccaacgcttaaatggtgttggcttcttagctatgacagggacatcacagagcacctggttgaggctgtcactctatgcaataaccagctttcggccaaatgaaagacagcaccaaagtcatcaccaactgactataattgaata

SEQ ID NO: 701181 - DNA, 1109 bp, Homo sapiens
ctcaggccttcatcatcttcaacatggactattacagtacactcccaacagcctccytgccacccacctccagggatctcatacattctccagactgccagcggtgtgcagtgcatgctggagtgcaccaccagaatcaccttcagcctgaggcactctctcctctagttgctgagccttctccaggaactgccctcagggaaagagaaccacttcactatggttatgtgcccctctgcaggggcagcctgtatccagtcatgctcagcacaggggtataaaggcctgacctctctgcctctctggatagggccactccacctccaaagcttccctgtgggaccaggtgaatctgttacagctggttcctcattcaactcctcctttgcccaaacctgctttgttagcgtcccctcaaatgctggtcccaagaacactccccagtaaacttcctgtatgcaaatctcccctcttgggtctctttcctgaagggcaagaccaaaaacagagagctgtctttctagattacaaacctgaccatgtttcttccctgccaacctttccacattcacttctcatcgcctgcactgaagagtcctaaaataatttttagagtcgcatcaaggggtcacaatcagtgatctgctgcgaaagcagctctttggtttgtggggtggggagagaaggccctaatgtgtagcatttgctgatttccacggtgcaaatatttccaccactgttgatctccagctaccaccggcttgcaaccggcttgcaaaatgactggctatttaatacccagttcccataagccagacacaagccagcttgagcacaccactgatagcccctgaccattcgctattgttaactctaattgtttgccttcgcttcagccatgacaaattcttgcaaatctcagacctccaggatgcgctgaggttctgtgcccttattcacgctgttttctctgtctagagtatgtttcctttccctgtctgactcatgcaaacctactcaatgctctggatccagctcacataaaatctcttccataaacattttcaggattcacctccacccatcccatttcactcaaaggtgaagca

SEQ ID NO: 701182 - DNA, 1448 bp, Homo sapiens
ccaccaagcacaggcacacatggaacatgtactggcacaggcctactactgcccagggctggtggaagctggctgacattgtcccttaccatgtaaccttctgtcttcttctggtaccatttcagtacagcattgcacttgaaaccgccatattcccgggccaaggccaccagagggtttcttctttccacactggttagagagaagagcacgttaaggagaagatgctaatgtttagaatcctcaaattcacaagaactaaatacctactttagaaaagcaaatgtctggtttattcagccagaatctgaagaaacaaccacattagttacattaataatgtatttgatgtctcacagtgtgaaataaacatgaaattgtgcctcctgactgtcatgagtctggggagagttttgctacattttgttttaaaatccatctgttgctcatccatctagtcttttatttgtgtaaatataattcaggctagaactttaattcaaactcatttgaattaagggtatctatacaaaagcattctacaggtttcaagactacatcagtatctaaataacatttaaaaggtagagacgggcacagcacagtggctcacgcctgtaatcccagcactttggaaagctgaggcaggaggattacctgagcccaggagcttgaaaccagcctgagaaacatagtgagacctcaactctgaaataaataaataaataaataaataagctgggcatggtagcgcacacctgtagtcccagctattcaggaggctgaggtgggaggactgcttgaggccaggagttcaaggatgtagtgaattatgattataccactgcactccatcctgggcaacagagcgagacycccatctctaaaaaataaaaaaaaatttttcaaggtatattggaagggcatattaaaaataccagatatcctgccattgctttatctcaatgagataaatgtaaaattgaaataaattgattttactaatttaacttttcactatgaaagataaaatatcagaagcatattaatatacccatagccttcctgtatgcatttctggtataatgaaaaggagaattttagaatagcactaattctggtttttaaaacctcttttgattatttaaatctcgcgcacataaacaggacaatatgtaatatctggggctttaaattaaacctctaaaatatatgacttcatctatttgggtgcaaatataggctacatccaaaggtataacaataagtcctagcttattcattcagactttcataaatcctttgatagtacccttattagtaatgataatatgtattaaaaagctactactagctacttaggaggctgacgcaggagaactgcttgaacccgaggcagaggttgcagtgagactctgtctcccaaaaaaaaaaaaaaaagctattac

SEQ ID NO: 701183 - DNA, 606 bp, Homo sapiens
ttaaaatgagtgcatttatgttatgtaaattctacttcaataaagctgcttaacaaatgagtcagtgactccgagaagcattaaaagtaagtgctggtatcaggtagaaaaacatttatctacatcaaagaatcattcatatttttcctaagcaatcaagactcccaagaggtaagttaaaaacagaggccaagtccttgcgaggttctgggacaggtggcttactgagtagaaattcttgacatcactatgcgttttctatttggtaacttctttcatctgcatgaggcaatgtgaataaatcagcactgtatctgttgcgttcaacagcccaactttgaatctgagtgtgtctcaaccatggattttctctcattttcaatttgcatgtgcatttaacatttacttttctacctgactgacaaatattttttggcccaacttaaaaaaaaaaaagatattgkcaaaccatcacagcatagggttagaagcaaagaaggcaagaggctaccaggaagataggcgttcgacaggactcatctctctgtttaaaatgcacacacattttctacttctaatcagtgctttttcctctcaagagaaaaa

SEQ ID NO: 701184 - DNA, 634 bp, Homo sapiens
tgctgattttgttgatttatcctttggaaatgcccgaaaacaatgagtatccaatagcagtgaataccctgagggtccatactgaggttcaccagaaggagccagggttctttaaagaaatggctggttccatgtccaaggcaggaagtatatgagatgacctggaatatcatgttatcttacaagattactagtcttaccaaatggtctcccaaaactaagccaacttagttactaacaaggttactaattgaagatgargaacaaaacctatcccattttgtttatggttttgaaaaagataaagagaaagaatcaagtgcttgttttgctttttctagaatgactgtactttagggtaactatattagataggcaggttcttctgtaaagaaatactgcagttaataagtaaagaaggggctaggcgcagtggctcatgcctgtaatctcaggactttgggaggctgagccaggcagatcatttgagttcaggagctcgagaccagcctgaccaacatggtgaaacctcgtctctactaaaaatatgaaaaattagctgggtatggtagcacgcgcctgtagtcccagctacacggaagctgaggcaggagaattgcttgaacctgggagg

SEQ ID NO: 701185 - DNA, 1849 bp, Homo sapiens
gcattttttcrtgatcttttgctaatctagtaaattttcttacagaaatgtatagcaagtttcatttttatgtggttctcactatgtttgactagatttttgagaaggtcttaacacctttaaattataagatgattattctgtattgttcccattattttgcatttatctctttaatccacctagaaatgattttgtgtgatgcagaaatctaactttctaaaacatttctagataaaggtctgttttccaaacactacttgttaaaaacttcagtctaaacccaaccatgtggaatgcattctttgccatatacacacttatatcacatacacttatatcacttatatctgttttccaaacaccacttgttaaaaacttcaatataaacccaaccatgtggaatgcattctttaccgtatacacacttatatcaaagttatatcacttatatctgttttccaaacaccgcttgttaaaaacttcagtataaacccaaccatgtggaatgcattctttaccgtatacacacttatatcaaagttatatcacttatatctgttttccaaacaccgcttgttaaaaacttcaatataaacccaaccatgtggaatgcattctttaccgtatacacacttatatcaaagttatatcacttatatctgttttccaaacactacttgttaaaaacttcaatataaacccaaccatgtggaatgcattctttaccgtatacacacttatatcacatacacttatatcacatatacttatatcacatatacttatatcacatatacttacatcacatacttatatcacatatacttacatcatatacacttatatcacatatgcttacatcacatacttatatcacatatacttacatcatatacacttatatcacatatacttatatcacatatacttatatcacatacttacatcacagttgtcatataagcatgtgtttgtttccggatcttctattccattgacctttaaattcctgtacaatactcaatttttacactaaattatcagttctgaagaagcctcttaaaatttcttacgttctttttttcgcattttctcttgtgcataaattgtagaattattttgtgaagttccataacaaattttattcaaaatttgattgaattgtgaaaagctaacagtttcatttactattctatccaatactataatattctcacttttcacattgtatatactttcatggaatttcactaaacatctcattttattacactctaataattttcattgctattatgagtgggctctactttttatagcattttttctagtgatactttactgctctgttggagatttatcaacttttatttctcctgttactgtcttattttactgttgtattacttttaatagctttttggcgattctcttggattttcctgacaaacaatcataacggcaattaatgacagttttttcccttttccaagatgaatagtattttttttttctgtaccattagtagcagtgatcattacaagcattgttttattattcctgactataataggaaggctttgtatgtttcacgattatgcatagcatttagtatagataccagtttatacttcacttaccttgaaattttgtatgtacatgttgaattttataacactttcttcatctacatagatgattgtgtattagcccattaataagagtgaattacatcattaatgccattagattttctaatattgaattgaactttcctggaataaacctacttggtcataatgttattcttttaatgggttgatatattttatttgctgctatatta

SEQ ID NO: 701186 - DNA, 438 bp, Homo sapiens
caggctagaagaaaggtgggaactcagggcagattttgggagatggtgctgaaaaaggcgggcctaccgtgaggctcggccccgccctgtggctgagaggactcagaaaagagccctagcttagcagaaacagaatggctctcagagacacattcgggacagcaaaccttaaccagccttcaacgttgtactgctaggaattataaagtgttgtttgttaaaatgtcaatgccataacttatgcagacaaatgaatattgtccctcaagataggttctttggaagtttatatgctcattttaacaaaggtcccattggtgcaaagtccttcttaaatgtcctgtggagcagtagcaatcactttgtaatcatgcctcatgtttagctcagaattccattaaccagattcagcacccattttaatcactawaccaaatg

SEQ ID NO: 701187 - DNA, 601 bp, Homo sapiens
atttctaattcaaccttgatgatcaatgaggatagcagccatcactaacagactgtcatccccaccatcaccccagagaatacagcatataaatcattttcttgatacctataaactaaaattataattctgatagctaaaagcttactaaggcataaattgtttgcttttatcctaataaaacccagtttccggtatttgctctctctagtctttttttcccccatctcctttttcattgttaggtaatcatataatttctcctccccacctacataatggtttgattattgtcactgagaatgcctagagcagcctcttttccacttgcatgtttctaatataaccacgtaactaagctcagcagaattatatttaaagataataaaatttgatctgggtaaggtttagtgacttccaatttaggacagagaattttccaacttattttctcatttttgcytgtattacagataggtatggttgttaaagaaacttttgttgtactgtttctgttgtttacagagtaatgtaatttttaaacttatattccagagagatataaaatagcctcctccatcgtcagccaatgatatcactg

SEQ ID NO: 701188 - DNA, 2158 bp, Homo sapiens
ccacaggacttggaccctacgtgaagattaaaaatttaaaatcaaactcgggcatttctgccatctgtaacccacctccacactagaaccctctgacagaaagtttctgtgagtagggaaatctggtccacaaataagctgtccctttaaagatctgcagcaacttaaaaccagctggtttctggtacaagccagtcctcagaaagtaactctcacttcaactacagaggataaggtccaatgattttgagttttgttttaaaaaacaaagcaaaacaaaaaccccgaattgctcagctgggacactggctggttcaggagggctgggggttttcagaagcagcagccgcatggcactgctgaccgtaagcgcactgctaaactgaagcgcggtggaggtctgggaaaaggggaaagcaaacactccaaaacagaaacgccatcgctgaaagggcacagagcaggtgcgggcctgcccccaggtgtctcccactccctgcggtaggaagtcctctgacagagggaggaaactgggccaaaggaaatccatgcatccgctgctctcctttccctccttccccttctatttaaaaagaagagagtttgagaccagcctgggcaacacagtgagaccccgtctccaaaaaaaaaaaaaaaaaaaaggaagggaactatttctgtgcctgagaatggctgtgcttgcgagagtccttctgtatcagaaagcaatgactttttacaggattgcaataatacccggaacccctaaaagaccctggaactggcacaagggtgcctataatttcaatgcttaagagaggtcctgaaggcatgtcactaacacaatgattagagaccatttcttaccacacatcagagagtcttcatgctttggtctcctaccttagagaaagcactgactccattcatcccaaggactgaaataatggtgctgatgaagatgaggcccccaggaataactgcagctatagtgtattcatcacttactactgatatactgattgtcactgtgagttaagtatttaatacagcgatcagcctcatgtgatagacaagaaaaaggagacagagaggctacgtaacttgccccaagtcacacagtaagagctgacacctgatcccaggaagcctggaaccgtgaacactaagtagcctctctactgatatctgctatcatcttaatccagaaaccaccctgtaagtagttataattatctgcaagttacagataagggggaaaatagaattaagaaaggtcagatcacttgtccaactastaagctataaagccaggagtcaaaaatccaggtctccaacctccacattctatgccttttcactacactgcactcgagggtggtctgaccaaccaccacgggaccaaccaccgtgggacttccatgtagacagctgttcccaggaccagaagaaataatactgggccacagggcacacaggcaatgaagagtcaacacacatgaactagagaggagtcggaggtaactccatgccatgcaggatctgccatctgctgccagcttcatcattctcagacagaaccctcatcctgccacatcctgcttgacaaccacacacgtttccttatcatccactgcttcatgcctcccatcgaatttccagtccctgactctggccacccagcttcatcccactttccctgagataactgccctccaaagtggccccacagcctgtgggcacattccactccctcgggcctgggtgtggttccccacacctgagcgctcctcctcccctctccagccttattccagaaccccgcagaagacctgccttcttcacaaagcctccatctcttctcgtcctttctgagcccctccacctcctcactcctctgcagttccaaacaattcaatccttattcatatccagacagtactgtttgcattgtttctgtttctccaatggaaaattcctcaggggaagaaccatgaccaatcctcaggagatgagggtagcagagggcttcagagcacaggcttgggagttggactgagattaatcctgactctgccacacacttggctgtccaattcctagttaactcccctgccaatggtgataaagacagtaccaactgtctagggtatttcta

SEQ ID NO: 701189 - DNA, 465 bp, Homo sapiens
aaagactgccccctgaataattcgctaggctcattacagtggaatacttcagcattcaccaaaatcaacgaaaatgaaacttattgtaagaaagtttttaaagacagattcagttatctttcaaggtattaacaaaatcacctgcccaatgaatcatggttatatgctgtttttcagaatgtgatgttgaataattttaaaatgctgtaatgctaaaaaggagagcaaggacccaggtggtcagagtgagtggctatctcttaaaattaacagatgccacatttgaataatcaagatattaaaaatagtcattttgttgatgcatttatgtattttatttactgttttctatctcaattctgcaagtcttagaatttttgaattcctttcgtagctgttacacatgtattaagtaaaaataaaatgtgatattgttrtttatattctcaatgaatgtatatatta

SEQ ID NO: 701190 - DNA, 608 bp, Homo sapiens
ttctacttggattacccaccccattaaatggttacctgcgctttctctgccttcctgatcagaacacgtttctctagtacttatttgaaaacaagagttttgcaatgctcttaattctttttcacttttcactgatcccctattcctaacttccaggttttgccaggatattttgttaattttagttcaatagccttagtcaaatgtatctcacagatagttccttcaatttctgagtccttatttacaactgaactttacctgaagtctaaacttctttttctgttatacacataagaaattattgaaatatttagtcccagcctcagtacatgcctccatttcctttctkttcttcacattcccaccaattgttgttcaggttcacataagtgataatgtttggaaagtcttctctcaaataggtttctctgttggggaacacaggagataaactgtctgaattgctgtgtatctttccttcaaccaaacagaggggccacatctcagctgggtccaggattgttgggctgtagtcctttctctcagtagtccttaactgctatgccactgtccgttccagcgttggagataaaaagtctaattac

SEQ ID NO: 701191 - DNA, 615 bp, Homo sapiens
ttttctatacttaaatgcaatgtttagaatttttttcatagttgtataatttatcaagataaaggagattttaaaattatgaatggggtttcaaaaaataagataatcatgtcacttttagattgattagattatgatartggactgctaagtaattacaagaacaatcaaaatgattaaattcctaattcagtaactctccacaaaggtggccccacccagtcaggattgatttataggtgcgctctgtttgctgtcgctcactgatttaccaaatattgggtaaataataatttttttttttgaggagtctcgctctgtcacctaggctggagtgcagtggcacaatatcgactcactgcaacctctacctccgaggttcgagggattctcttgtctgagcctctcaagtagctgaagactacaggcacgcggcaccacacccggttaatgtttgtatttttagtagagatggggtttcaccatgttggtcaggctggttttgtacttccgacctcaagtgatctgcccgctttggcctcccaaagtgctgagattactggtatgagccacctcacccggcccaattttacttgtttttagtaatccttctta

SEQ ID NO: 701192 - DNA, 615 bp, Homo sapiens
ttttctatacttaaatgcaatgtttagaatttttttcatagttgtataatttatcaagataaaggagattttaaaattatgaatggggtttcaaaaaataagataatcatgtcacttttagattgattagattatgatagtggactgctaagtaattacaagaacaatcaaaatgattaaattcctaattcagtaactctccacaaaggtggccccacccagtcaggattgatttataggtgcgctctgtttgctgtcgctcactgatttaccaaatattgggtaaataatawtttttttttttgaggagtctcgctctgtcacctaggctggagtgcagtggcacaatatcgactcactgcaacctctacctccgaggttcgagggattctcttgtctgagcctctcaagtagctgaagactacaggcacgcggcaccacacccggttaatgtttgtatttttagtagagatggggtttcaccatgttggtcaggctggttttgtacttccgacctcaagtgatctgcccgctttggcctcccaaagtgctgagattactggtatgagccacctcacccggcccaattttacttgtttttagtaatccttctta

SEQ ID NO: 701193 - DNA, 3061 bp, Homo sapiens
taagccaacaattttgcttttatgtttaggatagttttggctcaatttcttccacttgcgttgaaaaaaatgactgacttatatacagaatacggattactgggctaaggttaaatagccattctggtaggaaacagcttgagcaaaggcatctaggcagaaaatctcagaatgtattcaaactggagtatacattaaatggaaaaaatgggaggtaggtctagataagaagtgctttgaatttcctgataaagaaaataaaatgtactctataaaaaaaatgaggaactgtggaaagtttttgagtagggcagtgaaatgcacaaactttgctttctgaagagtttcctggtactcaaaggagaaatatttggaaggggagatttaggagtttataataaaagagaaaaacatgataatcaataatcaatcactttggcagtgaataggaagtcttattatatgtggtgtagaatagacaggaggcaaacgtcaagattgattctaaaattttaagtttttcactgtttaatgaaatagtaggcccttgataaatggttttgaaaggctggttaactagataaataggggagttctgctggcagattgttggatatagaagaagagaatgtgttttgctgagcagccaaggatatgctaaatcagttaattttgaaactgtaaaaaagagcatattcctaatcaattcctaggattcaaaactcaaatgacatttatctgtgtatctgaaacctgaatggtgatcatggactatcattttctttcttattaaactggtaagtttattttaaaagaaactctgatttttcctgttaatggaggcaacatgtacttcattagcctagggcaggcattggcaacccacagtagacaggccaaggcagcaggagatgatcaccagtgcttaatgttaccattctaaccatcaaacaaaatgccagtaggctgttagtccttcttttacctcctccaggttccatcttctcacatgacatctccagtctcttggtacatgcacattgccttcctggtgattcaaattattcagagtacaaccctgtccctcccrcccccaaaactctcagttccatatgtcccattgcacatttttgaataaatttacctctctcaagacctacccatttaaaaaaatcgcttctctttctactcctcttcaatccattttcttttttacttgcaagtccaagcaaaattcgtgttgctttagagggactgattgcagcctggtgtcaggagaaaaatactcatatgtgtcaacttggctgggctacagcacctaattatttaatcaaagtctaatttaggtgttaccgggaagctattttatagatgtggtcaacatttacgattagttgacattaagtagaggagattactgtagataatacaggcaggccccatctaatcagttgaaagtccttaggattaaaaattgagattacctagacaaggaggaaattctgcctccagaccacaacatcaactcctgctgtcaagtttccagcatgttggcctgctcaacagattttagacttgccagccccacaatcacataagccaattcctctctctctctctctctttctctctccccctctcaattctactggttctgtgttcctggataaccctcactgaaacaagttctttgaagttatttgcatggtggtgtgactgaccaacactgaaacttaaatgggagtgtcagcaccatttgtgaaatggtaccaactattttgaaaaacaaaatttgccttcatagtatagctcaaagggtgatgctgcctatcccccctacctgtttaaactggctttcacttggaataaaatttgtgtaattagaattagtggcacctactgatggagtaatactagatctggcctagagctgaatgtgccagaagccatcagctatctcttaaatgtagagggaaacttttccggtcaaaaccaaaaaattttgaaccttagcactggggatttgcaagagatctcagccatcattcagaccggactttttatttcaaatataatgaaatagaggcccagggaaaactgtgttgtgcaaagccacagtcactggaattataacatccttttatatttgttttttcacttgaaaatcttttaatatttttctttattgctaaatattttgctaaagcatgttgttttggcctggacaatattccatcatttggttgtgccagaataattttattaaatatctgtttagtgcatttaagttatattcatgttttcacttctgtaaatactgggataaatatctttatacataagtctttgtacacatttatcattcctgaagataagtttaatgaaaagaaatttctaggtcaaacagtatgcacactatgaaggatttaatcccagttgccaaattgtcctccagagaggttttaccaatttctaatactcagtgatggatgggagcctgtttccctctcctttgaatattttcattaaaaaacaaacaaatggccaggcatggtggctcacacctgtaatcccagcactttggaaggctgaggcaggtgaatcacctgaggtcaggagtttgagaccagcctggccaatgtgacgaaacctcatctctactaaaaatacaaaaattagctgggcatggtgatgggtgcctataatctcagctactccaggaggctgaggcaggagaatcacttgaactcaggaggccgaggttgcagtgagctgggagattgtgccattgcactccagcctgggcaacaagagtgaaactccatctcaaaaaaacaaaaaacaaaacaaaacaaaaaaacatgatggaaatggagtcctgttttaattcaccttatttattagcaaggttgcacttgttttccttaaatttgatgtgaattgtatttttatgctgttttaattgccatttatcactttttaactgaagtttatatgctattgatttgtagaatttcttaaaaaataaaatagaatccacaaaaccattcctcaataaatg

SEQ ID NO: 701194 - DNA, 3061 bp, Homo sapiens
taagccaacaattttgcttttatgtttaggatagttttggctcaatttcttccacttgcgttgaaaaaaatgactgacttatatacagaatacggattactgggctaaggttaaatagccattctggtaggaaacagcttgagcaaaggcatctaggcagaaaatctcagaatgtattcaaactggagtatacattaaatggaaaaaatgggaggtaggtctagataagaagtgctttgaatttcctgataaagaaaataaaatgtactctataaaaaaaatgaggaactgtggaaagtttttgagtagggcagtgaaatgcacaaactttgctttctgaagagtttcctggtactcaaaggagaaatatttggaaggggagatttaggagtttataataaaagagaaaaacatgataatcaataatcaatcactttggcagtgaataggaagtcttattatatgtggtgtagaatagacaggaggcaaacgtcaagattgattctaaaattttaagtttttcactgtttaatgaaatagtaggcccttgataaatggttttgaaaggctggttaactagataaataggggagttctgctggcagattgttggatatagaagaagagaatgtgttttgctgagcagccaaggatatgctaaatcagttaattttgaaactgtaaaaaagagcatattcctaatcaattcctaggattcaaaactcaaatgacatttatctgtgtatctgaaacctgaatggtgatcatggactatcattttctttcttattaaactggtaagtttattttaaaagaaactctgatttttcctgttaatggaggcaacatgtacttcattagcctagggcaggcattggcaacccacagtagacaggccaaggcagcaggagatgatcaccagtgcttaatgttaccattctaaccatcaaacaaaatgccagtaggctgttagtccttcttttacctcctccaggttccatcttctcacatgacatctccagtctcttggtacatgcacattgccttcctggtgattcaaattattcagagtacaaccctgtccctcccacccccaaaactctcagttccatatgtcccattgcacatttttgaataaatttacctctctcaagacctacccatttaaaaaaatcgctyctctttctactcctcttcaatccattttcttttttacttgcaagtccaagcaaaattcgtgttgctttagagggactgattgcagcctggtgtcaggagaaaaatactcatatgtgtcaacttggctgggctacagcacctaattatttaatcaaagtctaatttaggtgttaccgggaagctattttatagatgtggtcaacatttacgattagttgacattaagtagaggagattactgtagataatacaggcaggccccatctaatcagttgaaagtccttaggattaaaaattgagattacctagacaaggaggaaattctgcctccagaccacaacatcaactcctgctgtcaagtttccagcatgttggcctgctcaacagattttagacttgccagccccacaatcacataagccaattcctctctctctctctctctttctctctccccctctcaattctactggttctgtgttcctggataaccctcactgaaacaagttctttgaagttatttgcatggtggtgtgactgaccaacactgaaacttaaatgggagtgtcagcaccatttgtgaaatggtaccaactattttgaaaaacaaaatttgccttcatagtatagctcaaagggtgatgctgcctatcccccctacctgtttaaactggctttcacttggaataaaatttgtgtaattagaattagtggcacctactgatggagtaatactagatctggcctagagctgaatgtgccagaagccatcagctatctcttaaatgtagagggaaacttttccggtcaaaaccaaaaaattttgaaccttagcactggggatttgcaagagatctcagccatcattcagaccggactttttatttcaaatataatgaaatagaggcccagggaaaactgtgttgtgcaaagccacagtcactggaattataacatccttttatatttgttttttcacttgaaaatcttttaatatttttctttattgctaaatattttgctaaagcatgttgttttggcctggacaatattccatcatttggttgtgccagaataattttattaaatatctgtttagtgcatttaagttatattcatgttttcacttctgtaaatactgggataaatatctttatacataagtctttgtacacatttatcattcctgaagataagtttaatgaaaagaaatttctaggtcaaacagtatgcacactatgaaggatttaatcccagttgccaaattgtcctccagagaggttttaccaatttctaatactcagtgatggatgggagcctgtttccctctcctttgaatattttcattaaaaaacaaacaaatggccaggcatggtggctcacacctgtaatcccagcactttggaaggctgaggcaggtgaatcacctgaggtcaggagtttgagaccagcctggccaatgtgacgaaacctcatctctactaaaaatacaaaaattagctgggcatggtgatgggtgcctataatctcagctactccaggaggctgaggcaggagaatcacttgaactcaggaggccgaggttgcagtgagctgggagattgtgccattgcactccagcctgggcaacaagagtgaaactccatctcaaaaaaacaaaaaacaaaacaaaacaaaaaaacatgatggaaatggagtcctgttttaattcaccttatttattagcaaggttgcacttgttttccttaaatttgatgtgaattgtatttttatgctgttttaattgccatttatcactttttaactgaagtttatatgctattgatttgtagaatttcttaaaaaataaaatagaatccacaaaaccattcctcaataaatg

SEQ ID NO: 701195 - DNA, 1785 bp, Homo sapiens
gcagaaaacatgtgtgtatttgctcttgtctaaagcacagtgaacaaaataaagatcattaggtagtactctttagtcatccggtctttgacactaaactcaagtcagttactgagacaacagggttaattcctgcttgcacagaaatttatttttcctgacttgttgaaaccacagttgcaaatcctagtttgaaaaacagttaaatgatttcatctttcattgggcattttactagtctcccctctgttgttgttttttttttaatttattattattatactttaagttttagggtacatgtgcacattgtgcaggttagttacatatgtatacatgtgccgtgctggagcactgcacccactaactcgttatctagcattaggtatatctcccaatgctatccctcccccctccccctaccccacaacagtccccagagtgtgatgttccccttcctgtgtccatgtgttctcattgttcaattcccacctatgagtgagaatatgcggtgtttggttttttgttcttgcgatagtttactgagaaggatgatttccaatttcatccatgtccctacaaaggacatgaactcatcattttttatggctgcatagtattccatggtgtatatgtgccacattttcttaatccagtctatcattgttggacatttgggttggttccaagtctttgctattgtaaataatgccgcaataaacatacgtgtgcatgtgtctttatagcagcatgccctaacatcaccattaaaagaactagaaaagcaagagcaaacaccctctgttgttatttcccactactccaggttgaccgagcagttcccagaccttcccagctaaccccagcactctgcagcttttgcctgargcagttttaattgtgtcagtccctctacctgcagtgctgtctctccctgctctcccttatatatctcttatagaccaatacatacctctactctttgttactgtagcttatttatacctcacttttctagcacaacccaggaagccttctctgactgcagcagcacacagtgagcccaccattctctggcagtccatactgtcagacttcacattctcttactacctcatgtgattgtttgtctttaataattatgtcagttataaaccacttgaaagcaggccagtgcataacacatctctgtgtccttaaaaataatagcatcatatctcatttatagtaggtgatcacaatacattttgattcatgaatggattgattttaaatggccttcaatgtttctccagattttatgtgggcaaattagcctataagcagatggcatgcatataagcaattggatgaatttctgttaaccgtaacatacacaccaaaattctacatcttgatgttactggataatagaattactcttaattaagtcaataatgtgaaaaacaaaatgtagaaaacagtcgttattatcttagctaaaatttgcccttgttgagatcattattttatgttcagaaattcagtgatcaaaaaaatggcaactccaagttaattttcctttcattgttcttatttaagaatgttcattcattgcttttcagaaaagctattaagaaagaggaaaagttgaagacagaagctgaataaagaaatctttcaatggaagatacctgcaatgaaacaactcttcccttctttttaaaaacacttctagaaatgggaaaaaaaaatgaagaaacagatcgaggaggtgtcagactctaacactctcaaacctgaata

SEQ ID NO: 701196 - DNA, 1785 bp, Homo sapiens
gcagaaaacatgtgtgtatttgctcttgtctaaagcacagtgaacaaaataaagatcattaggtagtactctttagtcatccggtctttgacactaaactcaagtcagttactgagacaacagggttaattcctgcttgcacagaaatttatttttcctgacttgttgaaaccacagttgcaaatcctagtttgaaaaacagttaaatgatttcatctttcattgggcattttactagtctcccctctgttgttgttttttttttaatttattattattatactttaagttttagggtacatgtgcacattgtgcaggttagttacatatgtatacatgtgccgtgctggagcactgcacccactaactcgttatctagcattaggtatatctcccaatgctatccctcccccctccccctaccccacaacagtccccagagtgtgatgttccccttcctgtgtccatgtgttctcattgttcaattcccacctatgagtgagaatatgcggtgtttggttttttgttcttgcgatagtttactgagaaggatgatttccaatttcatccatgtccctacaaaggacatgaactcatcattttttatggctgcatagtattccatggtgtatatgtgccacattttcttaatccagtctatcattgttggacatttgggttggttccaagtctttgctattgtaaataatgccgcaataaacatacgtgtgcatgtgtctttatagcagcatgccctaacatcaccattaaaagaactagaaaagcaagagcaaacaccctctgttgttatttcccactactccaggttgaccgagcagttcccagaccttcccagctaaccccagcactctgcagcttttgcctgaggcagttttaattgtgtcagtccctctacctgcagtgctgtctctccctgctctcccttatatatctcttatakaccaatacatacctctactctttgttactgtagcttatttatacctcacttttctagcacaacccaggaagccttctctgactgcagcagcacacagtgagcccaccattctctggcagtccatactgtcagacttcacattctcttactacctcatgtgattgtttgtctttaataattatgtcagttataaaccacttgaaagcaggccagtgcataacacatctctgtgtccttaaaaataatagcatcatatctcatttatagtaggtgatcacaatacattttgattcatgaatggattgattttaaatggccttcaatgtttctccagattttatgtgggcaaattagcctataagcagatggcatgcatataagcaattggatgaatttctgttaaccgtaacatacacaccaaaattctacatcttgatgttactggataatagaattactcttaattaagtcaataatgtgaaaaacaaaatgtagaaaacagtcgttattatcttagctaaaatttgcccttgttgagatcattattttatgttcagaaattcagtgatcaaaaaaatggcaactccaagttaattttcctttcattgttcttatttaagaatgttcattcattgcttttcagaaaagctattaagaaagaggaaaagttgaagacagaagctgaataaagaaatctttcaatggaagatacctgcaatgaaacaactcttcccttctttttaaaaacacttctagaaatgggaaaaaaaaatgaagaaacagatcgaggaggtgtcagactctaacactctcaaacctgaata

SEQ ID NO: 701197 - DNA, 1785 bp, Homo sapiens
gcagaaaacatgtgtgtatttgctcttgtctaaagcacagtgaacaaaataaagatcattaggtagtactctttagtcatccggtctttgacactaaactcaagtcagttactgagacaacagggttaattcctgcttgcacagaaatttatttttcctgacttgttgaaaccacagttgcaaatcctagtttgaaaaacagttaaatgatttcatctttcattgggcattttactagtctcccctctgttgttgttttttttttaatttattattattatactttaagttttagggtacatgtgcacattgtgcaggttagttacatatgtatacatgtgccgtgctggagcactgcacccactaactcgttatctagcattaggtatatctcccaatgctatccctcccccctccccctaccccacaacagtccccagagtgtgatgttccccttcctgtgtccatgtgttctcattgttcaattcccacctatgagtgagaatatgcggtgtttggttttttgttcttgcgatagtttactgagaaggatgatttccaatttcatccatgtccctacaaaggacatgaactcatcattttttatggctgcatagtattccatggtgtatatgtgccacattttcttaatccagtctatcattgttggacatttgggttggttccaagtctttgctattgtaaataatgccgcaataaacatacgtgtgcatgtgtctttatagcagcatgccctaacatcaccattaaaagaactagaaaagcaagagcaaacaccctctgttgttatttcccactactccaggttgaccgagcagttcccagaccttcccagctaaccccagcactctgcagcttttgcctgaggcagttttaattgtgtcagtccctctacctgcagtgctgtctctccctgctctcccttatatatctcttatagaccaatacatacctctactctttgttactgtagcttatttatacctcacttttctagcacaacccaggaagccttctctgactgcagcagcacacagtgagcccaccattctctggcagtccatactgtcagacttcacattctcttactacctcatgtgattgtttgtctttaataattatgtcagttataaaccacttgaaagcaggccagtgcataacacatctctgtgtccttaaaaataatagcatcatatctcatttatagtaggtgatcacaatacattttgattcatgaatggattgattttaaatggccttcaatgtttctccagattttatgtgggcaaattagcctataagcagatggcatgcatataagcaattggatgaatttctgttaaccgtaacatacacaccaaaattctacatcttgatgttactggataatagaattactcttaattaagtcaataatgtgaaaaacaaaatgtagaaaacagtcgttattatcttagctaaaatttgcccttgttgagatcattattttatgttcagaaattcagtgatcaaaaaaatggcaactccaagttaattttcctttcattgttcttatttaagaatgttcattcattgcttttcagaaaagctattaagaaagaggaaaagttgaagacagaagctgaataaagaaatctttcaatggaagatacctgcaatgaaacaactcttcccttctttttaaaaacacttctagaaatgggaaaaaaaaatgaagaaacagatygaggaggtgtcagactctaacactctcaaacctgaata

SEQ ID NO: 701198 - DNA, 1658 bp, Homo sapiens
cgcccaactctcagccccactgccactctgcagtgagggagtctcctcctctgtgcctcaccctcagtcccaggacctgacgataaagctcgtttacctggggcaggggttgcagaggtagatgatgtatttcatccctagtctgctctggagggtgggatatacaaaccctcaggtccagcgacacctctgtaggattggagggtctgagctgaggggaaatcacggacgtgcatcacccctaatcagactgctaatgagcgacatgaaaaatgatggcggtacaatctatgtcgccctggagcagcctgcgccagctcggcaggctgcgtccgtcaacactgacctttcctttctggaaaaccagagctgccccagagctgggacttgtcctccaggacacacacaggtgccacagcagaacacagtgtttcttggtaattcctgcgacgtgcacatcagaaggcagatgtggctcccctgggtcaggctgagaagcaagtgagacattgtcaggggccaagttgcccttggtccaattgcttaacacctctagcattgcgtctgcacccatctrtccgtctgcctgcctgccagggcctatctggggaaagaaggcagaagtcaggcttagtgcaaatgagaacgtatctttgcccgtgggtaaccaagaagaagatgaaaaagtgacatcagcagagtgtgggagtgagctatcctcagatcgctccgtgtacatacagctgtggctgtttttcaaaattccgagaaagacttctctcccacctaggcttctgtggcagtattttctctggttttgtgcaatagttatcggcttctatggtactaactcttggtctccaggctaaaaagataaaccccagtcatccccaatagcttcaaaaagagaagggtcctttctctgtggcagttcatccataagatcctgccatttcgttagaatcaaaagactagtttcaagcaaggggttgggggtggaggacatgggtctatttctgaaccttccgatctgaatgagtcaaagaatacaaaatcaccccattatcatcattactgtcaaatcatagggcaatcaactccctgacacaggccagatggacatccgggagaaatccatagtactggagctggttcagagccccatggaattaactcggaataaaaccacgagagaaaggtaggcttgtgtgtttattcccccttctccctgttactttgacatgctctttgttttagtcaaataaacagaagccagcattcaatagtgaggagaagtggcccaaggttgtcctcgtgtcccagggcacaggggcaggtggactctgggccaccacggccatcagtctagggccaacagctgatttcactgaaggcgtccacaaggaagctggtggtcctgacttgtgaggtctcctcagaggtgccattcttgaaacctcccccagaagcgggactgcaccctcactttcatggaccccttcctccatagaaagttatttaaaattacattgtataggctgggcgcagtggctcacgcctgtaataccagcactttgggaggctgcaggaatcacctgaggtcaggagttggagaccagcctggccaacatggcgaaaccccgtctctactgaaaata

SEQ ID NO: 701199 - DNA, 1113 bp, Homo sapiens
ttgtaaacattttgctcactgtagcagaaagctctctgtgaacggagagctgtctaaacagggtggttggccacagaacctgcccagggatgcacctcctttccacattagcccatggcctttccagccctgaaatctgagttgcatgtgagtcacttagacaggccatctgtcaattattaagcgacatcagtgggcccagcaattccattctgcgtagtgcaaaggtcctccacacattccaggtctataccatcaaagtggctatttttctcaacctatccctgccctttaagaaaatgggggtcatttatttccagggatcactatttacaccccattggcaggtagtggagcccagtggttaataaacaaccttgttttaaatcccatctctgttgtttgcaagctgtgtgtctttcagaaactttacttaaatttcttgagcatcagtttcctcacaagggtgtggtcaagtgataatcaagtatttgtactttaaccctgtacctggctgatagcaagccctcagaaaagaattaacttagagtttttatacattccctccagtacaatgttcctaacatacaaggggcatatgtgtgtattatgagtgggaagaaggaaggaaggatgcaattgataaggcttgcattcaacattgctgtagtcaaaccctctttccttaggaagatctggatgtgccamcatttcttatatatcatatgtggaggtgacttaggtttttctttcagtacttcatcatttgaaagagcatttggtgataatgagcaggttctgaagtctgtgaactaaactaaaagtaaaaataaatgggacggtgaaattttgtttgtgccttaagggaactcccttttaccctcccactatgttgatgatgtcatgtttgttctaacatatcatctaacaattccctccattcattttttttctccttatttcttttcctttcaagtaacagtatcttcaacaatcgttcggctgttcagaaacttaaaaatcatgagacgattcttaaaggataggaactaacattgatcacacagtgtgaatcccacatctatatactggcaaatgatggcacaaacacca

SEQ ID NO: 701200 - DNA, 1113 bp, Homo sapiens
ttgtaaacattttgctcactgtagcagaaagctctctgtgaacggagagctgtctaaacagggtggttggccacagaacctgcccagggatgcacctcctttccacattagcccatggcctttccagccctgaaatctgagttgcatgtgagtcacttagacaggccatctgtcaattattaagcgacatcagtgggcccagcaattccattctgcgtagtgcaaaggtcctccacacattccaggtctataccatcaaagtggctatttttctcaacctatccctgccctttaagaaaatgggggtcatttatttccagggatcactatttacaccccattggcaggtagtggagcccagtggttaataaacaaccttgttttaaatcccatctctgttgtttgcaagctgtgtgtctttcagaaactttacttaaatttcttgagcatcagtttcctcacaagggtgtggtcaagtgataatcaagtatttgtactttaaccctgtacctggctgatagcaagccctcagaaaagaattaacttagagtttttatacattccctccagtacaatgttcctaacatacaaggggcatatgtgtgtattatgagtgggaagaaggaaggaaggatgcaattgataaggcttgcattcaacattgctgtagtcaaaccctctttccttaggaagatctggatgtgccaacatttcttatatatcatatgtggaggtgacttaggtttttctttcagtacttcatcatttgaaagagcatttggtgataatgagcaggttctgaagtctgtgaactaaactaaaagtaaaaataaatgggacggtgaaattttgtttgtgccttaagggaactcccttttaccctcccactatgttgatgatgtcatgtttgttctaacatatcatctaacaattccctccattcattttttttctccttatttcttttcctttcaagtaacagtatcttcaacaatcgttcggctgttcagraacttaaaaatcatgagacgattcttaaaggataggaactaacattgatcacacagtgtgaatcccacatctatatactggcaaatgatggcacaaacacca

SEQ ID NO: 701201 - DNA, 632 bp, Homo sapiens
caactttctcatacaaaaaattttcatttttgagtttatttcaggctctctgtcttgttctatctgtcaatgccacacttttctgactgctactactctaaaacgtgttttgatacctaatagggcatgttctgtctttgtttttaaattttttcttgaatgttctgtgacacgtataatattaaatatctttacagagaagccaagtatgaaagtatattattttacgtatttatcaatataaaactctaatctatgaattatgcattgcttttaattatctactatttccaccactatttggggctttttcatttcacattttatttgtgtgtgtgtgtgtgtgtgtgtgtgtgtgtgtrtatatataaaataaaaatggggtagtaaaaatcctatgggtttagtaatcaaaaggactagacttgagaccaggctctggcatttgccacctatatgacctgggggtatcattttctctttctgagcctcagtttcttcatttataaaatggagataacaacctatctcataaggtattgcgagggtactataagagaggacatctaaatagtttcacaaagtttctggcacatgtcacagagatattggaagctatggatgtaaaaaaa

SEQ ID NO: 701202 - DNA, 632 bp, Homo sapiens
caactttctcatacaaaaaattttcatttttgagtttatttcaggctctctgtcttgttctatctgtcaatgccacacttttctgactgctactactctaaaacgtgttttgatacctaatagggcatgttctgtctttgtttttaaattttttcttgaatgttctgtgacacgtataatattaaatatctttacagagaagccaagtatgaaagtatattattttacgtatttatcaatataaaactctaatctatgaattatgcattgcttttaattatctactatttccaccactatttggggctttttcatttcacattttatttgtgtgtgtgtgtgtgtgtgtgtgtgtgtgtgtatrtatataaaataaaaatggggtagtaaaaatcctatgggtttagtaatcaaaaggactagacttgagaccaggctctggcatttgccacctatatgacctgggggtatcattttctctttctgagcctcagtttcttcatttataaaatggagataacaacctatctcataaggtattgcgagggtactataagagaggacatctaaatagtttcacaaagtttctggcacatgtcacagagatattggaagctatggatgtaaaaaaa

SEQ ID NO: 701203 - DNA, 1390 bp, Homo sapiens
caaaacaaaatctccaataaattttagctcagtaatgttttgttattaagaagagactaaaaggaagaatcatttgtcccttataatcagcagtacatactagaaaaattgcaccccaatgggtctatttttccacaagaaataggacactattctcagtarataattctactacattttagaaacatgatcctactaaatgtaaagcaactcaatctgacttctctaaggcagactaagacatggccccaccctccaaggcccaaagtctagagaaagatctagatgtgtttgtgaatcgctaggtagagtgaatccccatggtagaggcacaggttcaatgaagagaacaggaccaagagaggatctttaatcatcaggccacattatagaagtggtcagggacactgagttgaagaggttctcatacaagatgcaccctctgcagcatcttactccacacagaagcatgtcatgtcaagccaccaatgccacaatgggctcagctagacctgggtcccaccaacagacagcaggcgaggcaggcctgtcttctctcctgcaggcagcaagttggctgtgtgaactaggagtcagctttgcaggcccaagtcttctctccctcccctttcttcctttttcctcctccccttcctttccatctagcctacttttcttgcctttctccttctcctttctcctctttccctttcttcttccctccctccattccttctacctccttttcttccatcttccttttttcctcttccccccttctgcctcccttcttatttcttctggctctgatccccacacacccattcactgtctctcctctctctctcgccaacacacccaacaaacacaccatacaacatttatatttggggtggtttaggagttccacatttgacttctgcctacatgtcttctcaatacagcttccaccacagtcttagactggggtgggaagggtttcaaggaactaacacagaatgctacaacagatgcagtatttgcttcccaggtggctggcaaatggtgtttgctccactgggggtacaagggagcaccaaacccctcactgaagaatttcacatgagctgatccaaccggaaaccatgttatagatgagctaagatttgagctgggctttgaatacagcataaacaattttgtatctggagaaatgagcacctgatgtgaacgtgggaaaggcccatattgtcaccgcatctctgccctcctgaagcagccagacgttaaaatcagagacatcttcaaatacgctctatactacttgaagccacccaataagttcttcatccttgagccctgtatatatttcaggctggaggactcagaagcagtgccaagaacgtattta

SEQ ID NO: 701204 - DNA, 1390 bp, Homo sapiens
caaaacaaaatctccaataaattttagctcagtaatgttttgttattaagaagagactaaaaggaagaatcatttgtcccttataatcagcagtacatactagaaaaattgcaccccaatgggtctatttttccacaagaaataggacactattctcagtagataattctactacattttagaaacatgatcctactaaatgtaaagcaactcaatctgacttctctaaggcagactaagacatggccccaccctccaaggcccaaagtctagagaaagatctagatgtgtttgtgaatcgctaggtagagtgaatccccatggtagaggcacaggttcaatgaagagaacaggaccaagagaggatctttaatcatcaggccacawtatagaagtggtcagggacactgagttgaagaggttctcatacaagatgcaccctctgcagcatcttactccacacagaagcatgtcatgtcaagccaccaatgccacaatgggctcagctagacctgggtcccaccaacagacagcaggcgaggcaggcctgtcttctctcctgcaggcagcaagttggctgtgtgaactaggagtcagctttgcaggcccaagtcttctctccctcccctttcttcctttttcctcctccccttcctttccatctagcctacttttcttgcctttctccttctcctttctcctctttccctttcttcttccctccctccattccttctacctccttttcttccatcttccttttttcctcttccccccttctgcctcccttcttatttcttctggctctgatccccacacacccattcactgtctctcctctctctctcgccaacacacccaacaaacacaccatacaacatttatatttggggtggtttaggagttccacatttgacttctgcctacatgtcttctcaatacagcttccaccacagtcttagactggggtgggaagggtttcaaggaactaacacagaatgctacaacagatgcagtatttgcttcccaggtggctggcaaatggtgtttgctccactgggggtacaagggagcaccaaacccctcactgaagaatttcacatgagctgatccaaccggaaaccatgttatagatgagctaagatttgagctgggctttgaatacagcataaacaattttgtatctggagaaatgagcacctgatgtgaacgtgggaaaggcccatattgtcaccgcatctctgccctcctgaagcagccagacgttaaaatcagagacatcttcaaatacgctctatactacttgaagccacccaataagttcttcatccttgagccctgtatatatttcaggctggaggactcagaagcagtgccaagaacgtattta

SEQ ID NO: 701205 - DNA, 581 bp, Homo sapiens
gattgtgatggctgcctcctttgaaccacaaaagccctcttttttccctcctcttaccgtgtatcataaacttcccaatgggtacttttcttatcctccccaaaacacctacgattcccccrgctggatacccaatttatctttgtctttcaagaacgtttctccatttatttttgcagacctctttgtataaatctgaaggcccacatattaaacaaaggaagcattttcccaaataatactgatatcaatagtatactaatggatacaattatatttttattctgatttgattatgaaaacatttagagaccacttataactacattttttccaatctttttctcctattttcagccttacttcatccccttgggaactctattatatagttatggtatattctccttacatttacctcaacacaaacacacacacacacacaaatacacacacaaccatataaattcatataaatataaggtgatgttttatgtatggttttctaaaattatttgactgttattagaatttcagtgtattttataactggtttttacaaaaactatttttaaccattc

SEQ ID NO: 701206 - DNA, 587 bp, Homo sapiens
gatttgttttatttcagaaggaaagccagtgaagtcttgctctaaaggagctcccttamctgacaatgcagaatgagttcattctgaagtcaggggacaatgtttacatctcctggttttctcctggggctgtcatttgccatgggcatgatgaccgctgtgtgtagactcagcgtttcttgttccaggtcccccaggtggaagctggcatatgtgagcagactcatcctcatcggaagagagtatctagaagtggccctggtgacattagccactggtaagctgtaggagcaagccctgagcactgagatgcctccacagcagcagccttctcctctttccatcagatctgctgagatctgatacagagcttctctctcacttctcttatttacaatgaattggtatagaagccctgttatcaacttagttcattctagtccattacacccatcattaacagtggcttgatgtacttagaactcccagaaaatacctagagcctcctcgacccaagtatcacaaattttaaaccaacaagatgttgctagggtacttgtgttagtcaggattctccagggacacaa

SEQ ID NO: 701207 - DNA, 587 bp, Homo sapiens
gatttgttttatttcagaaggaaagccagtgaagtcttgctctaaaggagctcccttacctgacaatgcagaatgagttcattctgaagtcaggggacaatgtttacatctcctggttttctcctggggctgtcatttgccatgggcatgatgaccgctgtgtgtagactcagcgtttcttgttccaggtcccccaggtggaagctggcatatgtgagcagactcatcctcatcggaagagagtatctagaagtggccctggtgacattagccactggtaagctgtaggagcaagccctgagcactgagatgcctccacagyagcagccttctcctctttccatcagatctgctgagatctgatacagagcttctctctcacttctcttatttacaatgaattggtatagaagccctgttatcaacttagttcattctagtccattacacccatcattaacagtggcttgatgtacttagaactcccagaaaatacctagagcctcctcgacccaagtatcacaaattttaaaccaacaagatgttgctagggtacttgtgttagtcaggattctccagggacacaa

SEQ ID NO: 701208 - DNA, 918 bp, Homo sapiens
ccttccttatcttggtttattctctttttttgctgaagttttctcagaaaagtatccttttgagtctctaaaaaatatctttggatataagatccaaacatttcttttgtttcttgactattgtatgaaccgcctttgaagataatacttacgatcttatttgttaagtcattgacatcctaagtgttttctatgaaacctctaggatttctcaacccagcacagctgacatttgggtctgggtaattctttgttgggggcactgccctgtgtgtggtaggaagctcagcagcatccctgcctctccccactaacactagcagtgtacctactgctctccctcactggcgatatccaaaaatgtgtccagacattaccaaatatctgctgggaccccaacgtcacctctggttgggaagcagtgctctagttttagaggtaactatgatgagcatccttgaagaaaaatccatgattatcaaataagaagactagaacagactggaaatgttcacttaattctgttgagcttctgattagattcaggcaagttgactttaagatcccttctaactttgtgattataggatttaatagaatcacctatgattaataggargacttcctgctggcttcatctgctaagaaatactgaaactttatctaatgcagtgtcttggtcctgtttttagcttcccaaatgattcagcagtctcatgataatccaagtaactctctgtgtgaagcacctttgaacatttcacgtgatactttgtgttcaggtaaaatttttattttcctttctgtgatatgtttaagttttgagaataatatgattttctgatttagaatttcatgtagcaacttctgatgagtaaaataattagttaaaactagaacttctaaatttccccctga

SEQ ID NO: 701209 - DNA, 918 bp, Homo sapiens
ccttccttatcttggtttattctctttttttgctgaagttttctcagaaaagtatccttttgagtctctaaaaaatatctttggatataagatccaaacatttcttttgtttcttgactattgtatgaaccgcctttgaagataatacttacgatcttatttgttaagtcattgacatcctaagtgttttctatgaaacctctaggatttctcaacccagcacagctgacatttgggtctgggtaattctttgttgggggcactgccctgtgtgtggtaggaagctcagcagcatccctgcctctccccactaacactagcagtgtacctactgctctccctcactggcgatatccaaaaatgtgtccagacattaccaaatatctgctgggaccccaacgtcacctctggttgggaagcagtgctctagttttagaggtaactatgatgagcatccttgaagaaaaatccatgattatcaaataagaagactagaacagactggaaatgttcacttaattctgttgagcttctgattagattcaggcaagttgactttaagatcccttctaactttgtgattataggatttaatagaatcacctatgattaataggaggacttcctgctggcttcrtctgctaagaaatactgaaactttatctaatgcagtgtcttggtcctgtttttagcttcccaaatgattcagcagtctcatgataatccaagtaactctctgtgtgaagcacctttgaacatttcacgtgatactttgtgttcaggtaaaatttttattttcctttctgtgatatgtttaagttttgagaataatatgattttctgatttagaatttcatgtagcaacttctgatgagtaaaataattagttaaaactagaacttctaaatttccccctga

SEQ ID NO: 701210 - DNA, 1052 bp, Homo sapiens
gggggtaattcacaatgtaatgtctgcctcataaatttgtcttgaatactaagtgtgcagatgtaaacgattgagcatagttcctggtgcaccggaaacttcctcatctgtaggagaagacttggatttaattgtattctagttaattgtatttttgtttttgagagagtctctctgtcacccaggctggagtgcagtggcacaatctcggctcactgcatcctccgcctcccgagttcacgccattctcctgcctcagcctccctagyagctgggactacaggtgtccaccaacacgcctggctacttttttatattttttagtagagacggggtttcaccgtgttggccaggatggtcttcatctcctgacctcgtgatccgcgtgcctcagcctcccaaagtgttgggattacaggcatgagccactacacccggcttctagcctgtgattctgatttctcctctaattcagatagatcatgtgttcagtagggttttggcaccacctataatcatgagaaatagcaaaataaaagccagaggtgtgcggattgttaagcaaaagccctgagtgtctgttaggctccctcagtgatctgagatgcaaagtgcagggcctcatcggcgttgaagatggagatggttgggaagacagtgagcagccaggaagaggagcccagccggaggggaactcagaagccaagtgcagggagtcagggctcccctgaagtggggatttggggaacaattgacaagacagtcagaacaatgcaggcagggaacacccctttcccccagagccgtggttactaaggcaggtgtcccccttacagggcccatctgaaaggtacatactggcacctgctaccttcactgattggtccgcaaaatccaaccatggctcagaaatcaaacaactgacttacaggcaacctttccgatcataacccattgtgaactgaagaccacacaaatataaaagccagtcctctccactaagaagtcaaaagtcattgttttccagagatcaaaaacaaattaaaagccaa

SEQ ID NO: 701211 - DNA, 1052 bp, Homo sapiens
gggggtaattcacaatgtaatgtctgcctcataaatttgtcttgaatactaagtgtgcagatgtaaacgattgagcatagttcctggtgcaccggaaacttcctcatctgtaggagaagacttggatttaattgtattctagttaattgtatttttgtttttgagagagtctctctgtcacccaggctggagtgcagtggcacaatctcggctcactgcatcctccgcctcccgagttcacgccattctcctgcctcagcctccctagcagctgggactacaggtgtccaccaacacgcctggctacttttttatattttttagtagagacggggtttcaccgtgttggccaggatggtcttcatctcctgacctcgtgatccgcgtgcctcagcctcccaaagtgttgggattacaggcatgagccactacacccggcttctagcctgtgattytgatttctcctctaattcagatagatcatgtgttcagtagggttttggcaccacctataatcatgagaaatagcaaaataaaagccagaggtgtgcggattgttaagcaaaagccctgagtgtctgttaggctccctcagtgatctgagatgcaaagtgcagggcctcatcggcgttgaagatggagatggttgggaagacagtgagcagccaggaagaggagcccagccggaggggaactcagaagccaagtgcagggagtcagggctcccctgaagtggggatttggggaacaattgacaagacagtcagaacaatgcaggcagggaacacccctttcccccagagccgtggttactaaggcaggtgtcccccttacagggcccatctgaaaggtacatactggcacctgctaccttcactgattggtccgcaaaatccaaccatggctcagaaatcaaacaactgacttacaggcaacctttccgatcataacccattgtgaactgaagaccacacaaatataaaagccagtcctctccactaagaagtcaaaagtcattgttttccagagatcaaaaacaaattaaaagccaa

SEQ ID NO: 701212 - DNA, 1052 bp, Homo sapiens
gggggtaattcacaatgtaatgtctgcctcataaatttgtcttgaatactaagtgtgcagatgtaaacgattgagcatagttcctggtgcaccggaaacttcctcatctgtaggagaagacttggatttaattgtattctagttaattgtatttttgtttttgagagagtctctctgtcacccaggctggagtgcagtggcacaatctcggctcactgcatcctccgcctcccgagttcacgccattctcctgcctcagcctccctagcagctgggactacaggtgtccaccaacacgcctggctacttttttatattttttagtagagacggggtttcaccgtgttggccaggatggtcttcatctcctgacctcgtgatccgcgtgcctcagcctcccaaagtgttgggattacaggcatgagccactacacccggcttctagcctgtgattctgatttctcctctaattcagrtagatcatgtgttcagtagggttttggcaccacctataatcatgagaaatagcaaaataaaagccagaggtgtgcggattgttaagcaaaagccctgagtgtctgttaggctccctcagtgatctgagatgcaaagtgcagggcctcatcggcgttgaagatggagatggttgggaagacagtgagcagccaggaagaggagcccagccggaggggaactcagaagccaagtgcagggagtcagggctcccctgaagtggggatttggggaacaattgacaagacagtcagaacaatgcaggcagggaacacccctttcccccagagccgtggttactaaggcaggtgtcccccttacagggcccatctgaaaggtacatactggcacctgctaccttcactgattggtccgcaaaatccaaccatggctcagaaatcaaacaactgacttacaggcaacctttccgatcataacccattgtgaactgaagaccacacaaatataaaagccagtcctctccactaagaagtcaaaagtcattgttttccagagatcaaaaacaaattaaaagccaa

SEQ ID NO: 701213 - DNA, 675 bp, Homo sapiens
tcagaattcacaaaccatttctttgcaccaactacaaagtaaggtagaagcacaattaaagscatcagccatgtaatcttccaagatcacaggaaaagataaagaactcttactactggacttaaatgtcaaaagacaaatcctcttgtctttactacaagaaataaaagaacaaaaaaagtgcattgtattaacatataacactgtttttcttagtttaaaataatcaaattctattttgtaaaagtaaatacaataaaaaataaatagaagggcaagcttaatcaaaccaacatactgttggcaaaaagttacttactattggtgtcttagacacagttcattagttaaaaatctgggaggcaggggtgggtaggttggtttttttctgtacccgttttgtttatcataaagtgacttgtaccctgatggctggtttcactttccctctctacaagtcatgcctatactcaagaaaagaagtgtcaatctcaaatttacagtcaaaatactgaagcgaggaatataaaatatgtcaaattacttcaaaatgactcaggcttagcacagaaaatgcacaaaggagcatacgtctattcacattgtttactcattcaatagctatttatagtgcaacatataaaatcctagaagcttagggaactatattaatga

SEQ ID NO: 701214 - DNA, 329 bp, Homo sapiens
aatgtcagggcagaaggccgggatcgagccagggaagcctgacaagcaacactcaaaacgttagcttttatccttagagcactggaaagccactgaaggtgttttgactcagaagtgtgatggtgatgcatggggcttttgggaaagccctctactgatgctagcgaggatgtgtcagaacttgggttgaaagactagtgacaagactgttacagcagtccagatgataccrtggaaaggggaagcaatagaatctgaggaatatttaggaagtagaaagtataggacttggtggtggtttggatgtgcagaataaaaaatggagagga

SEQ ID NO: 701215 - DNA, 631 bp, Homo sapiens
attttacttaacattgctttaaatacagtacagtatatcaagcataatttattaaattttcatattgtttaaaactatctgaaaatatccctgaatgattttttgtttgcttgtttttttgagaccgagtctcactctgttgccaggctggagtgcagtggcacgatctcggctcactgcaatctccgcctccggggttcaagcaattctcctgcctcagcctcctgagtagctggaattgcaggcatacgccaccacacccagctaatttttgtattttcagtagagacagggtttcaccatgttggccaggatggtctcaatctcctgacctcaggtgatctgtcctcccaaaatgctgagattacaggcgygatcctgaatgatttttaatgctttgaattgggtcaccctaaggagatgtttaataacagataagagtaattgttcatagtcttatagttgttaaataatgaaaactcaaatcaaactttctttaaagaaatacagataatttttcaactcagctacatagttccaggcacaactgaattttgctgctaaaaaattcattagaaatatttttcccttcctcctggctctttttcctggattcaggtagctttttttt

SEQ ID NO: 701216 - DNA, 1271 bp, Homo sapiens
tgtattaacttattcattcctcacaattacgctcatgaggtgaatactattgttacccacactttacagaggattgaagaaagagtaggcggcttgccaaatgtcccaaaaatggtaaatgtagattaaaatggaaacccagctgcctttggggcccgtggactccagtgctgtggtatgctgtgataattttgtttctcctgccacaggcacattttctatgtgctataaatatccacttgtaagacagtgttaatctaaaactgctctgtattttaacatttaagaaatgacatcttatcccaagaaattttcaccattaaaaaatggaaaaaattgtcatttagtagtaaaatttctgagaataatatttgataaagcaagttgtggtttactttaccaatatttgttcaagtttaatagatgctaaaatgctgagatcagtttccattgttataacactgagatgggrtatgttcaataaaatttttagaatattattggaaaaagatagatttgatgacaactatgagctctaatttcagctctgatatttataaaccttatggatttatatgagtaacaatcattctgagtccctctgaaccttatttcttttacctttaaaaaggttataatggtgtctgacttgtgaagatcaaataaggaacatgcaaaatgcctagcacaatgcctggtgcataatagacattcagtaaagattagatgctgtagctttccttagattctatttatcaggaaaaagtaaatgggttaaactcttcattatatacagctcattccattcttttagtatattcagtcaatcagtaattgagctgttccataaataagacaaactacttgtgttgataatatggaacaaaatagacattatttttgtcttcatggagattatattctagcagggagaaaagacatttaacaactaatcatgaaggtaaatatattacataatgtgatgaaatttgaaggaaaaactagttacagtgataaaaatgtgctgggaaattagaatatctctattgaggtacagcatgcagttggtgattgaatttgtttaaagaatgtagtgtgtcaggcttatcaggactcagcaacagggtggccaatacttctaactttcaggcttacgaaacaacgatttgatatctatctgaattactggtaaacatctcaaaattaacatgataattttttcttttccttatttatactctccttttaatctttcaataaatgactccttc

SEQ ID NO: 701217 - DNA, 1271 bp, Homo sapiens
tgtattaacttattcattcctcacaattacgctcatgaggtgaatactattgttacccacactttacagaggattgaagaaagagtaggcggcttgccaaatgtcccaaaaatggtaaatgtagattaaaatggaaacccagctgcctttggggcccgtggactccagtgctgtggtatgctgtgataattttgtttctcctgccacaggcacattttctatgtgctataaatatccacttgtaagacagtgttaatctaaaactgctctgtattttaacatttaagaaatgacatcttatcccaagaaattttcaccattaaaaaatggaaaaaattgtcatttagtagtaaaatttctgagaataatatttgataaagcaagttgtggtttactttaccaatatttgttcaagtttaatagatgctaaaatgctgagatcagtttccattgttataacactgagatgggatatgttcaataaaatttttagaatattattggaaaaagatagatttgatgacaactatgagctctaatttcagctctgatatttataaaccttatggatttatatgagtaacaatcattctgagtccctctgaaccttatttcttttacctttaaaaaggttataatggtgtctgacttgtgaagatcaaataaggaacatgcaaaatgcctagcacaatgcctggtgcataatagacattcagtaaagattagatgctgtagctttccttagattctatttatcaggaaaaagtaaatgggttaaactcttcattatatacagctcattccattcttttagtatattcagtcaatcartaattgagctgttccataaataagacaaactacttgtgttgataatatggaacaaaatagacattatttttgtcttcatggagattatattctagcagggagaaaagacatttaacaactaatcatgaaggtaaatatattacataatgtgatgaaatttgaaggaaaaactagttacagtgataaaaatgtgctgggaaattagaatatctctattgaggtacagcatgcagttggtgattgaatttgtttaaagaatgtagtgtgtcaggcttatcaggactcagcaacagggtggccaatacttctaactttcaggcttacgaaacaacgatttgatatctatctgaattactggtaaacatctcaaaattaacatgataattttttcttttccttatttatactctccttttaatctttcaataaatgactccttc

SEQ ID NO: 701218 - DNA, 1405 bp, Homo sapiens
atcattgtgataacttgttttgaattttagaggaaatacatctaacttctaagcattttagctttaaaactagcttacttgttgttaatcattccagttttctgataagtgtattgaaaggtataatactgtaaaacattcacatatgctttagccatgtcccacaacttttgatatgtgctgttctcattgcccattgttcttttttttttagacagagtctcactctgttggccaggctggagtgcagtgacatgatcccggctccctgcaacctctgcctcctgagttcaaatgattctcctgcctcaacctcctgagtagctgggattacatgcaccacccctggctaatttttgtttttttagtagagatggggtttcatcatattagccaggctggtctcaaattcctggcctcaagtgatctgcctgcctcaacctcccaaagcgctgaggttacaggcatgagccacctcacccagccccattgttctaaatatttcataattgttaagactttctttgtaattcaaaattatttagtaatatgttacatatacttataggattttaagactatatttatactccttatttctaatttgactgcattgtggccatagaaggtattctgtatgatactgagatttaattggtagtctagcacttggccaatttttgtcagtgttccacatatgtttgagaaaaacgtgtattctctgagcagtgagagttcgtttagatttctataatttttcttcatctttcaagctctaagtgaattgtgttaaattatttacttataaatattgagttttttatttcttctgccattttgcttccgtttatataattatattagtagtgcatatatgttcatgagagttataatttttaatgcttttggtttattttttaattttcataaaatatcctatgatgccataggaatgttttctcaaattcaattttttagattgattgccacttaagcactttttgatgctgttgtttacaattgcttgatagttttcaacctttcttttccccaaacattctgtgtctttctgtattaagaatgtcttgaccaggcacggtggctcacgcttgtaatggcagcactttgggaggccgaggcaggtggatcacaaggtcaggagattaagaccatcctggctaacacggtgaaaccacgtctctactaaaaatacaaaamatcaggtagccgtggtggcgggcgcctgtagtcccagctactcgggaggctgaggcaggagaatagcatgaaccctggaggcggagcttgcagtgagccgagatcacaccactgcacaccagcctaggcaacaaagcaagactcggtctcaaaaaaaaaaaaaaaaaaagtcctttgttggaaaaca

SEQ ID NO: 701219 - DNA, 1417 bp, Homo sapiens
ttagagacagatatataattttttttttttttgagacgagtctcactctgttgcccaggctagagtgcagtggcacgatcttggctcactgcaacctccacctcctgggtttaagcagttctgcctcagcctcctgagtagctgggactacaggcgcccaccaccatgcccagctaatttttacatttttagtagagacggggtttcaccatattggccaggctgatctcaaactcttgaccttgtgatccgcccacctcggcctcccaaagtgctgggattacaggcatgagtcaccacgcccagccagatacagatatataaattttatataagttaatattatatataattgtatttatatagttatgcagtaaaatataaatattcatgttattttatttaataatgtatattttatattatctgtttataattatacatttatatatttgatattgttatacaaatatrtggttatataatatggtatagatataaatataaatttatttttactgtgtaatatagaaatagatataattttatttctcctaaccactctgaaatatatatatgtgtgtgtgtgtgtatatatatgtgtgtgtgtgtgtatatatatatatatatatatatatatttatttatttatttatttatttatttttttggagacagagtctcgctctgtcacccagcaggctggagtgcagtggtgcaatcttgtctcactgcaacctccacgttccgggttcaagcaattctcctgtttcagcctcccaagtagctgggactataggcagtttttatatttttagtatagacagggtttcaccatattggtcaggctggtcttgaattcctgacctcaggtgatccacctgcctcagcctctcaaactgctaggattataggcgtgagccactgcgcctggcctgaaatagatactattaatgtcaatttatagaagaaagaaagacataacaaagtttagtaactaactcaagctgctgcagaaagtgtaagcctgatagaatttacatcagtttcagttttttaaaaatttgttaataaagtttatgttgttatcccatcatcatgccagaattaagttagaaaaaaatgtacacatgcatctcacgtctccagactgagtttggagatgttcagtggtaaaatcatgataatagtgatggaatagtagtgatgacaaaataatgaagggttttagaaatagtaaaactgtactagaaatttcaaaatctagattctgattatttttcacatgaccttaggaaagccactcactatgtacttcctatatttttcacatgagcgaaatcgatctctggttctcagtcttagatacttgtgcagctgaggcctttaagagtatcagaggagatctgagactatt

SEQ ID NO: 701220 - DNA, 611 bp, Homo sapiens
tgtcagtggtattaaaagttgcatttggaatgattatccttgcatattaattataagctggctgggatgcagaggaatttcaaggaaatgatagtctaatcatgtgttattttaatttcagaaaagatcctttaagaaacaaattgcattgcgacgtactttgtaatcagcccatgcattaatttagatagatgacctcaaatcctttaaatccactatcactggcaataattaaaaggactctataaggccgtttactaagttttgtaccaggacacaatggaagatggatttgtttacaaaatagtaattgaatacaatagaaagctgatagaaagctcatctcrttagttgtaatggcgattggataatttgtgccgtccactacttggtttgtgtgtaagacttgcataagagaagaaaaacaggaggaaaggtaagaaagaaattaccactaacagttcttctccacaattgcctaatttcttttggcattctaacggatgttacttatggctccatatagcaggtgatttttcctttgttaagcgtaggcataaaagtaataatgtggcaaaaattagcaattgttaaatttgttgctgtattgt

SEQ ID NO: 701221 - DNA, 1232 bp, Homo sapiens
caattcaacccccactcttcccttgatgtctttgtccaatgcttgttttgtattcctcctgtcagctttcctagagcttcatgtgcactgataaccactataccctgagctgccagcaccaatcccaagctctctggagagttttatgctacattatcctcagctgttgtttgtctaggatcttctcttctacttctgcatgaacccatcaagcttgccttgtctcaaggagcaatggaaattcaatataaaaatgctaatttaatatggagacctattagtcaaagtctaataggttccagggaatagcaggaagggtcaactgtgagcttccctcccaagacactttcagtccagcagcacagagacagccggaggggagctgagggaggaggccattcaagaagacaccttccaaactgagattgcaggagtgtgggacctaagagcaaggtagtcctaaaggcaagatgccttaactttgcataggccaatctgaggcccaaaaggtgaaatgatttgctattagcagagatcagcagagttgggaaggtgtaatattagcaggagctaataataatgttcacaatatttcatgaaygcttgctaagagttaggacctgtgcagagagcattacattcagtctgtcatgtcatcctcactttaatccgagaggttggtcctattattatataagagtaactcttataatttccacttataaggtggaaattaagagattaaattactttccaaggtcacagagtcagagagtcagagagttaggctgaatcctgggttctgccagcacagtctgtgtacctttggccttctaccatttttgtaacttccttcaaataagaagaaaacaataaactacaataaagtgaaaacaccttacccgtatgcctgatttccttgctcttgtgaatcctgagcctggccttttctgtttcaggactccgggtgtcattaaaagcatccatcacagaagagatatttccctaaagggccttcgttccctcacttgtaaaatgagagggtcggaccaggtaatctcagaggtgctttctggttcttacatactatgattccaaacaaggataactatccttgaagactgtaaatttcaaccctttttacaagccctacagaggaaagagaggaaagaaaaattgatcacatgcttgtgcaaatttaagtaatagagaacagagatgctacccttgtg

SEQ ID NO: 701222 - DNA, 1232 bp, Homo sapiens
caattcaacccccactcttcccttgatgtctttgtccaatgcttgttttgtattcctcctgtcagctttcctagagcttcatgtgcactgataaccactataccctgagctgccagcaccaatcccaagctctctggagagttttatgctacattatcctcagctgttgtttgtctaggatcttctcttctacttctgcatgaacccatcaagcttgccttgtctcaaggagcaatggaaattcaatataaaaatgctaatttaatatggagacctattagtcaaagtctaataggttccagggaatagcaggaagggtcaactgtgagcttccctcccaagacactttcagtccagcagcacagagacagccggaggggagctgagggaggaggccattcaagaagacaccttccaaactgagattgcaggagtgtgggacctaagagcaaggtagtcctaaaggcaagatgccttaactttgcataggccaatctgaggcccaaaaggtgaaatgatttgctattagcagagatcagcagagttgggaaggtgtaatattagcaggagctaataataatgttcacaatatttcatgaatgcttgytaagagttaggacctgtgcagagagcattacattcagtctgtcatgtcatcctcactttaatccgagaggttggtcctattattatataagagtaactcttataatttccacttataaggtggaaattaagagattaaattactttccaaggtcacagagtcagagagtcagagagttaggctgaatcctgggttctgccagcacagtctgtgtacctttggccttctaccatttttgtaacttccttcaaataagaagaaaacaataaactacaataaagtgaaaacaccttacccgtatgcctgatttccttgctcttgtgaatcctgagcctggccttttctgtttcaggactccgggtgtcattaaaagcatccatcacagaagagatatttccctaaagggccttcgttccctcacttgtaaaatgagagggtcggaccaggtaatctcagaggtgctttctggttcttacatactatgattccaaacaaggataactatccttgaagactgtaaatttcaaccctttttacaagccctacagaggaaagagaggaaagaaaaattgatcacatgcttgtgcaaatttaagtaatagagaacagagatgctacccttgtg

SEQ ID NO: 701223 - DNA, 1039 bp, Homo sapiens
gaatgaagtaggcactcatggaatttcctgactatcaaccaaaaatagtttcaaacaggcaactaactcagtcactgtatcatcaaataacatggctcttctaaaactactaaatggacttttccccactattatattttaatgacaaaacaatcagtcgttgagagccaatttcttataggaaatattttctatgtagttccaataaaaatctggcaaaaatgaacaagttgctttgtcttaggttttttttggttagttttgttttgttttttaagataaaacctaagggattgttcgtgtttaagccagcatgctataattaggtttatgttcattcataaaagatactttgaaaggcaaaatgagactcaatatgctccagattaatataatattttttgtctatttgtagaattgagcaaaatggaaagtcaagtgaattggtattttaaaatggataaaaaatcaggggttcataaatattttgcataaaggccagataaatactttgttctttccagaccatatggtctctgtgacaactacccaattctgcccttgtatcaggaaagcagcctagactgtatataaatgaatgcatgtggctatgttccaataaaactttatttacaaaaacagtacaggggttggatatagtccatggcctgtgctttgctgacctctgaaataggagaacaataaaatatgatgataacatggaaatggtgaagccmagatacttttttatagtttggtaataagccttcacatagttttgtccaacattcaggtacaattagattccaggctacatcctgagttattaaaaaaataggatgactgttcctctggttcttttgaaatgacctcaaataaatattcctgaagacatgtttaatgatttgtagtgaaatgttaaaaccaacagtgttttcattgcccctttacattagcgtaaggacttccataatctggtatcttgtcatgatgtgcttttgaggcagtagactggaaacatctacaggtaaatttgaag

SEQ ID NO: 701224 - DNA, 1533 bp, Homo sapiens
taaaatagtgtgaaatatatagtctcaattttctaaaatatctgttacaaaaaatgcatcagaaaaataatgatatggtttggctatgtcgccacccaaatctcatcttgaattgtagttcccataatccccacgtgttataggagggacctattgggaggtaactgaatcatgggagcagttacgtccacgttgctctctggatagtgagtgagttctcacgagatctcatggttttataaggggcttttcccctcttgcttggcacttcttcttgctgccaccatgtgaagaaggacgtgtttgcttccccttccgccatgattgtgaggcctccccagccacgtggaactgtgagtctattaaacctctttttttctttataaattatccagtcttgggtatttcttcatagcagtatgaaaactgactaataaaaataatgataagataggagaataaagagagtggctatttctgagtcatggagttataggtcattgtaattttcttcagcattttcctcttttttatagcagtatattcagaaagttaagaaagcaacaaatagtgaagatgaagaagatgaaaaggaaggagatgaggaggagggaagaataaggtttgcctctcttcactccttttagtgggaattggtcaaaattactagagcttcagagtattcacatggttgcaggcccctgcaaggtaaaattaacatggcaggattgtggtcaaccccactctttcctcaccataactaccactaccatatgtgaagatatttaattatgaaaaccaccaaaggcaatgacatatactctggtaatgaagggattctaggttctacattccaatcatgtagcttgggcagtcacagaatatttttaaacttcagttttaattataacataaattgattgaatgagataatctcattaccttagtaccttaattacccgtttgttttatttagtaatattgaggaaaataaggagaaacaaattctgtttttataaatcaagggtatctaaaaagaaagtgttctagagtttaaaatgttatgtttaaaatgtttttgtctttaacttttgtgaaaccattgtaaaacattaagtaataatcatcaaaattatggaaacttcctggaatcaagattagaattataaacaatatactataccgtagaattgtcttatttgaagttggataaaataaccactagttgaagttgacacctggatcacattcattaacatcagcactaaggggagaatgtgaggtaagcccgatcctctacgtagatattttttaaaaacagacattttttcaaaatcatataaggacagtttctaccacttaaaatgttttaatgcctttacataatcgacwttcattaagggttttctagagcatataaggaaagaaccttaaaatcccaaggttatagtctcttgagattctactcaagcaacagagtattattcaaaggacaatgaatgtgctacacacgttgtagttctgaaacagtga

SEQ ID NO: 701225 - DNA, 1253 bp, Homo sapiens
ctagatcccacatcctcatccagttactgtcccatttttctgctttcctttatagcaacatttaagagctgttaatactgtctccattcctctcattcttctgaaccaattcaatcaggcttatcttcttaacactccaggaaatagctcttttcacagcctcagtgacctctacaccaccaaattaaaggtccaaacttcagttctcatcttatagggactagtaggagaatttgagacagtggatcactccttccttcttgagagtcagaacttcctaaccacatacgtaaaatagtgaaaaacctcatccctaacaccctagactccaactcttctctttcaccaggctctccccctcacaccgcttcactgaagccctgcacaacacctattgccacgacatatagatttacttttcatgaaatgtaaactctgtgattttggtcatgttacttaacctatcagaactttattttctattatccatgaaaatggcatgattataaataagctggttgcctgagtggtttcaaggattaaatgaaaaaaaaaataaaaaaacaaaacacaaaaaacaaaaccacatatgtaactactactattaccattgtatagatagttcctcattttctttatgacctcaccctagtcctaccaggttattaacaaaaaaaatattgaattatacttatattctggctcttatttacccagaggaagtcttattttgttcatttgaaagacgtctcaagtagtactaacatacatcacaatatctgtacactcctgtgcaggactaagcataaggataaaaaaagaaatattttttcagtcaaagaaatcagtgaattgtggtrtgttaactgaaaggtggacaatagaggtataggctgtttactgtacattcagtttgctacaatgactggtccactatgtgaaatcaatgactattaatttataatgattaaccttaaatctttaagaagacacagctctatacaagtattatatagctcagtctctcaatgattcttacaaaatgaaaaagaattccagggagataataaagtattggtgcttttcagatagcactaataaatcaggagaacaccaggttaatcattcctataacaatgcaaagaagcaaactgaaataattcactaatatcaaagaatactgtggtataaaaccaggtaaaagaacctcaggggtgttttgtctgttttcaagtctagcacattttaatttt

SEQ ID NO: 701226 - DNA, 629 bp, Homo sapiens
ttgcttcttatggatgaaagtggttcttgagatagaatctcctcctcttgaagatgctgtgaacattgttgaaatggcaagtaaggactcagaatactacataaattcagtgaataaagcagtagcaagatttgagagatcaattccaattttgaaagaagttctactgtgggtaaaaggctataaaacagaattgcatgctacagatgagtcaactgatctcacaaacctcagtgtcatctttttagaaattgccacagccaccccaacctttggcaaccaccaccctaaatcartcttcagaaatcagcatctaggcaagaccctctcccagcaaaaagagattatggctggctgaaggctcagacaattagtagcatttttcgtaacaaagtattttttaattaaggagtgtacattttcttagacataatgctattgcacacttaatagactacagtacagtgtaaacatcacttttataagcattgaaatatcaaaaaatgtgtgtgactctctttattgaaatactggctttattgcagtggtctggaactaaacccacaaaagctacaaggtatgctcatagcttgccagaaacccaatagttaattaagaaatgttaatag

SEQ ID NO: 701227 - DNA, 1300 bp, Homo sapiens
ttttatgccatttgattcgttagctgtgtaggttttctaaaacatctattaattgaactttcccattgctatggtatgaatgtttatgttcctcaaaaatacatatttggatatcctcacccacaacatgatggtattagaaggtgggtatttaagaggtaattagatcatgggggcagagcactcatgagtgggattagtgcttttataaagagacccaagagatacccctcaccccttccaccatgtgaggatacaacaagaagtcacatctgtgagccagaaagtgggccttcaccagacaccacatctttcagtaccttgatcttggacttcccagtctctgaaactgtaagcaataaatttctattgtttataaactactcagttrattgatatttttatggcaactcaaatagaataagacacaaagtgactaaaactttttctataattatttctgataattatagaatcacgatacaaattttgtttcagctgaatcttacacaaatcgggtaactctttttaagaaaaataatacaacactggaaatacttaatgaggtccaacaatatgaacacaaacctaaggctccatccagggcattaaaaggattgcctattaaaaggagtccctataaatgaattaaactcagctgaacctcagtttaatctaaataataataataaaataacttgttccattgaaaccttgagagggaaatataaataagtacatgaaagaggctaagaaaagggcctggaacacagtcaaccctcaatgaattattagttattgatggcttttgacacttctatttgatgcaaatagaagaattagaaagttttttgtttgtttgttccccaaagaatcatacccagattcctctgtttcagaattaagcaatttaataaaggaagaggatattcaaaccacatctctgccacggattccatattagaatccattaatttatcctgtttgtggatttgccaaagacatgaaagcaatcacatactaattaaagcatttcagagtgacatagattcactcattttgtgagtccccaaagtgccccgcaaacttctttcatacagggatcatttcaccactgaaatgaggccatttccagggctgatagcagcagccaaatagacagtctgcacagaacatatggcacaacggtggggagaggaatgattttggtgaagaagagcagaacaattctcacacttgtgaaatatattttgcatgtctttaagacttattcatagccaaaataacaaaaaatatcagg

SEQ ID NO: 701228 - DNA, 1181 bp, Homo sapiens
aaattaggatgaaaactcatgatcatttacagtattcccctttttcctttggtcatagcagtattttgttacctaatttaaagtggaacattgtacctaacaattacatgttttgaagtaccagccaaatataatgaaaacttctggatcttgatcagaaacaattagatttctctcaaaatcactccttattaaagatccgaaatagtgtcatggtttgtcattacaaagatctgggtttgaaccctgtctcaaccagtttcaaactatgccaccgggacacagtaatcttgttctacataaaatagaaataaaataatctactttataggattgttacaaggaaacatgataatgcttgcaaagggcttagcacagtgccaggcagatgcaagcccacaggaacctgtgatggtgtaagaacgtggaaatgacagtgctttttcctgggctaaagagggtcacgtacatttgctgcccttccagccatgacccacacatctctgtcttaccagttctttggcagtggttttgaagaaggtcagaactcctcagaattcaaagaacagctttgtgcacggatgtgactcttagaattcaggctttcaatgaagaacactgcataaaaacatattgttagcaaattccgaaaagatagttctatttatcagattttcaaagataatgccacttggaaaaaaactagtaaacgtgtttccagttttctcattgagaatcacccctgcattgtttcccagaccccagtgattcaccaccacctttttaaataacttatcaatatttacatattatgtttcttaacatattttcacttttaaccctaaattgtttcaataatcttgtttctgtttaattattatcaccaacaagaaaccaatatcarctgacataatagaagttttaaaaagtacgtaattattcaaaagaaggtctgttcatgtcccctcacatggtcctacatgacatttattccacatttgggaaatactcaaccacagtatccttcctcactagtttcaggaacataaagttgatcacaaaagcttccccactggaatccagtattcctgctattctttaactgtagcattcagcctctttattttaaagatgaagaatatgaaagatagagggtttaataatatgcgcaagggacacac

SEQ ID NO: 701229 - DNA, 623 bp, Homo sapiens
actgaaggctagagcaacaacgacatagtgatctgaatttggcacacaagttaacactaaataccttgtgatggtttcatctacaaaagtataccagtaccagtgtttgttgagaaaggcaactaagcttttggttggctttagcccaaatgactggactaagttctgtaacaatgaaccaaaacagatggaactgggttctacacawtcaacaacagctgtttgaaaactgaaaccttggtcctgttttctctaatgaaaaggcaagacttttcctagaggctgcactaggtctaagtacttttatttctaaaaacatctgccaaataaaaccaaccaaaactcattattttcaccattaccaagagctagctctattaaatttatatcaacaagttaatctgtctctatatagggaaggtttccgcaaactaaaatctaaacctaacttttgtagacagggattatggtaggaatttggtattacaactaaaccagccagctaaggagtgaacctaagaaaaaatatattacatatccttattgacagaatcacagttagatgctgcactaaaaccctaaatggtatatctctcagcccacgtaaaatttcagctcaagaa

SEQ ID NO: 701230 - DNA, 609 bp, Homo sapiens
agtttcaacactcatataaacaaaagcagttggaaagaactcatgtaggaattccccataaccagaaggaagattgttttgttttgggtttttttttaagtgtccatattacaacttaaatttacaacttaagcttttatcattattttaaaaatgaaagtggtatcatctatagtcataaatgcacagcctactgaatttaaaagaggagcacattccagttttaggcataagtacagtaactaaatagayttgaacaagaaattctttatccagtacagattttctgagcatttggcactatacagaaaaccatgatttactaagcaccaatcaactgacctaagttacattataacagcacccctagcctatcctctgctttgccccacgtccccctccaaacatatccacctgaaatagtacctagaagacatttgtccttatcagattttatttgaaggaagaagtcagaaaggaattatctagtaataacttagttacaatttcaggtaccagcagagaagccaaaaaatgaaaattaatctgtgtacaagctgaaattgtccctagttctgaaaagagaatagtcagaacctagagagttcc

SEQ ID NO: 701231 - DNA, 2571 bp, Homo sapiens
ctggattgccttcctcctgtcttcctgaacatttgcgcagtacggttagtgggcactaactgtgttccagggactctacacatattatttataatacattcaacaccaatagaaagtagatgttttcctcccaagttttaaaaggatctaaaattcacagggctctggagtctgaggaagaaaatggtttatctagaaatttctgggaaaaacatggctattcactcatggtcaacttgaattgaggaaattggaataccaagaggttaagtgactcgctcaaagtcaacatgctcataactaaggatatctgggattcaacaccaggtctgtgtaacagcaatttgttccagtgatctgtgtgaccaggggaaccctgagtgtcctaccccaagagatggcctgttaaatgtcccggctcttcaggataccttatacattcctcaattgaccccacaaagcattttccctttcctggaaaattcaattgccagaaacacttaccccactatgatcacacatcactatctaaactcatgcaaaagacacatattgcctgttttcaagtacaatgaatattgaatttaagcttttaccatatggtagctaacccaatgatttatagaacttattttcactttctgtgtctaaacaataaatgattgttttatatttatagcaacataggagcaatcttcacagatctcagtaacaagtttttaattttattggcctggcattatrtggctcttgaaatggccataaggtctaggcacaaaatggactgacttctcatgactaaggattttataagtagaatttaattgttgcctttaactcaatgaataaatgttgaaaaaaaagtatgcatatgtatatagaccaaaactttattttatagcaaattcttgtacctagcatgaattatgtaccacatataggttttttatcaaaactgacagagaagggtaataaatcacatttaccttaaaaacccaactcacccatttaattttgtgttctttcttcttatacttaacaataaagtggttaataaacaataaaagagatggactttggttttaaaaaatgaagctttctataatttaaagaagttttatagaagacatgtttcctaacttcctagatttcccctctggtttattaaaaaacatgacataaaaaacatgataaaagccgaacaattattagtcactttctatcatttcagttgaattataaaattttttttctccagacgcttgtaaataatgtctgtttttctatatttgtctactatagacgttgtggagaaaatataataaagggaaaatgagaatggggggaaagcagaaaaaataacaccactctcaaatatgggagcagctgcttctcagatgtatggtggagtttccttggaatcaagcagaatttgagaaagtctgcctctgtctcttgttacatggctcttgtcatgaaggataaacaaaaaatgaactcagtgcagctcaagagaagagtttccttttcttttcttttcttatcctacttaccttttctgagttaaagccagcagatagtaactcagattaaaacccactctctagatataaacaacagtgctgattaaatggatcactttgccaagggagatgcagccagagtgcccatttttcattcaaatgttccaggcttgtagaagtagcttccagctctaaatatattgaatcaccattaacctactggagaaaataggaatacgaacacacgctttcttattagatgagcatggcaggttttctgataatgcaaacaattaaatggaagaatttatatctctcagagtcttgacaaaattccttctgtcagtgaatcacaattcctctcccttagagcagcctaactggaatcttgaggtgggaatcctttggagtttagggatgtgtgctgatttgtttgttttggatattggttagagtgctcaataaggagtaaatgttacaagtaggtccctgtcactcaaagaatgatcagaaccaccagtatccagtattatgtggcatttgttatagctgcagaatcttgagttcctactgaactagaatctgaatttttaaagatccccaggtgatttgtatgcacattaaagtttgaaaagcactgttctagcagtggttcttatactttaccatgcatcagaatctcttgaagggcttgttaaaatgtagactgctgatccctatccatagagattctgattcaataggtttggggtgggatttgtgtttctcatatgttcccaggtgatattgatgctgctggtctagagactacactgagagccattgctctagggcaatgctgcctgatggaattataagagccacatatgcaattaacagttttctttatttttccttttttttttttgagacggagttttactcttgtttcccgggctggagtgtaatggtgcactctaggctcgctgcaacctccgcctcccgggttcaagcgattcttctgtctcagcctctgagtagctgggattacaggcatgctccaccgcgc

SEQ ID NO: 701232 - DNA, 478 bp, Homo sapiens
  misc_feature 2, 3, 4, 5, 6, 7, 8, 9, 10, 11, 12, 13, 14, 15, 16, 17, 18,19, 20, 21, 22, 23, 24, 25, 26, 27, 28, 29, 30, 31, 32,33, 34, 35, 36, 37, 38, 39, 40, 41, 42, 43, 44, 45, 46,47, 48, 49, 50, 51, 52, 53, 54, 55, 56, 57, 58, 59, 60,61: n = A,T,C or G
  misc_feature 62, 63, 64, 65, 66, 67, 68, 69, 70, 71, 72, 73, 74, 75, 76,77, 78, 79, 80, 81, 82, 83, 84, 85, 86, 87, 88, 89, 90,91, 92, 93, 94, 95, 96, 97, 98, 99, 100, 101: n = A,T,C or G
tnnnnnnnnnnnnnnnnnnnnnnnnnnnnnnnnnnnnnnnnnnnnnnnnnnnnnnnnnnnnnnnnnnnnnnnnnnnnnnnnnnnnnnnnnnnnnnnnnnnntaccttgtggacatttaataaagattaatttttttaaactaacaatttaagtataatctccaaatggaagcatatctatgttagtttaaatcctttcacaataaataacagaatacaggaaacttttaggaaggtttatgattttccataagaaaaatgtgcttagagcttagaggggaacattttacaattttttwaaaaaaatctacatcttccttctgcagatatcaatacaatcaattgacagtaaatgaaaaagccgaaaaaaaagaatgccccctctccagtcttcctttttttttttttttaatttcagttggaaaatccccactgaatgaatttttttgaaaaagtaaatgtatcctgggaacatgccg

SEQ ID NO: 701233 - DNA, 643 bp, Homo sapiens
taaataattaaaattaagggttacaagtgcmattttgttacataagtacattgcatagtggtgaagtccggcttttaggtgtatgtattgcctgaataattgtgatacctgttgtacccatccctctcctctggcctcccacccacccttccgagtttccaatgtctgtcattccacactctatgtccatgtgtccatggctgcccctagtgaaattattaatagcacttccttttagtctcacaggtggcctgttttggatgataaattacatggttgccttagggtggtacttccaaattcaacttttttgaggggataggataaagtgctattgaaaaatcatgtgaaataggatgaaggcagtgactaatggccccaaacaagtaagagaggctgttgatccaatgaaacacctgtctatttgctgtgtaacaaaaaagtcaaacagcaattttgttcagtgtgaaagtatgtttattggatatcaattgtatgccacaattaaacagctttaaaatctgaattgacaaaaacaaacaataaaacctccccaacaaagtaaacaaaccacaattgaatcggtcatctaacctgacctgactgatttgtgtctggccaaaatggctaggacagtccatat

SEQ ID NO: 701234 - DNA, 676 bp, Homo sapiens
tttttctctttctttctttctttcagacagattctcattctgtcacccaggctggagtgcagtggcacaatcttggctcactgcaacctccgcctcctgggttcaagygagtctcgtgcctcagcctcccgagtagctgggactacaggcacgggccaccacgcctggctgatttttgtatttttagtagaaacggggtttcaccatgttggccaggctggtctcgagctcttgacctcatgatccacctgcctcggcctcccaaagtgctgggattacaggcgtgagccactgcacccagctggcaagaaactattgatgggaaaagaacagcatatttgaaatgcagccatttcgggaaacaaccaccacccagaacataggatcacattcagaggagacacaaagtaaacacagatgaggaaatgaaggtcttcgtggctcacaggcgataaccacgcagcctcctgtggcgcggtccccagctctccaatggcagggacagtctacgggtcgtgtgtccagacatcagttctggtcccaccctacactggcctggttccaccttctgattccgtcagaaggaggcgatggcctttgctgctgtctgttagctgaaagcatgggcagcccatccacgctgccccagggcactgacaagacctggcatggtggg

SEQ ID NO: 701235 - DNA, 676 bp, Homo sapiens
tttttctctttctttctttctttcagacagattctcattctgtcacccaggctggagtgcagtggcacaatcttggctcactgcaacctccgcctcctgggttcaagtgagtctcgtgcctcagcctcccgagtagctgggactacaggcacgggccaccacgcctggctgatttttgtatttttagtagaaacggggtttcaccatgttggccaggctggtctcgagctcttgacctcatgatccacctgcctcggcctcccaaagtgctgggattacaggcgtgagccactgcacccagctggcaagaaactattgatgggaaaasaacagcatatttgaaatgcagccatttcgggaaacaaccaccacccagaacataggatcacattcagaggagacacaaagtaaacacagatgaggaaatgaaggtcttcgtggctcacaggcgataaccacgcagcctcctgtggcgcggtccccagctctccaatggcagggacagtctacgggtcgtgtgtccagacatcagttctggtcccaccctacactggcctggttccaccttctgattccgtcagaaggaggcgatggcctttgctgctgtctgttagctgaaagcatgggcagcccatccacgctgccccagggcactgacaagacctggcatggtggg

SEQ ID NO: 701236 - DNA, 676 bp, Homo sapiens
tttttctctttctttctttctttcagacagattctcattctgtcacccaggctggagtgcagtggcacaatcttggctcactgcaacctccgcctcctgggttcaagtgagtctcgtgcctcagcctcccgagtagctgggactacaggcacgggccaccacgcctggctgatttttgtatttttagtagaaacggggtttcaccatgttggccaggctggtctcgagctcttgacctcatgatccacctgcctcggcctcccaaagtgctgggattacaggcgtgagccactgcacccagctggcaagaaactattgatgggaaaagaacagcatatttgaaatgcagccatttcgggaaacaaccaccacccagaacataggatcacattcagaggagacacaaagtaaacacagatgaggaaatgaaggtcttcgtggctcacaggcrataaccacgcagcctcctgtggcgcggtccccagctctccaatggcagggacagtctacgggtcgtgtgtccagacatcagttctggtcccaccctacactggcctggttccaccttctgattccgtcagaaggaggcgatggcctttgctgctgtctgttagctgaaagcatgggcagcccatccacgctgccccagggcactgacaagacctggcatggtggg

SEQ ID NO: 701237 - DNA, 676 bp, Homo sapiens
tttttctctttctttctttctttcagacagattctcattctgtcacccaggctggagtgcagtggcacaatcttggctcactgcaacctccgcctcctgggttcaagtgagtctcgtgcctcagcctcccgagtagctgggactacaggcacgggccaccacgcctggctgatttttgtatttttagtagaaacggggtttcaccatgttggccaggctggtctcgagctcttgacctcatgatccacctgcctcggcctcccaaagtgctgggattacaggcgtgagccactgcacccagctggcaagaaactattgatgggaaaagaacagcatatttgaaatgcagccatttcgggaaacaaccaccacccagaacataggatcacattcagaggagacacaaagtaaacacagatgaggaaatgaaggtcttcgtggctcacaggcgataaccacgcagcctcctgtggcgyggtccccagctctccaatggcagggacagtctacgggtcgtgtgtccagacatcagttctggtcccaccctacactggcctggttccaccttctgattccgtcagaaggaggcgatggcctttgctgctgtctgttagctgaaagcatgggcagcccatccacgctgccccagggcactgacaagacctggcatggtggg

SEQ ID NO: 701238 - DNA, 1005 bp, Homo sapiens
ttacattgtgcatcattagctttccacaaatggcattttctcaaggattcatgaatatagttggctgattttgttcatggctttcagttaccctctcatggccagattcagaaacataaatgtctcacactctcctcttccaaagtcccagagattgactctgtgttgaaatgacagcccctttcttctccaggctgagaatggcctctgcctgtgccaagccctctgatctaccatgcaccttgtgagccacctacagttatccagcagagtcttccttcccacacgcagcccactgctaccttctcctcaacatgcatgcctctgtcacccaggaatcacacatttgacctctacatcaatcatgcaacataagcgtgtgcatacagaatagcccttttcctagaatctataccaaaaacttctgtgatgtgctcaagtttgcayaaagggtggttgaacctggagtacatcccagattaaacttcagaaataccaatctgttctctgcgtgtgcctcacgttttcattagcagtgcccattgagccctaaggaagtgtaggatttttcttaatgatttaagaaaaacacttatccttcactccaaaatcaaatacaatgtctttcttcacatcagttccctccattctatcacaaaatagctgagaaagctaaaagcagccaaagcacctggcagttgttgatacttgcccataacacaggaatcttagcaggtgcagtgggataaaatacatctttcagaattattatgtttctgggcatcactttttatatcaaaggggaaaaaagaactaacctagctgagatttgcaagggaaaacagcctagttctctttccataatgctttgaataattaagacacataagataaatacattaacatttcttcaagcctccaggcagcaatgagtatggagaaatgattactttttgagatcctcaaagaattttaaaatttgaaaatttttcctaagaagtaact

SEQ ID NO: 701239 - DNA, 1005 bp, Homo sapiens
ttacattgtgcatcattagctttccacaaatggcattttctcaaggattcatgaatatagttggctgattttgttcatggctttcagttaccctctcatggccagattcagaaacataaatgtctcacactctcctcttccaaagtcccagagattgactctgtgttgaaatgacagcccctttcttctccaggctgagaatggcctctgcctgtgccaagccctctgatctaccatgcaccttgtgagccacctacagttatccagcagagtcttccttcccacacgcagcccactgctaccttctcctcaacatgcatgcctctgtcacccaggaatcacacatttgacctctacatcaatcatgcaacataagcgtgtgcatacagaatagcccttttcctagaatctataccaaaaacttctgtgatgtgctcaagtttgcataaagggtggttgaacctggagtacatcccagattaaacttcagaaataccaatctgttctctgcgtgtgcctcacgttttcattagcagtgcccattgagccctaaggaagtgtaggatttttcttaatgatttaagaaaaacacttatccttcactccaaaatcaaatacaatgtctttcttcacatcagttccctccattctatcacaaaatagctgagaaagctaaaagcagccaaagcacctggcagttgttgatacttgcccataacacaggaatcttagcaggtgcagtgggataaaatacatctttcagaattattatgtttctgggcatcactttttatatcaaaggggaaaaaagaactaacctagctgagatttgcaagggaaaacagcctagttctctttccataatgctttgaataattaagacacataagataaatacattaacatttcttcaagcctccaggcagcaatgagtatggagaaawgattactttttgagatcctcaaagaattttaaaatttgaaaatttttcctaagaagtaact

SEQ ID NO: 701240 - DNA, 1846 bp, Homo sapiens
tctaaatatagtttatgtataatcatggctctgggctcctttgcaatcctacagctctgaaattattgccgaggaactaccagacagtaactgaattgtttgcaggcccaaaaaattgaaaacgtctttaccaaagctgtgttccatgcagtgaacagtatgttttaactattcattgaaattattttaaatattacagtctgcagcatttatacccctattctatatgatagctatgtgtctgtatgttatcttcccattggcctgaagccatcctggaagttcaatagcttgctcacctaaatgtaattaggcatggagaggatgtggaccagaggacagggatgcagaaccgctaggtgccacaatcatttccatagtaagtggatttgtagacatcagcctgggccaaattactgccaatttttcaatgaaatagcatgatgatgtggatttatacaatggctcaagatggcaaacccctttatgtattttctatcagtaatcctagtaaactccatgtgagttaggcaggcacttcccctgataaattgaaaaatgggacacagaaagacttaagttatttgtccagagttcccagggttgacaactgataaaagaccctgaatgggagctgtgacctgggttctagttctaattccagcgttatccacaaaaaccacataacttctaatatcacaaccagactactctggattttaatactcccgtggtgtggcactttttccacgtttacccttgtgtcttggtcaaattccaagttgggtaattactctctgcttacctaaattcctcctcctattttagatgtgtaggttattttccacttctaaaacctgccttccagtgttcctggctctaagaactgccatatcccttttcaaaggtagctatgtgtcagtggtcagtgtatatatgctatttgaacacaccgacctgctgtaggaatatttaatgaatcactactcgtaagatgttttaaattttctcacagatttttttctcctactttgtttaaaagtcatactgttattacaatttttgcaaaaaaaaggcagtaaataattcatgttttaagtacagttgttttcaaaattccttttctatgtggtttcaggcatattttaccttctctaatacagaaatttctgaaaatgtagtatgaatccataagttttttatgttaattcacttattttcccattgactcactttatggttttagagatttattaagaatgaagttatcttggccctgagatgttaattaaaattatactgaatagagcaaacattttaagcctgtatagtttaggtattttaattttaaagatacattcaaaatgaaattattttggccctgagttgtgtaataaaaattatacccaagggagcaaacttaaatatatttaaagaattacatttcagagaaatatgaatgctaacactaaattcttacattacatgttggctgttggccctgtggaagcaatagggtaatataatataaaaactttgagggaagtttgccatcttgggaccctagatgtttttaggtcaacttgaattttccaggttagaaaagctgagcatgaratcatctcaaagaagtggtcaatgagagactactgaacatattttttttccttaaaaaaaaaaaaaagaaccagacccaaccatagtatttgcaggattgcttgtctgttcagcaaagttctgaagaatgacaaggaaacacggctaatgacagcctgttattgactagacgtggagcctttagatccaaactctgctggttgtgactgaactaaagtactaagcctaa

SEQ ID NO: 701241 - DNA, 882 bp, Homo sapiens
tgacattgatttgtggtaacagctttgagtgctttacacagagtgtgaatgtggtgtttgtaaaaatttggacttgatgtctcaccctcatgatgcattcatgagttccggaagccacagctctgacaaatggccttggtgataggctggaaaaagagtatcctccaagtatttagaagagttaacttgtttgatactgggaacacaaatttaaaaataaaaaaaagactcatattttcagtggtctgggcatctcttgagttttagatcaagatcctctagaatagttgcacatcttttcttacaactcaggcaattttgtttcactttattatatgctatctcttctaagcccaaacctgtttcttctcacattctccccatcccagcaaatgtcaccctcacctactcagttactcagaaccttggggtcatccttatctcttctctttccttagcaccccatacctaacctytcagcattgactctccatcccatatctgaccatgttttctcaactccactgctcccaccctagttcaagacattcttgtctctcttctagaacacagcctctctaccattctcttgatcctatttgtaactccctaatagctgctgttctcacaagagtcagagtgatgtttagaaaaacatctagagacattgtttgccattcacctctcagaaccttctaaggactatgtctcagggtaaccaagagagaaaaagtttctctttatgtaagtatttctgttaataaagaaagaagcaggtgtagaattagaaaactactacttaaacatgtctaggtaacaatcccaatggctgccaagatcacacatgaaaagagacaacttgaaatagtgtgtgtatgtaca

SEQ ID NO: 701242 - DNA, 641 bp, Homo sapiens
tacacttcaggaagatgaccttcaacataggagggaaaaatgtttcatagtcaatctagtaagaagttctgccttcaaagcaaaagaactaccatttattagatgtttgccatgtgccaggcaatgtcacaacccttttatatctcatttaagttcataatcatcctgtgacataagcaacactatgtcccccagtttacagatgaagaaactaaggctcagagaagacatgtgacttccaaagggcactgagctaggaagtrgtgacactcggattcaaaccttggatctggcctactttaaagtctatggtctcaaatcttgtgctatacctgttttacagggaggtgagtctccagtcactggagctcaaacagactgaacacctcttagcagggatatagaagggatttaattatcatatgaaggtaaaccaaggaccatttaaatctttgcaattctgacagccttatctttccattcattccttgaaaatagatttacttatatgcaaagtctcatgaatctcaaatgtcagtcaaccatttcagaggtttctgtgtgtttatggttttaggaaagtatgcaggaagacattattaaagacatctctctaacagaagccattatttactgaattc

SEQ ID NO: 701243 - DNA, 641 bp, Homo sapiens
tacacttcaggaagatgaccttcaacataggagggaaaaatgtttcatagtcaatctagtaagaagttctgccttcaaagcaaaagaactaccatttattagatgtttgccatgtgccaggcaatgtcacaacccttttatatctcatttaagttcataatcatcctgtgacataagcaacactatgtcccccagtttacagatgaagaaactaaggctcagagaagacatgtgacttccaaagggcactgagctaggaagtagtgacactcggattcaaaccttggatctggcctactttaaagtcyatggtctcaaatcttgtgctatacctgttttacagggaggtgagtctccagtcactggagctcaaacagactgaacacctcttagcagggatatagaagggatttaattatcatatgaaggtaaaccaaggaccatttaaatctttgcaattctgacagccttatctttccattcattccttgaaaatagatttacttatatgcaaagtctcatgaatctcaaatgtcagtcaaccatttcagaggtttctgtgtgtttatggttttaggaaagtatgcaggaagacattattaaagacatctctctaacagaagccattatttactgaattc

SEQ ID NO: 701244 - DNA, 2722 bp, Homo sapiens
tgaggttctgctttctactattttacagttgctgtgctccaccttcataccttcgcctatgttagaacttctgagaagctgaagcatcacatataaaaaggtctgaagaataatatcacttgggttaacatgggtcagttgtctttggattgctttgtatatctatctatctatctatctatctatctatctatctatctatctatctatctatctatctatctatctgtctatccatccatccatccatccatccaatctatctatctatctgtctgtctgtctgtctgtctgtctgtctgtctgcctgtctgtctgtctgtctgtctatctatctatctatctatctatctatctatctatctatctatctgaatgtcttttttcttcaatcaggtgatagttgtattctacttttggtttagtcattagagttaacaagcttccagaawaatcagcatctcatgatgtctcttcaagagtgtcagtgaagctggcttctgaatgtattctgttaactttattgcacaaaccaaggagctcatagtctcatactcctattggatagcctgaaggatgcttgtatttgatcaaagtattgctgtgtgtttattcattcatttatttatttattctctacgcagtgaccaaaatggaggaagcagcaaaatatctatcctgtttagagcctagcatttcgtgtctaaaaccagtgattttccaagaaaaatctatccaattccactcaattactttttactgagcacctacaaagtaataaacccgatgctagataccatcaaatccttgaagtctagggagtgtgactgtcttagtctgttggtgctgccataagaaaatacctgaaactggatagcttttaagcaacataaatgtatttctcaacattctggaaagtccaagatcaaggtgctggcagattcatcccttgtgagggcccaggctctacttccaaggtggcagctggaatattgtttcctcacatggcagatgggcaaaaaagggacaaatattatggtctcacatggcagaagatagggaaggagtccaactcacctcttaagtccttttataaatcaccagttgactctatgagggtggagcccttatggtgtaataatttcctaagtgctccatctcttaatactcttgcattggggtttaggtttcaatatgaattttagagaggacacaaacactcaaactatagcattgacaaactatttttttgttgttatcagattgtacaccttgttactacttaaaagtataaacagggacttcaaaataaatttatcctccttttacaaaatggtataatttttctagctacataaaatatttcaaacctctcttcatctggtttattgacggatcctttaacaaatactgttttagctgctattaataatttgtaattttaaagtatttgaggataataactttttctgcattatcttctcatttcgtttattaaaatggctaatgactttcacaaaaaaatttttaaagagtcaatggcctcatgtactgttatgtgtaaaaaaaaaaagaaaaaatggatccaatgtctgcatactatataaataaaaacagtgttgaaaatttttatttgaaggttctttgttttcaattacaaaactttatactttggttaaagatcttaacattttccattttcccacataaataataaagagttctttagaaagacattactagtgtataaaatgctgttgcaaattaaaaagaatcggcaagataaattttaatatagtcacttgagctattcaaatcttctcactaaagttatttcttgttataacatgaaagctagagaagaaaaatgtgttcacttgagttgatattcagacaaactcaaaagatttcatcctttgacctaaataagacaaaagtgaaaaaggggctcaagatggtctcattttgtcgcaatcaatcagaagtcctccacttcacagtatgaagtctgaaaataacggccagattcacctcctatgggattgagtgtacatattctgtatattcccatatatatgatttagggcataaatatgatactttttaaataaggtagagctatgaaaaatttagatgttttagttcaaaacttcatgaacttattttgttgtgaattggcaatgtgtgttggctttatgtttagtttgaagtttggttaatttaaaaaattaccaatttactaaaacttaattttggtgcgtaaaacaccctatgtcacttattgctttcatagttttaggttttcagttttccagaatattttcaaaagataaataggatttcatcaataaagactttagattccaaattgtgtggtttggaatgacaatgtatatacatttagtcattatttttaacacacattgctgttctaagtcactcaacagaaaagtttttctattgaaaattacatttccttatatttatattgggctttccacatttgcaaaatactttcacagcaatactttgatcaatgcttgttgcacttgaatgaaaatatgaatgaatttattgtctcattttactctgataactgcactttgacatccagttttattactcctgtatttcaaaagaggaaagtgaagctccaaggccacagggcttctactggttttcctgcaagaactgaaactaaaaaccagaataatcttattcc

SEQ ID NO: 701245 - DNA, 1173 bp, Homo sapiens
tctccagtcccagcccttgtcttgattacaaaatcaggtcaatggtgatgctcatttgtaactttgctatcaggtatggccagatgtttcatttaacctctaatataaataaaacatctgatgaagttttgtgatgcctttgtaaacagctgtttcatctgtaagcttactgctgaagcagctataccgatttggtcattttctttacataatgtcaaagtaattgtcttgatctttaggaaaactgctgctataggtgttataaagtattttattacagcatgttagatctctttaaaatggctaatgtctagtcaacacatgtttagtttgcccaacaagaatttattaagtttatttaaaatgtaggaagaaactatttctatttctttgagaattaaaatgtaagctgagtgcatcactaaggcaattttgttatattttcaacattatttaataacgcttgaccaacccttgttctaagagcattaacagcacaccttgtgttcttttccaggttcattaaataagtctaagaataatactcctcatgcctgttttttattcttgcttaatataagcatatttctaacattagtaattactttatatgattaaaataattaatacgatggtaaagagtggatgctgaaatcgcttcaaactaaattttaaaaatattttagacatgtataaaatgcctaccatttttagaagggcaaaaatytaatctaaaataaatgagctgccatattttaaaatgttagcagatgagcatttgcggcccattctaatgaacattgtccaggcaattttattttagatttctcacttaaggactcaaaggctgagtataacacaaaataagctgcatgctcataagaagaaattatattaaataatttagaaatttgtgttcaatatttggaaaatcaagatttttttagaaatttgtttttacattttaatagactttagcattttagaaacttaaatacttgctagtttaatgaattattcatattttgatcatatacattacattatacattttccatatatacatccctacaaatttttaatatttttgactttgtaatttattgtttttaatccaaatttcttagggtttatgatcacatttggtattatctgcatgtaaaaaaggaaaca

SEQ ID NO: 701246 - DNA, 630 bp, Homo sapiens
tgtttgtgcttggtaggcagtgggcgctcaacamataattggtggatgaaattttgtttttaccgtaagacactgttaagtgcattcaaaactccactgcaaaccctggtaggggacagctccggcactgcgggcgggaatcccacggtcccctgcaaagtcatcgcaattttgcctttacatgtaagaattctctcaagcatgattttcacactggggaatgtcatttttgctagttgcaatatgtggatgagttgtttttttttaacttttgaaaaacgtaccattctgtttgatgtgtaaaaaacacaaagatttttgaaaccttgcgtcttttggtctgcaggtgtatagattccacttactacagatgagtagcatttacaccactcagatgtgtaaaaaaacaaaggttttttaaactgtgtgccttttgatctgcaagtgtgagatggcacttactacagtgagtagcatttaatctttttcatcactaaaaatcacacagaacgttttaatcattcaccgaggaagaaagggaggaataaatacacaaaatggctctcaacgtctacaccttctgcagaaacagacccttttcctactgttctatgctttgtgaaagttgat

SEQ ID NO: 701247 - DNA, 979 bp, Homo sapiens
cttgccctggggaagagctctgccatagctttgagtgactcaaaggacaggctctgcaaaacataagtataggttgaaatgctaagtttttctgccactgttttcttgaaacagctcaagaaaggactcagagaaattggctcttgctacaggacacacaaattgaatacttgagtcaatcatccagtgatttgtcacaatgctgaacaaacaccagagcctttgctaaacataaggagacagagaatgttcttgatagaatcacatccatttgtcgatcccaggtatattcctaaacaagatgatggtctaactttggggggcttggtggcaatgtggaggtgtggatggtgaggaatgggagccactcttgcttattgtcctccctgatcttcaggccaatgactgaggtgtgcctaccctcccttcatcctgcacttagtcatacatgaagcttgcttgtctcagtagatcccattggattttcatctttgttattaaatcaggrccacatttgacatgcttattttataacgaccatcttatgacatgtaggtcctttggctgagggagaagtgcctccacaaatttaattaccctcaggtgagcagcactgggtgcttgtcacatcagaacaccccaacaattgggaacaaatctgtatttatcctagagacgagacactttgagcctcaaaggataatactctcagagtttactttctccccttattcccttttgggctaccaaggtttttagtcactgctgaagctattttgtattttaaatccacagtcctttcattttaaaactgcaaggttttttatcgtgtctcacccctacattcaaggcccagaagggcctggtgctgtacccagaatcacattgctcacctggggcagagtctccaattcctagagcagtttcagtcccccatgtcctcagcgtttcccagaagatagtaatggatgacatgaat

SEQ ID NO: 701248 - DNA, 995 bp, Homo sapiens
acgaatatattttgcattgccatttcagaggtgactctggactgcttcaagcgactccccttcctgtagtccatctacatacaatgtcaggactcctttcccagagagcacatgtgctcacacctccgggccccttatagcactaacagtccccaccgcctccaggagccactctaaatttcccagcagtacaggaggagccagaagcagggagcaaagtgaacgacctttgagaagacacccaacttcccatgcctcaggttcttcaactagaaaatggattaacaatggtacctactttataggttactgaaaaattaaatgagttaatatatgccacgtacctttacagtgcctaaaacatagtaagcactcaataaatatcatctagtattattacaaggctctccacaattggactccaacttttacagcttcattttagttcatttagcaaatatttargtacctactatgtactggggactgtctctataaggctcttgctcttacaggagcttagagtcaggtaggagagagataagagctgtggtaatccaggaggtagatactctgctaagtgtggtgtactgtactctacactggcccagtaagagaacctaacctagaactggggtgaaagtcagggaaggcatttcatggaggaaaggatatctaggctgagagtataagaaaaaggaagaggctgagagtggtggctcatgcctgtaatcccaacactttggaaggccaaggtggaaggatggctcgaggccgggagttcaacaccagcctgagcaacgtagtgagaccctgtctctacaaaacattttaaaaattatccggacgtgttggtgtgcacctgcagtcctagctactcgggaggctgagaggaggatcacttgagcctaggagttcaaggctgcagtgagccataattgtgccactgtactctagcctggggaaaacagcaagaccttgtttcaaaaacaaac

SEQ ID NO: 701249 - DNA, 881 bp, Homo sapiens
tgaataaagctgctatgaataattgtgtacatattttttattttcatttctctgagataaatgcctaaaagtgcagttgctagattgaatggtagtttcatgcttagttttttaagaaactgccaatttattttccagagtgtaccattaacattttcaccagcaatgtatgagtgacccatgcatttacttttagacctccttgcagttcttgtttagccaagacatactatcaaaaagtagatgactcttcagtctccatcactcatgaaggttcccatcaaagcctgaaagcaggaggatgaacaaaagaaaactgctactctttttaataataataatagctgacatttattgagtagttactgtatgccaggcactgtgccaaagacttcctatgttcaaattcatttgttattcataatagccctggcccccrtctctactaaaaatacaaaaattagctgggcatggtggtgcgtgcctgtagtcccagctactcaggaggctgaggcaggagaattgcttgaacccagaggttgcagtgagccaagatcacaccactgcactccagcctggacaacatagcaagactctgtctcaaaaagtaaaagcaaaaatagccctaagggtaggtcctattatcatccctaatttatatattaggaagccaaggcttaaaaaatagaagtaccttgttcttggctacagattgtaagtggcaaagctaggatttgaacctagggggctgtgctttctactaccagattattctgcctcctgtgtaataatggaaggaacatctctgtgtttgctcaagcagctgtgcaggttatagtcaggacagtgtttctctttttaaatataagtgtagattttta

SEQ ID NO: 701250 - DNA, 679 bp, Homo sapiens
tcagcatcatcggggacctcattagaatgcagattctcagccccctcccagacatggtgaagtcagaagctctcagggagggactcagcaaatgatttaaagcgcatcaagtttgagaaccaccctaagccaatgagtctcccttttacttcccattagtcctccctcaccagatgattcctaggactcatggtgcaacatacaggagccaggctttagggaggggaggaaaggagcctggcggcaggggtctctgcaatggcaagaaagtgagtgaatccagcgctgccacctggttatccccttctcgttgaaaatagcagcgcrggtgcaaattcctaaacacaggctgcctgcactcggtgttacctcgggctgaggcatgataatattttattttttaaagctgtgaggaaatgaaagtgaggctttggttggggcgaggcagttgtgaaagaaattaaaataaaagaccctttgtaaatgcagacttagaagaaatactgaatttgtgtcagaagttctccagtgtttgtgttaatcgtgtggtgataatcctgtcctccttttaaagcgaattctctactgaaaggtctgctctgcttaaggagctacaaactgctctcaaaagaatgaaatactgagttccaattcagtgaggcacagtgttggactatgg

SEQ ID NO: 701251 - DNA, 679 bp, Homo sapiens
tcagcatcatcggggacctcattagaatgcagattctcagccccctcccagacatggtgaagtcagaagctctcagggagggactcagcaaatgatttaaagcgcatcaagtttgagaaccaccctaagccaatgagtctcccttttacttcccattagtcctccctcaccagatgattcctaggactcatggtgcaacatacaggagccaggctttagggaggggaggaaaggagcctggcggcaggggtctctgcaatggcaagaaagtgagtgaatccagcgctgccacctggttatccccttctcgttgaaaatagcagcgcaggtgcaaattcctaaacacaggctgcctgcactcggtgttacctcgggctgagrcatgataatattttattttttaaagctgtgaggaaatgaaagtgaggctttggttggggcgaggcagttgtgaaagaaattaaaataaaagaccctttgtaaatgcagacttagaagaaatactgaatttgtgtcagaagttctccagtgtttgtgttaatcgtgtggtgataatcctgtcctccttttaaagcgaattctctactgaaaggtctgctctgcttaaggagctacaaactgctctcaaaagaatgaaatactgagttccaattcagtgaggcacagtgttggactatgg

SEQ ID NO: 701252 - DNA, 1849 bp, Homo sapiens
ttttcttcatcagtttcctgatgtccattctgatttccttttagtttgcttataccattatttattggtatttatgagacttccaaattagttttttgttcatattttccttgtccactgaactagaatgaggttcaattcagtgtcttttccagtattttataaactttcacatacctcttacccataaataattttttaaaaaattaaggacaaaaatcctctgctatggtttggatgtttgacccctccaaacctcatgttgaaatttgatccccggtgttggaggtagtccctaatgggaggtgtttgtttgaggcatggggacagatacctcatgaataagactaatgccctccctaagtgggtagggggagtaagtacttgctctaatagttccttctagagctgcttgttaaaaacaggctgacacctctcctcagactctcttgcttcctctctcacaatgtgatctctgcacatgctggctccccttcaccttccaccatgaatggaagcagcatgaggccctcaccagaagccaagcagatgctggcgccatgcgtcttgtacaacctgcagaaccttgagcaaaataaacctcttttcttgataaattacccagccttagatattccttcatagcaacacaaagtaggctaagatgccctcaaaagattactacccattagaggatatttaatgaggaaatgggctaataattatgggtttgatggttacaagttaaaaggaatgtaatgataacttactcttttctctttcaactctccgctttgtgaaattttgtgacctcatgtgacaaaaggagattgtagaagtagtcttatagacatccttagtgatttggaaaactggcgaagacttgtcattgtttactgtttgtatatttctaatatgaatggtggtggtagaagtgatagaagcaatagtaccagtgcttgtattcattcacttaacaaacagtttttgaatacttactgagcgccagacactgttctgggtgtttgagatataccagtgaacaaagcagacaatgattcacttcccttacagagcttacagtttagctggaggagacagccaataaacagtaaacatgattgatagataggtacatacaaagctagatgaatgatagagtatgttagaagaataggtctatggaaacaaataatattacagttttaagggagttgatgagactaagaaaaaaataatcatatagtggttaaggaagtcagaatgtgtgcgtgcatgtgtgtgtgtgagtaatcatatagtcattaagggagtcagagagagtgtgtgtgtatgtgtgtgcacacacacatgcatgtaggaagtattaaatagagatgtcagggaagaggctcattgatcttaaagtactgaggagataaccaagtggctatctaggggaagagctttccagagagagggaacagttagagcagtctctaaagcagcagtgagtctggaatgtttaaagaacaaaatgggatatcaccaccaatcccacagaaatacaaactaccgtcagagaatactataaacacctctgygcaaataaactacaaaatctagaagaaatggacaaattcctggacacatacaccctccaagactaaaccacaaagaagttgaattcctgaatagaccaataacatgctccgaaattgaagcaataattaatagcctaccaaccaaaaaaagtccaggacctgacggattcacagccgaattctaccagaggtacaaggaggagctggtaccattccttctgaaactattccaatcaatagaaaaagagggaatcctccctaactca

SEQ ID NO: 701253 - DNA, 611 bp, Homo sapiens
aatacagctggttgggcctcacctgcagagattctgatttaattgatctggggttgggcctgtgcatccatgtttttttgtctcccaacattttattatcaatattttcaaacatacaaaacagttaaaagactgcacagtgaacacctgtatacccgccatctagattctgtcaccaacattctgctgtatttcctttatcacacatctatctacccatgcactyatccattttattttttgatgcatttcaaagtaagttgcagacatcatatacatcacacaaacacatctgagtgatttaaaagccctccggggccaggcgcggtggctcacacctgtaattccagcactttggaaggccaaggcgggcagatcacttgaggtcaggagttcgagaccagccttgccaacatgatgaaacccggtctctcctaaaaatacaaaaattagccaggcatggtggcacgcacgtgtaatcccagctactcgagaggctgaagcacaagaatcacttgaaccggggaggtggagattgcagtgagccaagatcgggccactgtactccagcctgggcaacagagtgagactctgtcttgaaaaagaaaaaa

SEQ ID NO: 701254 - DNA, 611 bp, Homo sapiens
aatacagctggttgggcctcacctgcagagattctgatttaattgatctggggttgggcctgtgcatccatgtttttttgtctcccaacattttattatcaatattttcaaacatacaaaacagttaaaagactgcacagtgaacacctgtatacccgccatctagattctgtcaccaacattctgctgtatttcctttatcacacatctatctacccatgcacttatccattttattttttgatgcatttcaaagtaagttgcagacatcatatacatcacacaaacacatctgagtgatttaaaagccctccggggccaggcgcggtggctcacacctgtaattccagcactttggaaggccaaggygggcagatcacttgaggtcaggagttcgagaccagccttgccaacatgatgaaacccggtctctcctaaaaatacaaaaattagccaggcatggtggcacgcacgtgtaatcccagctactcgagaggctgaagcacaagaatcacttgaaccggggaggtggagattgcagtgagccaagatcgggccactgtactccagcctgggcaacagagtgagactctgtcttgaaaaagaaaaaa

SEQ ID NO: 701255 - DNA, 611 bp, Homo sapiens
aatacagctggttgggcctcacctgcagagattctgatttaattgatctggggttgggcctgtgcatccatgtttttttgtctcccaacattttattatcaatattttcaaacatacaaaacagttaaaagactgcacagtgaacacctgtatacccgccatctagattctgtcaccaacattctgctgtatttcctttatcacacatctatctacccatgcacttatccattttattttttgatgcatttcaaagtaagttgcagacatcatatacatcacacaaacacatctgagtgatttaaaagccctccggggccaggcgcggtggctcacacctgtaattccagcactttggaaggccaaggcgggcagatcacttgaggtcaggagttygagaccagccttgccaacatgatgaaacccggtctctcctaaaaatacaaaaattagccaggcatggtggcacgcacgtgtaatcccagctactcgagaggctgaagcacaagaatcacttgaaccggggaggtggagattgcagtgagccaagatcgggccactgtactccagcctgggcaacagagtgagactctgtcttgaaaaagaaaaaa

SEQ ID NO: 701256 - DNA, 1765 bp, Homo sapiens
gtgtggacatatttatattttaaaagcaactatggtggaattaaggaaaatggtttcagcttctttttgtcctttctcttctctttatgaaaacatgcttcctgttttttatttgatcgcttattcatactaaaatgaaaatgactgatttagtctattataagcatgaagaacaaagatatattgccttaatttcaggctcaaatcttactttgggaccacaatcacttttccaacatttttgtatttatgttgttttagagttaagattttttgaactttagaaaatgtatacagtaaacatattctatgttacctaacaatcccagcagggcttggggcagagccatgtaatcaaaaatatttattcaataaagtatataatcacactaagtggcatagatcaagactagaaatcacttcacatcactgcaatccagattttcttgcccagaaggtacccaatttaccaaattattttcagttttcagaatattttaaatgttagacctgtagatataggttatgcaataatatatgataatttccaatttgtaagcataacttccattcagtgtcttgactacttgtttttactcttacatagcatgaatctgtattttccactttcatataataccattgtacacccattacctttgtgaaagctagttaattgcataatgagtaatatttatttttatgtatatctacattttattgtttaaatttacttttattatggtaacatcacaaaaataaatttatatggtgggttaactgagttgactgagaattagtaaatttgttgaagttcaaattaggtgcattaagtttacatgtctttttcacatttattatctccagttgaatttgaatggaagaaaaccactttggaatcatatacaatgccactgcttcgttacgtttctggaaaattataggcagcatattttatgattaaacactcaggatctagagtcagaaactatttaatttcatttctgcttcttagataaactttgggaaaaataaatccttcaagactcagttcttttattggttaaaaaaaagagagatgatgatactaattacatgttctgggttactgtaagttaaaattgaggcaaggcttataaagtgttcagcatagtttctaacaggggctacaatacattttagtattactgttaaaaacagaatatcctcttaggctagttcataaaaaaacaagcaaacagcatagatatttatgaaaccatctgggtatatttatgtatagagttgactgcatttgttccaaaacattagcatgtttttgatttctaaatcttcttagtcaactaaatcaaaacttgggttttaatgtgaatgaatatcattatcctaatattctaaacatattctagtattttatgaggtagcataatgaaagaatgggataaatagatcagttcacttttgttgcatatacaccatcccaaaaattagtggctccaaaaaaaaaaaagctctcctcagtttagtggaaaatggaaaatctcaaatatttttgtaaactgaattttataatatttacactttcttaattatakagacgaatacatcataacaaagacactagagattaatattcaatattcattctacattataattatttttaaattaaaacgctttcctttcttacttggaattggaaaatttctaaatgacggcgcagcatagctagggattgcctgagagtaaaattaaaatagagcaa

SEQ ID NO: 701257 - DNA, 2179 bp, Homo sapiens
ttagggcctaaaagcctaaaaaccaaatctagccctctacaaggttttgctataaagtttagtgggaaaaagccacactcattttttaaatattgtctatggctgtttccatactacagtagcaaagttgagtagttggggcagagactatggcctgtaagagtaaagtgtttagtatctggctctttataggacaaaattttcaatcgttggtctaatcaactattgaatggaatttgaaaattattttgctctataaaattttcttattaattggaatttcaaagactttggcataatgtttattttattattttatgatacagaacgtgcagggtctctctactaattcctcatattatcctaaatatttttataaacaattttgcttattctttcttccatgaattacttagaagtttagtttgtttattttataattcagaagcttaggagatatttaaaacctggctgccgggcgtggtggctcacgcctttaatcccagcactttgggaggccgaggcaggctgatcacgaggttaggagatcgagaccatcctggctaacacggtgaaactccatctctactaaaaatgcaaaaaattagccaggtgtagtggcgagcgcctgtagtcccagctacttgggaggctgaggcaggagaatggcgtgaacctgggaggcagagcttgcagtgagccgagatcttgccactgcactccagcctgggtgacagagcgatactcagtctcaaaaacaaaaacaaacaaacaaaaaaacctggcaattgagcaaatttcttcccataaaagattaattatttgatattttctgtcattaaaatcaaaactaataggtatagtaaaaaagacggcatggaactgaactagaacaaattaactcttctgaatcctagttttattctatgtgttgtaagaattacaacagttacccagttggctgttttgactataatagtgttgtgttttacctctaacttggtttaggagaaatctcaaactgactcattaagtctcactcaagtacaaatgtaggagccttcctcaagtccagaaaccaaagacgtaaaggtctactttgatggtgaaaagtggcagtgaaattaggcagggatctatcaggcaaagtataggaaaacaactctctgaatagccagctggtatgacattgactaccatcaaagtgaagtcctcagtgaaagccactagaaatgaaaatttttgtatttcttaggtcctgttggtgagtgtgcttattcagatggagcctagacagtttgtgaacactgattctgctcttatggagcttcttggtactggcactgaatggtgtgccttaaagtgaaggtaagtgatccctggatggtgacttttctcctttccacaagcttcctataagtctggtctcgtcctaatccagaccaatctccatttttctctttatatcccttgcatcttttctcatctcctcacctcctttagagtccctcaatgggcagattatctccttcatcatttttacctaatatagttatattgcataagttttcacacgtccttgagccctatgtttgaaatccaaaagtcaagaatcatcctttgtttctgtgatcttrtgtgtcatcctttctatgagtagcgaacattcaaatgactggctcaatgaggaggtggccagaagatagaaaggaatactgtgaatagaaacctcaccaattaaaatttcagaagtatcttactctgtgaggattaaaagaggctatgaatagacagtgcttaccacataccaggtctcaatgtaacatcaattttctactctaaaggataatgttttgcagagttggtactaagatcacaacttttgtttacaccttgcctgatgcctttgacttcacactttacatccccaattcaacatctgcttatttgttacctgcctaagtcacatttttaactcaattccatttgccagctaatcttcaatttgtaagccaaagaacatgaatgaacgcacttatgcatgagcaagatgtggtaaggataatgtagacactgattaattattctcacattaagtgggaaatttctctgagtatactgtctgtgattatactaatcagtaaggccacgtttatttgaggaactgcattcagtgggg

SEQ ID NO: 701258 - DNA, 935 bp, Homo sapiens
gaattctgaaaatgctggtgttctgcttcagtgtatgttccctgtaaccttgtggtctctctcagtcgctgtaccagatagcaggtaatccatcagaagggtaacatcataaactgcccttctgccttgttctatttttctacttctggttacaaaatcgaaattggagggagttttgagatagcgtagactgcttggagctctcagaatcttggcccttgtgttttggtccttagcctgtcccaactgaggttttttaatcagacagaattcctctttttctctgagctattccagaaagcaatcacaaattacaaagaaactgcattgtaggtcaagatgcttttctattggacttaccctaaatgtaatggtttgatttctagttactaatcttgtcttattagttataataagtttattcttatacacttttattaatattttatttatattaatttattatattaatatgattagttactaattgacttactagctatgcattctcaatgaaattagttaacctaatgctgcctcagtttagttacctgtaaaatgaaatataaaacaatattgtattagttagcttttggtgtttaacaaaccacccaaaagtgcgacagtgtaaaacaatcatcatttactatttttcacctctgtgggtggtctgggttggtctgatgttttaggctggacttgactaacctcaaattggyttattcagacaaatatactcatctggtagattagttgagaactagcagttatagaatagctttggttgagttattcagttctgatgcacatggtctctcagactagcctgggtttgtcctcctgacagtggcagggctcaaaaagcatgagacctaggctcagaataggcacaatgttactttgccaaagcaattcataagactagcccaaagtca

SEQ ID NO: 701259 - DNA, 1491 bp, Homo sapiens
gactttgaaagtaagtgtggtggagtttgctagccgcttacctaaatctgtcctcattttcttcctgggcacatatctagactacatttccaacttcccttgcaattagatttgttcatataactgagttatattaattggatggcaacaagggtaggaagtgttattttctggcctggactattagaatatcttcttaatgtggttttccctactgcctaattggaataaagagccccatagggtgacttgaaagctagaaaattatagacccttcaatgtcctgaatgcctgcgtgaaagagggccagtcagtcaatggattgcctactgaatcctgttacataagcaagcaatcaatttgggtttgaatatgatacatttggacatctatatgtgacagcagctagcttaccataattgatacagattggtaacattctagtaagtgttattagacatgaagttaaatgacattattctggtagaggaaataayatgcctaaaagaataaaactagaaaaacatgactcttattcatgatggtctagcagtccaattgggctgaagtataagttgtaaataggaaaaaagtaaaaagattgaaagtgaaggattaggttgattgaaaagaacacttggctataccaatgcatatatgttttttccattcaaattcccgtttttctgttgcagtcataaatttatctttccatttgcccctttgtccctggaatgcttataaccaaagcagatgtctcagttctagctttgactggttttgactgttttcctttgtattgctgtatcctgtctttctttttctagtctacatataatgctgagtccgacaaaccataatctagagaaatacttgtacataatgtttgcgtgaatatctaaaaggctcctggggtagaataggaaagtgattataggtatagaatcagaatctatttttgttttcttcttttattttcccattctcacttagaggtaagggttaagtttgagctgtatgcatttttttttctactacccagtgggatttttaaaagtctttttctcatttatatggaggatcatatacatttcagtagtatttgcatggaatgtttctacatgatggcaattataaattattcctttctgtttttcttcagcagaatataaatatcaacagcaaaaacactacttaaaattaatattagctcacttaacccaaattacaatcttacaaggtagatactattgtttgcctcattttattggtaaactgacactttgagggaaagttaacttgctctaggtttccgagctgataaacagtagagtcataatttgaactcaagcagactacagagccccagctcagctcataaacacaaccctatgatagaaaccagctacatacacaacaattgtctcagtgcatttgtgctgctagaacaaaatatcatacactgggtaatgcataaacaatagaagtgta

SEQ ID NO: 701260 - DNA, 1491 bp, Homo sapiens
gactttgaaagtaagtgtggtggagtttgctagccgcttacctaaatctgtcctcattttcttcctgggcacatatctagactacatttccaacttcccttgcaattagatttgttcatataactgagttatattaattggatggcaacaagggtaggaagtgttattttctggcctggactattagaatatcttcttaatgtggttttccctactgcctaattggaataaagagccccatagggtgacttgaaagctagaaaattatagacccttcaatgtcctgaatgcctgcgtgaaagagggccagtcagtcaatggattgcctactgaatcctgttacataagcaagcaatcaatttgggtttgaatatgatacatttggacatctatatgtgacagcagctagcttaccataattgatacagattggtaacattctagtaagtgttattagacatgaagttaaatgacattattctggtagaggaaataatatgcctaaaagaataaaactagaaaaacatgactcttattcatgatggtctagcagtccaattgggctgaagtataagttgtaaataggaaaaaagtaaaaagattgaaagtgaaggattaggttgattgaaaagaacacttggctataccaatgcatatatgttttttccattcaaattcccgtttttctgttgcagtcataaatttatctttccatttgcccctttgtccctggaatgcttataaccaaagcagatgtctcagttctagctttgactggttttgactgttttcctttgtattgctgtatcctgtctttctttttctagtctacatataatgctgagtccgacaaaccataatctagagaaatacttgtacataatgtttgcgtgaatatctaaaaggctcctggggtagaataggaaagtgattataggtatagaatcagaatctatttttgttttcttcttttattttcccattctcacttagaggtaagggttaagtttgagctgtatgcatttttttttctactacccagtgggatttttaaaagtctttttctcatttatatggaggatcrtatacatttcagtagtatttgcatggaatgtttctacatgatggcaattataaattattcctttctgtttttcttcagcagaatataaatatcaacagcaaaaacactacttaaaattaatattagctcacttaacccaaattacaatcttacaaggtagatactattgtttgcctcattttattggtaaactgacactttgagggaaagttaacttgctctaggtttccgagctgataaacagtagagtcataatttgaactcaagcagactacagagccccagctcagctcataaacacaaccctatgatagaaaccagctacatacacaacaattgtctcagtgcatttgtgctgctagaacaaaatatcatacactgggtaatgcataaacaatagaagtgta

SEQ ID NO: 701261 - DNA, 582 bp, Homo sapiens
tgtctcccaggaggatgaccctgagagtttgagtcacccaagaaaaaagaagtaagtcatgagatccaagygtcactgaggagttacccatgctgacaaacagctacacacatttctgtagctctgcccataatgctttttgaatggggcaccaagcaacttacttgataaagtagtaatagcagcagacgctgcaaagtgcctagatatgttcttcctagtacacaatttacaaggccaggtcttaaatgagatagaatgatacaaaggtaagactggaaaagcctttactggtcatgaatcataacctctttacctatcctgccattctacaggtgagaagaccaggaagtttcagtgacttgcccagtggcaaataatggcaaaactaagacttacgtccagatttctagttttaagcccttgttctttcatacacaccatacggtcacataaaatgacttttaaaatgctggccgactattctaaagtagacagaaaattatcaaactaccatagaagtgcaatctatgtgacctttgggaactgattcccataagccaagagtgtgatgactaaggc

SEQ ID NO: 701262 - DNA, 582 bp, Homo sapiens
tgtctcccaggaggatgaccctgagagtttgagtcacccaagaaaaaagaagtaagtcatgagatccaagtgtcactgaggagttacccatgctgacaaacagctacacacatttctgtagctctgcccataatgctttttgaatggggcaccaagcaacttacttgataaagtagtaatagcagcagacgctgcaaagtgcctagatatgttcttcctagtacacaatttacaaggccaggtcttaaatgagatagaatratacaaaggtaagactggaaaagcctttactggtcatgaatcataacctctttacctatcctgccattctacaggtgagaagaccaggaagtttcagtgacttgcccagtggcaaataatggcaaaactaagacttacgtccagatttctagttttaagcccttgttctttcatacacaccatacggtcacataaaatgacttttaaaatgctggccgactattctaaagtagacagaaaattatcaaactaccatagaagtgcaatctatgtgacctttgggaactgattcccataagccaagagtgtgatgactaaggc

SEQ ID NO: 701263 - DNA, 1069 bp, Homo sapiens
ggagtgttcagcaagatcagacagcagtccaggtcaaaggcaaacacacacgctccagcccaaatcctcctggtggcacatcctaccccagatgctaaagtgattcaaggactccaggacacctcttaagagcctttctaagaacatgataggcttacttctgctccataataaagtgggagaaaaaagccagcatataacttaagactagataactgcgtacatgatggaccatttttttttttttggctgggtagagaaatcatataaaacgcaggctgtttagcatggagatgactctcagaacactgggagggtctggcacttgatgggggttagttgcttggcagcctgcctgccactgagggaagtcccattagagatgtatcaccaccttgtcaccaacaggatgatgtcaccaacaggatgatgtcaccaggtaataaacccttcatcctcatatcatggcgtcagtaaatttgaactcagctgacggtagtttcccaagtttattgtaagtggttttaagttaagtctcatccaaacaagttatcacacagcacttaaccaagccctgggatttactgtcttgatgactacatggctttgcacagtctgagatgcttcagtgtgcaaggcagcagctgggggggaggagggggtcttcacagggacagctggcaagagacttcctgaggcacatcagctacgttggtcaatttagggcacggtctggttctgcagctttgaaaggtggattctttctattagcacactttacaagagggattgtaaaggattaactcagtcaccagaaaygaaacaccacttcagaaattcagagacctctgatcaacagaacagacatttgggctttaactgctaaagcagctacctacttggggaaaccatggcattctgctgcctggacagcaggaattaagagagatttcagagttactggcacgaggacaaagcctctcagctcgcttcaccttggcaaccttaaacagtccctccttggtctctatgatagcagtatgttcctttggatggaatacttggtttg

SEQ ID NO: 701264 - DNA, 2456 bp, Homo sapiens
gcgtgtatctgctgtggcgcccccttgctgccaccctggctgctttcaatacgctttcaatatgctgcaggtgggtgctgacagcgcgtgtgctgattccaaagctgtagaaggggtctgagtagggccactttcctgaaaagccctttgactagggcagtccttctcctcgaactgtatccttattaaatgtgttctgtgccagctctgaaggggacaggaaagaatcagttggatggggaaggataggattctccaggcagaagtagtgtcacgccaatctctgtccccagtagcggaagtttgggcacttcctcaaacttcctgaacctcccagcttaggtctctgtcccatacaggaagggaaacttaccttccttctgatacgaaatagggagcatgcctacagttcggggacacaatgttgtccccgaatgtgcaatgttgtcatgaacaaaagcacatgcaggaggtgggcatgccaaggttcttgtaccaccattaagacagagcctttataggatccagtgccatctcctgagaaaccccaaaactacaattacacagctgggaccattcatcactgtacccttgagagcaaaaagagaatttgaaattatagttgaaatgggcagaaaactactactgtaaaatattatttccagaaatcccaaattgtcataatttggctttcaacctaaaaagggaaaaaaacaaaaaatataacatcccatggcttcaaaatttcctgctacattccagatgcctcacaatgaaaagaaaaaaatatatacacttatatatatgtatatatacacacacacacacactcacactctttggatttggataacagtggcctagctgatcttggctttcctgacagttcattagaatacacttttcaaaatccatattaatatgctaaatggaactttgttagacagaaaattccacaagcccacctggtcccagaggtaggtgtcaacgtgattaaatttccccagaaaatctgtgggcttatccaagggcaccagccagaacacctgggcatttctggccattccwaacccaactgaaatcctagctgcattctgtggaactctataggtaagtaaagcttgctgaaaaatgagagtttctttctgtggttacattttgtgtggggtttacaagggtatattcatcttaacactttccttaagtactgggcatctgttacctcaaggtacgtgtacctgagcatacgctttgtgtgaggtgctacgtatttgttagagctacaaaaaagactaatccctgtctttaaagagctcacaatctaaagagtccatgtctttaaagagctcctttctgatcccaagtttccccttcagtaaatgtgggagctggattaatatttctgaactcactttctggaattctacaatgtagtttcaaaggattttatagccagcttctcaatggcacctgcctcccttttttcaggtgaaatatggagcacagaacacatgttgcagccctgcagaacaagcagaagagggtagcataggtcccagctcagggctttgggttggcctcctgcagcgaggatggaagggttcaaccttgccagatttatctgtgatccatccaccccaccatcctggaatcattctgtgggccatcttgctcccctcacatgtttttatcttgagagaatatttcaagtcgctgacagcctattacttttagatttgctttgctgttgctatttgtgtcacagtttcattggccatttttgagcattactttaagtaggaaggtcactagtacctgtgttggtgagtgaaagagaaaggctaaatacatggctaggaaacagtaaaggaagagttggaaagattagctatatagatatcaagagcaactttgcagagaaacacatcatagtagtgctacaagatactagagaacaaaaatcacttgtcttcactttgcttaattttatctgtaataaaaatgttattttaaataacttacacagctgaaaagaattctggggtcctttaaaccatattttacactcaagagtacaataatagaattttcccacatgtaatatgcccaagtttggggagaggcagatcaagatgtaatagaaagctccacagatcaccccccacacaagtacaccaagttaagaactatctacacagaaaaaaaacacattcataagaaccaaaaatcaggtgagcactcacagtacctggttttaacttcatatcactgaaagaggcactgaagaaacaggaaaacattcctggatcaccaactccgctccccgaccccagcagtggtggtgtggtgcagagagcatctctgggcactgggagaaagaagaacacagcaattgtgaggcattaaactcagctgtgtcctgttagagccaaagggaaaaccagatcaaactcagc

SEQ ID NO: 701265 - DNA, 2456 bp, Homo sapiens
gcgtgtatctgctgtggcgcccccttgctgccaccctggctgctttcaatacgctttcaatatgctgcaggtgggtgctgacagcgcgtgtgctgattccaaagctgtagaaggggtctgagtagggccactttcctgaaaagccctttgactagggcagtccttctcctcgaactgtatccttattaaatgtgttctgtgccagctctgaaggggacaggaaagaatcagttggatggggaaggataggattctccaggcagaagtagtgtcacgccaatctctgtccccagtagcggaagtttgggcacttcctcaaacttcctgaacctcccagcttaggtctctgtcccatacaggaagggaaacttaccttccttctgatacgaaatagggagcatgcctacagttcggggacacaatgttgtccccgaatgtgcaatgttgtcatgaacaaaagcacatgcaggaggtgggcatgccaaggttcttgtaccaccattaagacagagcctttataggatccagtgccatctcctgagaaaccccaaaactacaattacacagctgggaccattcatcactgtacccttgagagcaaaaagagaatttgaaattatagttgaaatgggcagaaaactactactgtaaaatattatttccagaaatcccaaattgtcataatttggctttcaacctaaaaagggaaaaaaacaaaaaatataacatcccatggcttcaaaatttcctgctacattccagatgcctcacaatgaaaagaaaaaaatatatacacttatatatatgtatatatacacacacacacacactcacactctttggatttggataacagtggcctagctgatcttggctttcctgacagttcattagaatacacttttcaaaatccatattaatatgctaaatggaactttgttagacagaaaattccacaagcccacctggtcccagaggtaggtgtcaacgtgattaaatttccccagaaaatctgtgggcttatccaagggcaccagccagaacacctgggcatttctggccattcctaacccaactgaaatcctagctgcattctgtggaactctataggtaagtaaagcttgctgaaaaatgagagtttctttctgtggttacattttgtgtggggtttacaagggtatattcatcttaacactttccttaagtactgggcatctgttacctcaaggtacgtgtacctgagcatacgctttgtgtgaggtgctacgtatttgttagagctacaaaaaagactaatccctgtctttaaagagctcacaatctaaagagtccatgtctttaaagagctcctttctgatcccaagtttccccttcagtaaatgtgggagctggattaatatttctgaactcactttctggaattctacaatgtagtttcaaaggattttatagccagcttctcaatggcacctgcctcccttttttcaggtgaaatatggagcacagaacacatgttgcagccctgcagaacaagcagaagagggtagcataggtcccagctcagggctttgggttggcctcctgcagcgaggatggaagggttcaaccttgccagatttatctgtgatccatccaccccaccatcctggaatcattctgtgggccatcttgctcccctcacatgtttttatcttgagagaatatttcaagtcgctgacagcctattacttttagatttgctttgctgttgctatttgtgtcacagtttcattggccatttttgagcattactttaagtaggaaggtcactagtacctgtgttggtgagtgaaagagaaaggctaaatacatggctaggaaacagtaaaggaagagttggaaagattagctatatagatatcaagagcaactttgcagagaaacacatcayagtagtgctacaagatactagagaacaaaaatcacttgtcttcactttgcttaattttatctgtaataaaaatgttattttaaataacttacacagctgaaaagaattctggggtcctttaaaccatattttacactcaagagtacaataatagaattttcccacatgtaatatgcccaagtttggggagaggcagatcaagatgtaatagaaagctccacagatcaccccccacacaagtacaccaagttaagaactatctacacagaaaaaaaacacattcataagaaccaaaaatcaggtgagcactcacagtacctggttttaacttcatatcactgaaagaggcactgaagaaacaggaaaacattcctggatcaccaactccgctccccgaccccagcagtggtggtgtggtgcagagagcatctctgggcactgggagaaagaagaacacagcaattgtgaggcattaaactcagctgtgtcctgttagagccaaagggaaaaccagatcaaactcagc

SEQ ID NO: 701266 - DNA, 642 bp, Homo sapiens
taattcaaaaatcaaaaaccaaatactgcacgttctccctcataagtgggcactaagctatgggtacataaaggcatacagagtggtataatgcacactggagactcagaagggaggagggtggatggggagtaagggaggaaaaacgacctgttcggtatagtgtacactatttggatgatgtgtacactaaaaccttagactttgccactatacaattcatccaagtaacaaaaaaccacttgtaaagctattgaaataaaaacatttttaaaaaaccacttctgagtttacaaaggactttcacaacctactagttcatttcaaagactctgtagtacctattatgaaatacttcttgattatgttgattcaaaagacaaaagatactcccagatgtgccttaygccgaggttcccaatggtccttttaaagctctgaagtgtcttaggaggaagataacatgcaatgtgtaaaaacatgatcagaacaaaacagttgttctttataatagttgtatctgaaaatgacaagaaagagttgagtgaaagccagtaaaaccaaatcactgatccaggtacaagaggcatttcaaccacactttccgattaagtgagcaatattttttcctctattttttcc

SEQ ID NO: 701267 - DNA, 1832 bp, Homo sapiens
ttaaggagcccttagcaaaagtgttcattcattttgttttaattagaagattaatttcattaatttaaatggtgtatgtgaaactgaaggtgccagctttggtcccactatagagaggcagtgatgctcacaaaataagcactcagtcacttcagacagttaagacttggctcttccatttgctaagtatatgaacttggacacttaatcactgtgcctcaattgtctcatcagataaagtagaaataatcagcacctacctcctaagcttgttttcaggattaaataagttaaatacacaaagcacttgggacaatccctagarcacactaggatttacataaatatttattctttttcttcttataactactgctgctgttggtactactgcatgagcaccagacagcttcaggggaatgctagtagcacccaatagcaacgtaaggcaaaatagagtggaaattaaagttccagggaagaaatcagtaataagaaattacccaagaaaatatgaataattcagtccagtttcaggatatagaactaatggaaagagggagaaagattaagaaatttccaaaatgtgaattccagacaaataaaataataatcttatagcaggaccatactaagagttgtgtctataaataagttcagtgaggacagaaccacctagctaccagtaccatgaaataaatagagaacatgaccctgacaaataggctctcgtcagctgtctctggtaataatggcaatgggaacagggaatgcacattcttctggattgagacaaaagggtctgttatgcaggctctgtaggcagcctgatttttcctcggagggatttaatggtagagaagaacacaacctgcagacttcactttgcccccttggttcttcatttgttctgggccatggttaagaagctgaatttccttggactttccttttgaaaatttagggtgaaattaacataagaagctactgacagaaggaaaggaggccagcataaattggaaataatcagtaaactgttttctgagatgactttggacgaaggtaagaagaacccattcgattcctctgtctcatgttgtttgtagaaaaagctacatttaaaagacatttctattactgaacaaagggaaaacttaaagtagaatctgcttcaataatcaattttcaaaactacatatttaaggaggaaaaaaaggctagaagcacatcatgtcatgcttaagagagttttccctgttctatattaatattttgattcaaagagttggtgggcagtggacagtgggcattgtcactggtgactcaaaaggcagaatgcaggaagaaggtgatggctttgctatctgatgctaaagaataaaattttaacggtaaaaatacccagcaaataataagttctactctgtgctccaccattacctgtatctagataaaggcatttccttgcatacagatatttcggtttgcattacaacatttgggaccactgctccataccatgagtattgttttatttccataaaatctttatgtcaacatgaccagtgagtagaggtagtgtgattggtccagaccccagacttcttaggggttgtactttcatcttgtcttctcttttctctcctcatttcctccatcactccttccccttcccctcctttccccttttcctctcttctctgagttacttcccctctctctgaaaactgcttggtgcctctttccagagagggcattgttactggacttttctgtacttttgtcccctcatctataaaatggaaccaagaatcatctctaggttattgtag

SEQ ID NO: 701268 - DNA, 1832 bp, Homo sapiens
ttaaggagcccttagcaaaagtgttcattcattttgttttaattagaagattaatttcattaatttaaatggtgtatgtgaaactgaaggtgccagctttggtcccactatagagaggcagtgatgctcacaaaataagcactcagtcacttcagacagttaagacttggctcttccatttgctaagtatatgaacttggacacttaatcactgtgcctcaattgtctcatcagataaagtagaaataatcagcacctacctcctaagcttgttttcaggattaaataagttaaatacacaaagcacttgggacaatccctagagcacactaggatttacataaatatttattctttttcttcttataactactgctgctgttggtactactgcatgagcaccagacagcttcaggggaatgctagtagcacccaatagcaacgtaaggcaaaatagagtggaaattaaagttccagggaagaaatcagtaataagaaattacccaagaaaatatgaataattcagtccagtttcaggatatagaactaatggaaagagggagaaagattaagaaatttccaaaatgtgaattccagacaaataaaataataatcttatagcaggaccatactaagagttgtgtctataaataagttcagtgaggacagaaccacctagctaccagtaccatgaaataaatagagaacatgaccctgacaaataggctctcgtcagctgtctctggtaataatggcaatgggaacagggaatgcacattcttctggattgagacaaaagggtctgttatgcaggctctgtaggcagcctgatttttcctcggagggatttaatggtagagaagaacacaacctgcagacttcactttgcccccttggttcttcatttgttctgggccatggttaagaagctgaatttccttggactttccttttgaaaatttagggtgaaattaacataagaagctactgacagaaggaaaggaggccagcataaattggaaataatcagtaaactgttttctgagatgactttggacgaaggtaagaagaacccattcgattcctctgtctcatgttgtttgtagaaaaagctacatttaaaagacatttctattactgaacaaagggaaaacttaaagtagaatctgcttcaataatcaattttcaaaactacatatttaaggaggaaaaaaaggctagaagcacatcatgtcatgcttaagagagttttcmctgttctatattaatattttgattcaaagagttggtgggcagtggacagtgggcattgtcactggtgactcaaaaggcagaatgcaggaagaaggtgatggctttgctatctgatgctaaagaataaaattttaacggtaaaaatacccagcaaataataagttctactctgtgctccaccattacctgtatctagataaaggcatttccttgcatacagatatttcggtttgcattacaacatttgggaccactgctccataccatgagtattgttttatttccataaaatctttatgtcaacatgaccagtgagtagaggtagtgtgattggtccagaccccagacttcttaggggttgtactttcatcttgtcttctcttttctctcctcatttcctccatcactccttccccttcccctcctttccccttttcctctcttctctgagttacttcccctctctctgaaaactgcttggtgcctctttccagagagggcattgttactggacttttctgtacttttgtcccctcatctataaaatggaaccaagaatcatctctaggttattgtag

SEQ ID NO: 701269 - DNA, 514 bp, Homo sapiens
ttaaaacacaaggaaaatattatctttatgcccagaaaaaaatttttctaaatttagaaaaccaaaagaaaccaagagctattggaaaccatgagaaaatttagtaagagtaaggtggctgattataaaattaccatacaataatccatagctttattaacgagtatattttatcatatcttattttacagaagcaacttatatattctcctttaagagtattaaataagaatatacctgacaaaaagttaattttttctactcccccaatcctcatcacagtcttataacatagagtgtattataatccccattttatagataaagacctaagtataaataacaaaactatgaaagtattagataaaaacatagctgaatctgtcttkaacacttgagtaaagtaaaagcctttctaagcatgtcacaaattttagaagccataagaaagagtggtaaattttactaccagaaattaaaattttctgtataaacatgctataaaaatatccaa

SEQ ID NO: 701270 - DNA, 622 bp, Homo sapiens
tcctcaaacgtaaaatgaggacattaaaatctgatatcttaagattcctttgaattttgagactacatgtcttttttatatgactgaacttctaagtataaagactgcagagactctttgattagataaaatgttaagcattttaaaaaacattctaccttaaaaataccattttactttttgtaccatttacatttcataatttctcccatttttgtgattttcacatttaatatgttgtatataatgctataaaaatagattgaagttttaaggaaagttcattattattaaaagtttagtactctgagtctgggctttctgacaataaaatacaccagagcaaaagcccaaggaagtacaacaaagaggtatactaattgacaaaatagctgctgcaacatgccacaggcacttcaggcctaacatttctgaaaaagcatggaacatgtggattcccgggaaaaaactgcctcagatcatttgtaagaggaagaaatagtaagtgacctctctaaccaaaactgrctagtagatactacatctttcccgtggcatttttgtttgtttgcgtgttattgagaacagggcaaggaaaggcactgttttctccaggtagttg

SEQ ID NO: 701271 - DNA, 792 bp, Homo sapiens
gagaaaaagagaaagacagggtaaatgatttctgcagctctcacaccttcccagaataactcttaaccgcaccagccagggcctggtacattctttgtttgtttgtttgtttgtttgtttgtttccccctcttggttttatttagttctcatgtactgtacaatagtaagggaaaatagtgaaaaatcaacccacagcctcatwtcctttaaaaaggttttcatgttttgatttattttgatacctctcatttgtatgcatttcagtatgaagatgaaaataccaattaagtttttcactcaactttatttcagacctttcacctcactgttttattttgctcttaatgaatgtctgtattgtcttcatagatttatttaaaggaacaacgttattgatacagcttagttgctgtagccattataatgttccttaatgtcataagaagcaaagcagtcattatgtccacagtagcaaaaggacagaatcatatttgttatttttaaaagctgttctttttaaactcttctggtttgagaagcatgtaaccatgaagagtttgtttatattgtatggatcattcagttgaaaactgcaagtaatctttgcatttaagcatccctatttttcttttttaggaattttaactgacacataataattacacatagtcatggggtacaatgtgatgtttctatagatatatacattgtgtaatgatcaaatcagggtaatgagcacatttgtcacttcaaacatttatcatttctttgtagtgttaacattcaaaat

SEQ ID NO: 701272 - DNA, 792 bp, Homo sapiens
gagaaaaagagaaagacagggtaaatgatttctgcagctctcacaccttcccagaataactcttaaccgcaccagccagggcctggtacattctttgtttgtttgtttgtttgtttgtttgtttccccctcttggttttatttagttctcatgtactgtacaatagtaagggaaaatagtgaaaaatcaacccacagcctcatttcctttaaaaaggttttcatgttttgatttattttgatacctctcatttgtatgcatttcagtatgaagatgaaaataccaattaagtttttcactcaactttatttcagacctttcacctcactgttttattttgctcttaatgaatgtctgtattgtcttcatagatttatttaaaggaacaacgttattgatacagcttagttgctgtagccattataatgttccttaatgtcataagaagcaaagcagtcattatgtccacagtagcaaaaggacagaatcatatttgttatttttaaaagctgttctttttaaactcttctggtttgagaagcatgtaaccatgaagagtttgtttatattgtatggatcattcagttgaaaactgcaagtaatctttgcatttaagcatccctatttttcttttttaggaattttaactgacayataataattacacatagtcatggggtacaatgtgatgtttctatagatatatacattgtgtaatgatcaaatcagggtaatgagcacatttgtcacttcaaacatttatcatttctttgtagtgttaacattcaaaat

SEQ ID NO: 701273 - DNA, 677 bp, Homo sapiens
ttgctaaattatacggtagttctatttttaatttttttaaggatcctccatactgctttccataatggctgtagtaatttacactctcaccaattctctctctacattttccaatatttgttatcttttgtctttttcatagtagccattctaactggagtaaggtgatatctcattatgcttttgatttgcatttccctaatgattaatgatatttagcattttttcataagactgttgactatttgtatgtcttttgagaaatgtctattaaggtcttttgcctattttaaaattgtttttttaactattgagttgtttgaattccttatatgttctggattcttttttagaacacaatgcctgtcctctgtaaatgctgtcatagaaaaaaacaacatattgataacttagactaggtgctttgacagtagagttggtgagaagtgcttgtactcagggtaggttttcagataaagcaagacatttgcttatgaattggatatggggaaatgaagkaaagagataaattaattacgtttgaaggcctactttggtgtagagagaaagattagaaatgtttgccaaaaaaaaaaaaaaaaatggatctcttttggctcaatgggatagaactcatctttgaactgtaagagagcaagaacctttaaaactcactg

SEQ ID NO: 701274 - DNA, 1905 bp, Homo sapiens
tcatttacccagctgatgcaaaactagttcactcttagyctaagcatgcagcccttcatgattccagcttgaggtagggttgactgatcactctctctaaactttgaccaaaagcaatcaactgacttctgcagccccagctccatacaacgaccaaaaccacaatttactatctcaggtgtttttctggatgaattccaagtgccctctgaataaaagcagccttgggtgcttcgttcccaccttccttcagatctctgcccaacagttcttcaccatcatgttaattatttaacaaagaaggattttgttaagcttttgtttatcttcagtgaggtatgtctgagtgatctaatctgctattttctacaggaaaagccacaatataacttttataaagagaaaaaatagctacgttcttccagaaattagttatttgttattttgattccttgttagcaacactgaggaccagagtcaggccctcacttctgagcagatggcttcaggataatatcagacttcctatctacttgggtatatatctaaagggttaagtttgagtttcctggatttccaggagcatgatgccactaaaagcattaacatctttaaaaaaaatctggttaggaggaatattaaaaaaaaaaaaaagctccatggaaaagatttttaaagtccttgcagggcacggtggctcatgcctgtaatccagcactttgggaggcttaggcaggcagatcacttgtggtcaggaatccaagaccggcctggccaacatggtaaaaccctgtctctacttaaaaaaaaaaaaaaatacaaaaattagctgggctagttaaaattagcccagttactcaggaggctgaggcatgagaatcacttgaatcacttgagcccaagagacggaggttgcagtgagccaagatcatgccagcctgggcaacagagactatctccaaaaaaaaaaaaaaaaagagagagagagagagaaaatcctttaggctctggcatattgaaaaatccattttgtaaaaactggcattttctcctgaggaagaaagagtgtttagcccaaagaattcattctaagctgaggcattattgaaaattacaatgaaaggtctcatctttcttaccaagtttatgagtggaggaaataggaaggtgaggacagcagcaggatataactccgtattttaaagtaattactgactgggctgactgtaaattgtttaaaaatgaaatgcaaaacattgtaacatttagaactacaaagttttaaagttattttaaaactgttcctagtgatagctagggtccatcgatagtggggcctagtatccttcaatagacaagatttacctttccaactagaaataacaatatttctcccatctactttggtaaataaagcaagtttaactccagcttcacctaattatttttatctttcttttcttctacctttgtttttcccctctatctactttttctcacattttatgtcaaaaaagtcaggataggaagcttctgagcccttacttttgcccctatgggtttttttttttttttttttttttgggatgttagcacatcacatctagccataaccttagtacatgcacatgtgcacacacactttaaaagaaactcagtaatttcaacactgaagaactacttcagttttattgtattatctactcataacaaattacattgcaatgagagatttttgccatgctactaacagaattctggcttataatttggccactggtggctgtagcataaaatgcattaaaaacaactcagtagctctttgtaggcatactgtgaatgcaatgtgtgaacctcttgctcctgaaaagatcagacaaagctgaggttcaggtaatttggaat

SEQ ID NO: 701275 - DNA, 1905 bp, Homo sapiens
tcatttacccagctgatgcaaaactagttcactcttagtctaagcatgcagcccttcatgattccagcttgaggtagggttgactgatcactctctctaaactttgaccaaaagcaatcaactgacttctgcagccccagctccatacaacgaccaaaaccacaatttactatctcaggtgtttttctggatgaattccaagtgccctctgaataaaagcagccttgggtgcttcgttcccaccttccttcagatctctgcccaacagttcttcaccatcatgttaattatttaacaaagaaggattttgttaagcttttgtttatcttcagtgaggtatgtctgagtgatctaatctgctattttctacaggaaaagccacaatataacttttataaagagaaaaaatagctacgttcttccagaaattagttatttgttattttgattccttgttagcaacactgaggaccagagtcaggccctcacttctgagcagatggcttcaggataatatcagacttcctatctacttgggtatatayctaaagggttaagtttgagtttcctggatttccaggagcatgatgccactaaaagcattaacatctttaaaaaaaatctggttaggaggaatattaaaaaaaaaaaaaagctccatggaaaagatttttaaagtccttgcagggcacggtggctcatgcctgtaatccagcactttgggaggcttaggcaggcagatcacttgtggtcaggaatccaagaccggcctggccaacatggtaaaaccctgtctctacttaaaaaaaaaaaaaaatacaaaaattagctgggctagttaaaattagcccagttactcaggaggctgaggcatgagaatcacttgaatcacttgagcccaagagacggaggttgcagtgagccaagatcatgccagcctgggcaacagagactatctccaaaaaaaaaaaaaaaaagagagagagagagagaaaatcctttaggctctggcatattgaaaaatccattttgtaaaaactggcattttctcctgaggaagaaagagtgtttagcccaaagaattcattctaagctgaggcattattgaaaattacaatgaaaggtctcatctttcttaccaagtttatgagtggaggaaataggaaggtgaggacagcagcaggatataactccgtattttaaagtaattactgactgggctgactgtaaattgtttaaaaatgaaatgcaaaacattgtaacatttagaactacaaagttttaaagttattttaaaactgttcctagtgatagctagggtccatcgatagtggggcctagtatccttcaatagacaagatttacctttccaactagaaataacaatatttctcccatctactttggtaaataaagcaagtttaactccagcttcacctaattatttttatctttcttttcttctacctttgtttttcccctctatctactttttctcacattttatgtcaaaaaagtcaggataggaagcttctgagcccttacttttgcccctatgggtttttttttttttttttttttttgggatgttagcacatcacatctagccataaccttagtacatgcacatgtgcacacacactttaaaagaaactcagtaatttcaacactgaagaactacttcagttttattgtattatctactcataacaaattacattgcaatgagagatttttgccatgctactaacagaattctggcttataatttggccactggtggctgtagcataaaatgcattaaaaacaactcagtagctctttgtaggcatactgtgaatgcaatgtgtgaacctcttgctcctgaaaagatcagacaaagctgaggttcaggtaatttggaat

SEQ ID NO: 701276 - DNA, 1395 bp, Homo sapiens
tctgattaaatataaggatacaagttctcctccaaaagtaaaaggctcctcaaacaagggacttaaagggaggaagaagggaaatggattacaggaaactagaaaattctcaagtataaagaaaataaggagtcaattattaaaagcactgctaatgttatccatcccttgtaacctctgtgcttacacattttacaaaattggttcacattacacgcacactgtatcctcactccacttactagattttaactatctctatgattaaatgttcctccaataatttttgatgttgtaaacaacctatctcactgatgtgccaaaaccatctctctactgcctgacattccttccagttgtttccaatgcttctgccctttgaagaatcgttacaatgaacatgcttgaacagtctgaggctgtgctagctggatgtttcttccagcagattccccaaccttgggtatcagtattcagttaagatatggagacttaagcaaacagctgcctacatttgcagctacaaagctgtgtctgtttcctgtgctgttgcaggtaagaaaatggtagccaatttacatcctgttccttgtctccttgctcgtgcgaaggtgtccaggggttgggcttctgaactgactttctatggaagccaattcctccgaagaagtaaaagacacactgctttaactataaggctggctttgtgagttggaggttattgatgtatgaacattttctagttttcagtgagtaaagagggacggaaggtttaacctctagcaaggggttaactttcagcatcaagtttctattctagttggacacaaggatttcatggtcaaactacatctcaccaccttgatacctggggctgcatctagtcaaagaggataactttccagattgggggggggggaaggtaacaacattagaaagtgcataagcagtaactcttccctgctagaacttctaagaaatattgctaagctgtcawtaggaattaaggtgaaaatctagcacaggtcctcgatcctttaaacacaattccaaaacccagaagactgaaaaccgaaagctacatttggcaagcaaccaaacaactgcgttcacttggtggcaagcctgatctgaattgacatgaggctctttgcagctttatcatcaaacttagcatgcctgttcacatgttttgctgaggtggtttgatgtgtctgctgttccaatcctctggcggtgctacagtatacgtggtaggtgctcagtacctttccatagctccactcccttttatgggatggactgtgtccttgaaaaagatatgttcaattcctaaccccacatacttgtgaatgtgaccttatttggaaataggttctttgcagatgtaatcaa

SEQ ID NO: 701277 - DNA, 608 bp, Homo sapiens
tgttatatctacaatmcttccatcttcattcttttttcaataccccagccatgtcaggaggtttgcttaacaagcagtaaattattttgccacatctagattttaaaacaccaaggctgttggcaaaaacacatcctaatgaaaaactgtaagagaatggattaaagtaccatttttgcaggtcaaatttattcaactaaagaaagttctagactggcatggtcccccgaatttaaaaacctactcctaatttaaaagcacatatgccaacattaccccttgaattaaattcaaggaataattcaagtctaattcaagagtggtctaatgcaggtccaattcaagattcaggactgagagccctatcagacctggccccacctacttccagcttcaggccacatcccgatctcactctgaccacaactcgtctttcagttcctcaaacctgccctgcagttctgtcgctttcaggattttttgcatagcctcttccctgggcccagaacatttttttaccaattctcttcatggttaactccaaaaaagatatacaggggattgcagcctacatgtcacttcagggaagctccgttggctgccttaaa

SEQ ID NO: 701278 - DNA, 654 bp, Homo sapiens
agagtaaaataaaacaaccagataaacagagcccgaaacggaccaggatagaaaaataatgccaattacacttgaatccatttaagcagcagcttctggaggaagraggaggctacaataatagtatccaaaataaacaattcagtaattgatcaactagtcagaggaaattatcctaattcaagatcttatatgaaatataaagtgttatacagacaagaatgaggaaaaaagacaccaggagatgtatctaatgtgcagttgtgagttcaattgtttatgcaatttaaaagaatatctggcatcactacttctacacactcttctgaatctgtcttaaatgcactatcatttaaacaaaaacacaaaagcagtctgtcctacttttttccaaagaagtaaatatacagaaaggttttaccataaaatgttagcaatatttcctgtagattataaatgacatcaagaaaccataaaaataaaaattttcactgtggccaaaaaacaccaaaagccaagtcaaaagacaattgacaggtgggaaatttttttgcaactcaaaattgaaaaacaagagcaagtcattgtaacatatagagttctaagaaaaatgggtaagagaaagaccaaggtccccaaagacaaacaagaaag

SEQ ID NO: 701279 - DNA, 654 bp, Homo sapiens
agagtaaaataaaacaaccagataaacagagcccgaaacggaccaggatagaaaaataatgccaattacacttgaatccatttaagcagcagcttctggaggaaggaggaggctacaataatagtatccaaaataaacaattcagtaattgatcaactagtcagaggaaattatcytaattcaagatcttatatgaaatataaagtgttatacagacaagaatgaggaaaaaagacaccaggagatgtatctaatgtgcagttgtgagttcaattgtttatgcaatttaaaagaatatctggcatcactacttctacacactcttctgaatctgtcttaaatgcactatcatttaaacaaaaacacaaaagcagtctgtcctacttttttccaaagaagtaaatatacagaaaggttttaccataaaatgttagcaatatttcctgtagattataaatgacatcaagaaaccataaaaataaaaattttcactgtggccaaaaaacaccaaaagccaagtcaaaagacaattgacaggtgggaaatttttttgcaactcaaaattgaaaaacaagagcaagtcattgtaacatatagagttctaagaaaaatgggtaagagaaagaccaaggtccccaaagacaaacaagaaag

SEQ ID NO: 701280 - DNA, 654 bp, Homo sapiens
agagtaaaataaaacaaccagataaacagagcccgaaacggaccaggatagaaaaataatgccaattacacttgaatccatttaagcagcagcttctggaggaaggaggaggctacaataatagtatccaaaataaacaattcagtaattgatcaactagtcagaggaaattatcctaattcaagatctyatatgaaatataaagtgttatacagacaagaatgaggaaaaaagacaccaggagatgtatctaatgtgcagttgtgagttcaattgtttatgcaatttaaaagaatatctggcatcactacttctacacactcttctgaatctgtcttaaatgcactatcatttaaacaaaaacacaaaagcagtctgtcctacttttttccaaagaagtaaatatacagaaaggttttaccataaaatgttagcaatatttcctgtagattataaatgacatcaagaaaccataaaaataaaaattttcactgtggccaaaaaacaccaaaagccaagtcaaaagacaattgacaggtgggaaatttttttgcaactcaaaattgaaaaacaagagcaagtcattgtaacatatagagttctaagaaaaatgggtaagagaaagaccaaggtccccaaagacaaacaagaaag

SEQ ID NO: 701281 - DNA, 654 bp, Homo sapiens
agagtaaaataaaacaaccagataaacagagcccgaaacggaccaggatagaaaaataatgccaattacacttgaatccatttaagcagcagcttctggaggaaggaggaggctacaataatagtatccaaaataaacaattcagtaattgatcaactagtcagaggaaattatcctaattcaagatcttatatgaaatataaagtgttatacagacaagaatgaggaaaaaagacaccaggagatgtatctaatgtgcagttgtgagttcaattgtttatgcaatttaaaagaatatctggcatcrctacttctacacactcttctgaatctgtcttaaatgcactatcatttaaacaaaaacacaaaagcagtctgtcctacttttttccaaagaagtaaatatacagaaaggttttaccataaaatgttagcaatatttcctgtagattataaatgacatcaagaaaccataaaaataaaaattttcactgtggccaaaaaacaccaaaagccaagtcaaaagacaattgacaggtgggaaatttttttgcaactcaaaattgaaaaacaagagcaagtcattgtaacatatagagttctaagaaaaatgggtaagagaaagaccaaggtccccaaagacaaacaagaaag

SEQ ID NO: 701282 - DNA, 1109 bp, Homo sapiens
gtaactccaggcctcagacccaaagtcacatgcaggaagatcttcctcagaaacctggctttctgaagttcttccacagccccataaacttatcaatgaaggatacacttatatttaagaaactcaaatagcctgtacttcagagagtatataaatttggcttttggaaattatatgagataaaacttttgttttttttgagatggagtcttgctctgttgcccaggctggagcacagtggcgcgatctctgctcactgcaagctccgcctcccaggttcacgccgttctcctgcctcagcttcctgagtagctgggactacaggcrcctgccaccacgcctggctaattttttgtatttttagtagagacggggtttcactgtgttagccaggatggtctcgatctcctgacctcgtgatccacccgccttggcctcccaaagtgctgggattacaggcatgagccaccgcgcccggccgagataaaactttttatcacatgacctggaatgagaaaactaaactaaacaaacaaacaaatatattactacttgaagaagcctcaaagttctaatgattgacacattaaaaaattaaactcatggtatttgtaatacattatttagagaatggtttagacatgaatgaaaaattgtatgaagccaggcatttctaggttaagtgtaagttccatgtgtaagccaataatttatggccaaagattgaaagttcagtaggtcatgggatgcctaactccttaactctaagctggtctctttcattggctaatagaatactcttagataactctcttttgcgtcaatttggcccttagcgagagcttataggagactttctgggtggttttcaaatgctcattttctaagtgcctactcttttcaacactcttgtgtgagttacaggcaccagtggtctccttagaagacaggtgtagggattttataatggatcagttaaggagatcttcaaggttctgcctactaactacatgttgatatttcagatattagtctttagtttttaagtagtagtttttctagaaataggaacagtgatagtattgacagaagaaataatacaagaaaaa

SEQ ID NO: 701283 - DNA, 1247 bp, Homo sapiens
ttttacatattttttaccttacatatatatatttgactatatagttcttytccatttatattttaaatttgttaaagttaaattacattcatttggataataaacaaattagaggtatatttactccaaagaaattaaaaactgatgcctcttggtactcaccctcccatatctgttggcgtaggacccagtaagcaaggagtggaaaacaatgattgtctcatccaagtcccagatgaacactctctacaaaggaagaaccaaatcaatgtgtctttgccttggctgagaaagctgttattcagttaacttcaacacgaaaaagtcatcttgaaacggaagatgaatgaaaaatctgaatttattatttcaaaaaaaacacaactgtttcaaagagtatctcctaacttttctccagatataactttggatgaggtgcaagaggataattacatttgtaatgtcaatataaatataggaaagagataatctatgtcctttctaattctgtaatagaatttcggtctcagctctgaataaatgaaaaaaatgagttatagctagtctggttataacttgagatagagatgagcaactaatcatatatcatttatcttttccttacctctgatctctgttcattgagaagcactaaaataatgaatcttatgttttactcttaggaagccaagtattaaaattgcatccaaagactaaaaccttacataataaattcaccttatgttacctattgagctgttatcaaagggatgggatacacattgttcttgccaggttttttaagtctttagggtatagatatttaacaaaataagcatacacatcactcatgctcttagacatactcttgaagtatttaaaatgggaactgaaggaattcatttcaaaaaggtctttgggataccacaaaaagcctatcaagcctgttttacttcttcctattcccactcacaccagtacatattcatatacatagattctgctaaaagtttcattttttcagccaaaataatcatgttttccaaccatcagatttcactctggcaaaaagcagaaacttagttgcagtggattcaaggctatgaaatctaccactctttaagttcttacttaatccttcctgcttttgaactcccccaaaatatgtctcattagatgattactatttcagtttagaacattccaggttttcctttctcaatatatataagtgtgtctttcatttc

SEQ ID NO: 701284 - DNA, 1146 bp, Homo sapiens
agggatgtatcagtcctcactctataaaaagagcaggatttcatcatcttgagatggctgtcttgacacacactgtcctgctgtcactcaggatcagcacccggcacctgccgctgaaggttctgcccaaatcacagactcttcttgcacgatgttgacatccctcaggatcagtccagtatattctccttgcccacttctctctccttggattggttcaatagcctcttttttctgtcccctttcctcttgatgttaaatgtcacttttttgtggaacatgtgatctataacatttatgtattaactaaatatactattatgcatggtttgcaatattgactgacttgtggattggcttgaacctatgtgcccacggctcttgctaccaggtgaatgggcagtactgaggagaattgcctccttgggaactccacgtagctcatagtttttatgactgaaatagcatcaatagaagtctgatgttgtgggaaaacacaaatgttcatggacctgggtatgtctgactttccaccacgcatgccatctagcataagcccccttctccagcctgcagccctgcccctgcggcatgtctatgctttcttcttctagtcattctgagatgctagtagttcctcaaacctgatctcctcattcatgcatttgtgctgctccctggcctggaatgtccagcccctactgtctttcaaagtttaacttagcattaccctagtaatctcataatctcatccctgttagtgtagccaactagctgtcccataggcacttcaaatgcaatctataccaaagtaaacttacattcttgttcctataacctgcttccttatttatctatttcactgggggcacaaccagtaattcaagctgkaaacatacagattttcttttcctgtttcttctccacatccaaatccaaacccaagtccagctgatgccccctttacctctcctgtcctcaacctctgagggccttgcccaccttgtgttgctggctcagactcctcccagcaggtcccactgccaccagtgttctcaatccacactgcagcctgcaggtggactgccattctggccatttcactgcaggtcttaaaacccttcaacagttcacaagaccccatta

SEQ ID NO: 701285 - DNA, 610 bp, Homo sapiens
ctattctctgatcttctttggatagtttattctcaccctgtgccaggagtgagtacacttcttccctttttggggaagcatgtgctttccttcccagtctaaccaggtgtcttcatgtcattttgctgagcacctccttagcagggctgtggcacccaagtgagtaacacagtgagagctgtgacacctgggtgggtgatgcaaggtgatgttctttgtgtcatcttcatgagtgtgtgggattttcaaactttcttcgagggataggttcatgatgcccacttcttttgcatcacaacaacctctagagttgyacctataaagaatgccagtagatgctgttaatgaaactaacttgaaaagctgtgtgtgtgtgcgtatgcgtgtgattagagatatagtatcttcccacttagaatataaaaataatcaactttaaaagacagcagtggaaggacaaataatgctgtatcttaagagatgttgtgaagggaaaaattttccagtttcctgttgtggaaatgagtgtctcccctccatgtcaaaaaaaaaataataataaccatgactatgattgttaacaattatttatttatttatttatttattt

SEQ ID NO: 701286 - DNA, 1518 bp, Homo sapiens
tcactggtcacacaacaaaacaacacaaattgatactgcagtgtgtacatgatcaataagaagataaaacacactcaaaggttaaaaatgttatgcacacaaatatgtataatatacatgtgtatatatgtatatgcatttggtgaaacgaaaccaatctacgcaatgttacaataactggaaacatgaagctcctaacaatgagtactgattggtaagtcacattattacctaaaggggaaatataagagtagttttatgattttgacaactgaaatcataaccacctaataacaaagcatatactgatgaagaaacaaggtgcaaagtaaatagtgagaaggcagacactcaccttcggtgccattgggagtcatggaattactatttatatgagagttaccgagtttggggccactgggggattcactactaccactcagacggctatgcgggctggttagatcctgcatttccatagacctaaagacaagaagccttccatttgacagatgtaccaaattcataacaccaccatttaatgcgctaatgacttgacacctttgaaacacacttgcacaaaagtcccattgtatctatttcttagactcaaaataattcatctcacattttgacttcaggtatcccttcatcatatgcactatcaaaagatgtcacttgctttacctatacagccagtcacatgaagcttttaaaatttcatttttctcttacacagttcatcaagtcacaaggtctaatgtgagacaatgacatctattataattttcaaagaaaaaatacagtcatcgttgtctttttatattaaaaaggaccaaaggcattacttttctaaaagaaaaggcaactatgtaaagaagtaaaatggaaatagatcactcttctgtggaatctgtttcatctaataaattagcactaggtactcccttataatttaccacccagttgtaatttaatgggtctccaaaccaaataaaacacttgaaacctatagtctagtgacagggaatgagatagtcctgatgcatgtgtttactctggcaaactacttaattgttcctctgtttcccttgaaacaaatgcagcattaaaacattatgatgtcggctcacttgtttgctttgtggattacatacagtgtgcccagttgaaaaaggataaggccaacatacagtgggtccctgcaagcattagcactcggaatacctcagctgtcacttactctgggaaataacaacaattctactttagtgctataattttgcaattttaccatataaaaccagttaaatgccctctgaaagttcttagactctgcagttacttattcyataaaaggtacaaaagccactactcatgttcacaatttcagaactatacatttatatttaataccctattagtgaagagagaatttatttaaagtcactaaaaacacacttagattccattattttcttacagccaatttcttaaaagtttagggcccatttactt

SEQ ID NO: 701287 - DNA, 1382 bp, Homo sapiens
taatttttatgttattgttgtctcttttcttttgtaacatggcaaacctttaaatactttgtaataagtatattttaatattaattagatgtcatatgttcctgagatcttactcttatccaagttatacatgtagccagtactagtagtcccataatgcaaattatcttaatcgacaaactcataataaatactcatatattacataaacaatgttgctaatttctaagtagcagggacttggttttctcttgattagaataatctagactatgctactctatgctaatgaacaatatcaagcaaagcaaatggttatctattgctcttgtaaattctgctctggatctgtgcaattcttgagagcaattcttccatgcagagacttaacaatccaagctgagtaacttcagtgtttccttcttgggcattctccactatctccttggcaagagaggcaaaaacctggataactgatcttactgcctcagttcagagttatctacattacatctgctaacatttttttggtacagaatttgccaaaattttatgcaatttcaagcaaggctgaaatacagatttttttgttcttttacctattttgaaaaactctgtcttctaatttgaatactgagtttaataacactaataaaattgaagaaatttttggatttagacctttcagtttgtgttctgtctttttttaagaaattagtttcttatttcatttttcaaattatttgaatatcttttaaagtaaactttattgattggccttttaactgtacctatttacattagttttaatccagagattactatacatatttttaacttttctcagttttcttggaatataagtgaacttgaaactataaaggtacatttaccatccctgccccaatccaaattcttctttatggttaggatatgatgtaaaatatcactgaaaatattatattcattgttctatgtcaacatagatattataatgaaatccagaggaaaatatatttttaatttaccagctctttcccagagctgatactacttattccttcataaatatcaaagtttcgcaccatcatcattttccttcaacmtgaaaaacagttttcagtattttttatattgcagatctcctggccacaaatccttattttcgtttacctgaaaatgcttttatttatttccatttttaaaggatattttttctgccagacattaaatcgtgagattagaatttatttctttcaatactttaaagatgtttcctcaccattttctggcctctattgttaatgatgagaaatcggttctcgttagaatagtgcttctccagtatataatgtaatctttcttcggataagttcaagact

SEQ ID NO: 701288 - DNA, 792 bp, Homo sapiens
cttgaccagttagggaaataaagactgtagttttaatgagtatttcctcctagttttgctatgaatatgtttgtgtatgtataatacacacacacactcacacacacacacatacacattctgttggttctatttctctggagacccctaacacaattgtttgctctttgggagtttcaatttcttcacttgttaattaggtaatactagcttaattaatggrtcaaattaaatttattatgtaagggctctacacatgttatttattatgtctaaagccttactactggaaatctggaaaaagtaaattagttcttgatgtcacttctttgtaattctttcataacaacaattagatattaaaggctcatgagttatattcagagcatacttactgtttaatttaccctgtaaacatctttaagaaactacatttcttagttccaccatccccaaactatccacacatccaccatccacatgtgtataatcacaactgccatggtgggacaatgtgaccacagctcacagttgattgactaagtccaggatttctgattcaaactgatcctataaaagtgccttcctagtggttataattatggatccaggatttgggagctgagttatgttaatgacagtattcctgaaagacaatctaacatctactgcttagtttgtaattctcctccttgtatgccccacaatagttcagtgttattttaataatgttccctgccttcacagcaccagaacttcttgtcattcatttgttttgcttaggcaaactaa

SEQ ID NO: 701289 - DNA, 792 bp, Homo sapiens
cttgaccagttagggaaataaagactgtagttttaatgagtatttcctcctagttttgctatgaatatgtttgtgtatgtataatacacacacacactcacacacacacacatacacattctgttggttctatttctctggagacccctaacacaattgtttgctctttgggagtttcaatttcttcacttgttaattaggtaatactagcttaattaatggatcaaattaaatttattatgtaagggctctacacatgttatttattatgtctaaagccttactactggaaatctggaaaaagtaaattagttcttgatgtcacttctttgtaattctttcataacaacaattagatattaaaggctcatgagttatattcagagcatacttactgtttaatttaccctgtaaacatctttaagaaactacatttcttagttccaccatccccaaactatccacacatccaccatccacatgtgtataatcacaactgccatggtgggacaatgtgaccacagctcacagttgattgactaagtccaggatttctgattcaaactgatcctataaaagtgccttcctagyggttataattatggatccaggatttgggagctgagttatgttaatgacagtattcctgaaagacaatctaacatctactgcttagtttgtaattctcctccttgtatgccccacaatagttcagtgttattttaataatgttccctgccttcacagcaccagaacttcttgtcattcatttgttttgcttaggcaaactaa

SEQ ID NO: 701290 - DNA, 1421 bp, Homo sapiens
  misc_feature 991, 992, 993, 994, 995, 996, 997, 998, 999, 1000, 1001,1002, 1003, 1004, 1005, 1006, 1007, 1008, 1009, 1010, 1011,1012, 1013, 1014, 1015, 1016, 1017, 1018, 1019, 1020, 1021,1022, 1023, 1024, 1025, 1026, 1027, 1028, 1029, 1030: n = A,T,C or G
  misc_feature 1031, 1032, 1033, 1034, 1035, 1036, 1037, 1038, 1039, 1040,1041, 1042, 1043, 1044, 1045, 1046, 1047, 1048, 1049, 1050,1051, 1052, 1053, 1054, 1055, 1056, 1057, 1058, 1059, 1060,1061, 1062, 1063, 1064, 1065, 1066, 1067, 1068, 1069: n = A,T,C or G
  misc_feature 1070, 1071, 1072, 1073, 1074, 1075, 1076, 1077, 1078, 1079,1080, 1081, 1082, 1083, 1084, 1085, 1086, 1087, 1088, 1089,1090: n = A,T,C or G
tcaacaaatcaaagcagactttatcaaacaaaacattcactttctaaatggataaaaatattcaaaaagactaaattatttgtttttggacacaatactagttagtggatgaggaacagctagaattgacttcatgtgatgaaagtgaagagtttctgtggtaggcaraataaatgctcctccaaaggtgtccacatctgaatcactggagcctgtgaatatgttattacatggagaggaagcagggattatggttgtaaatgaaattaatatctccaaatatctatataacaatcaaataaaaacattgaataaatgtgcttatattatttcccaacatttagatcaattacttcatatgtggagatttatttattgacatccttgtgaccttcccatgcctgtgtttgtggggatcctaggctaggcattgtgcccatagatccacaagaagcacatgagatgggagaatgctcctgaagggagaggagagaaattctgaaaatgtagtaacacatattttaatatatatttttgtacaaaatagtaataacacttacgaagtgttgaagtgctcaaaaagtgccatggatccagaaagggatttacattgtttcatcgtattttatactaaacttgtgaggcagggtttgtaccaccattaaaccaacaagtaaacaagaatatctactgctgccattagtgttcattgttgtaccagacactggcaaatattattagaagagagaaaattatagaattaactctaaaaagtaaatgaaaacctcttatttaacaagttacagcattgattaaacaacacaagtttatacattcagatatatttaattaggttttcctaccactcttgaaactttgcatttgcatgtagagagcaaagatgttacgtctacaaataaaagtatagtttatattatatataaagtatagtttatatatagtatatatactatatatacagtatatatannnnnnnnnnnnnnnnnnnnnnnnnnnnnnnnnnnnnnnnnnnnnnnnnnnnnnnnnnnnnnnnnnnnnnnnnnnnnnnnnnnnnnnnnnnnnnnnnnnnctaaggctagccatagaatattgcataatcttttgttttctcttaactctgcccatattcttctcagttttctcctttttgtgtgccatttgtcatctgctaggacctggacacataaaataatcgactcttaatgatggggtaattaacacaaacaattacagtagacaatgtctaaaaagtcaatgatttaacaaaataaagatgaaaatttgaataaaggtccagaacatattaaataagttagttttatgttatcaagtactaactgtatatgagattttgttattctgtttttctgttcctggtgattttttggcattgaattaag

SEQ ID NO: 701291 - DNA, 607 bp, Homo sapiens
gaaaatatacctctatatctatgcatgtaagactgtcaaaatgaattgaaagatttatatctaatgaaacttacaaaaatagaaacaagcagaagtttggttctaagaatcatctgcagtattaatttgcaggccatctatttgcatggtaatgtggaactataaaataaatgaaagctgaaaatgtagaaaactatcttaataatcaatggaaaaattatgttatataatcaacaattttttgtcacaatatcaaaatctcttttaacatctgttaaagctgtaaagagaaakgaaaaaatagaaaaagtggcaagaatatttagtacattcttgtttaaaacattaaagtgtttcagttatttgcagaaaacttatcaggaatagtttgaacagtgtttgccttatttttatattactttttaacgaggaatatccatcttttctgtgtgtaaattattttactcttttctaagcttatacgggtcactcacatttaatcttttgcactttcaatatggtgaaatatctctgagagtctttttaatctgaagtgtttgttggtatcacatcctctaagacatcatcttttttgttacaatctcct

SEQ ID NO: 701292 - DNA, 1160 bp, Homo sapiens
caaaggaggttttgctagaaagaagcccaagaatgttctagaagtccaggttgaatgtctatgattacactctagaatctatttaaagttttttttctgttaaaaagtattaattgccaaatcgtgatgttccttcctgttttatgtgtgttagatcagaacactactcactcagcatccacagggagagatatagcctctggatactacatatggcaaagccaagccagaaaggggtggctgatgtcgctgaggtgcccaccatcatccaaccgcaggcagcacttcccagccccaagtttccagccttctcctgaggcacattccctaacttgtctatgacaagaggcacatgaattactttccaaggtacagattttcaggttcctcacctaaatccatgaatttgaatcacctagattggggccaaggaagctgtgtgtttcacaaacagctgcagtggttcaacaggaaagcttgggaatcccgacatagaagtctgactccaaatgtgaagttccactggatcctaagccacagaggtttggggtcactgtttggttgaaatggcaagtccatttgtcacccaaacaaagggtaattccaggaaagcatttgctggaggggatgcatttttcaagacctgctgcagcaccttcagattaggctcatttgcacacctgcatattttcccccaattttccagcgtaaccctgtgtgaatcattgcagttttgctaattgaatctgagagcacctgtttcttaatcaatattaatgcatcacatggacrcagaatttgtaatgagtcattctagggggaagaatgatgaaattcaaaaaaagtattcactattcatctgcaacctgataacttgtggccagaattccatctgggaagatgtagggcagagcaggggtaacaaacagggagccccgagacaccaggcccctccacagggctctcgaggcacttacctttctcccatttttggaaagggaaaacagtgcctataacctgccaactcccaaacacctgttctgttgcaccctggaagtccccttctctggttctgagggcttcagtattattatagttttctgtttcttcgcagtccccaggctctgtacttcctgccacagactctctcttgatcttgc

SEQ ID NO: 701293 - DNA, 620 bp, Homo sapiens
ttgttgttgttgttagcggatctaccttataagacatattgaaagaatttcttctgcctgaaaacatgtaatcccagaaagtatttcaaatccacataaaaaaacagagtcccagtaaagataattatgtaattataaaagagagtataaattcatatttctttttatttcttcattaatgaattttaaaaagcgattgtrttcaacaaccgatacgtacttgtaattgttttgttgggattatatttgacagtaacagcacaaaggagcagaatgaaagaaaagctgtattgaataaggaatggacaccaaatggttactcaaatccatagaaatagatcaaatgataaataaggttaatataacaaaactctagaaatatatacttcctcttctttgttttctcagctcctttgaaagcataaattcatgtaaagtgttataatgttattttgggctggtaacatatgtaaatataatgcatttaaaaataatagcacaaaatgagggtaagaaagtatagggttatctagaaataggatttctacttctcattgaagttggtgtaaatctaaatttgattctgatcatctatattgatgtatattgtggggaaacca

SEQ ID NO: 701294 - DNA, 661 bp, Homo sapiens
tataaatctctgatggaggctgggtgcagtggctcatgcctgtaatcccagcactttgggaggccgaggtgggcggatcacctgaggtcaggagttcaagaccagccttgccagtwtggtgaaaccccgcctctactaaagatataaaaattagccgggcatggtggcacagtcctgtaatcccagctacttgggaggctgaggcaggagaatagcttgaacccagaggcggaggttgcagtgagccgatcacaccactgtactccagcctaggagacagagagactccatctcaaaaaataaaacaaaataaaataaaataaaataaaataaaaataaaaattaaaaaatctctgatgggaacgattgctatttaaagtgatggatgagtgaagttgccacttatttgggagagcctctgctgggttgagatgattcttcattatgcgtgtttctgaacttgaactctagttgctttaaatgatatcagaaaatcatctgaggctgggcgcagtggctcacacctgtaatcccagcactttgggaggccaagacagatggatcacttgaggccaagagttcaagaccagcttggccaacatgataaaaccccgtctctattacaaatgcaaaaattagccaggagtggtggcggacgtct

SEQ ID NO: 701295 - DNA, 1125 bp, Homo sapiens
aagacttaaacatgcaatatcggtagaggttttaggatggrgttgataaaaggtaaagattgatatcaacacttgagcaaagtaaataattttaattttgctctaaacacattacaaatacatcccttaaaaaaaggcaaaataaggctttacagacctcaattgtatacagtttggggaacatgtttaagaaaatgaatacaacattacaaaaatataattatagcaggaccttgaaagagaggaaggatatgcaaataaagaaaccaaaagcttctgcatcactagctttatgataaatctgtctttgattctagcaaactagaaacacaaattgtaacttgcatatacatgtataatagaatgagacatcgagcaaattgttaagaatgttcccacattttaacaaagagtagatagaaacatttctgtagggctaatggagaagaggcaaaatttactccctggaaaacacgcactttccacataaaatagtaaaatagaggggttttaccaaaacattttctggaagataatacatgaaagactggggctttgtgcactttcctccctttcctgttaataaagggatgtgcttttctttgtctcaggctaagtgactagggccaaaagaaaaacactcacataccagggagactatgactgaagaaattactaagactgcttctcctgtagctaagtacaagaaaattcttgagggcacacataagaatgcttccttcttacctaaaaatgcctaagaaaattaaagctaattgtcacatctgatgatgagagagaaaagagagagtgcaacaggagaaatgtctgcccttgtagattttggaaggaccagcatggtgtgtgtgtgcatcttacccctgtaggctcaataaataatattgagtcatattgaaaggaacctaggcattggggtgaggaaaacttgggagaaaaggagagtgggcatttgaatgagatcagccatagagtgcatcacccatgtcagaatggtggaggatgaaggctactgagtagcctccaagaatcctccgatatatatctatcaaatacccaacatttgaatctttgactcaccaatcagtagaagattatcagcaacat

SEQ ID NO: 701296 - DNA, 592 bp, Homo sapiens
caatatatcctaaagagatttgggaaacttctgaakatttgctaaggagtaaataaaacccatttgatatggtttggctgtgtccccagacaaatctcatcttgaattgtagctcccataatctccacttgtcatggaggagacccagtgggaggtagttaaatcatgggggctggtttttccctgtgttattcttgtggtagtgagtaagtctcataagatccaatggttttataaagggcagttcccctacacatgctctcttacctgccaccatgtaagacatgcctttgcttctcctttgccttccaccatgattgtgaggcctccccagccaagtggaactgttagtccattaaacatctttttctttgtaaattactcagtctcaggtatttcttcatagcagtatgaaaatgtgctaatacaccatttataccaccttggcttcaaaacccacctccaaactataaaacgataaaatgatgttcaaagaaaaaattgtagttaaaataattttttgtgactcattgaactgaatggactcccagcattcatgaacttcttataagaggataaattcatggagaat

SEQ ID NO: 701297 - DNA, 867 bp, Homo sapiens
gtataggatatccctgagagacaggactatacttctgtttctttcatattttcacatgtgggactgagccacagagaatactggataccaaacatggccatctgctttttctaatgattaagacagaaagataatgatgcaatgaagtaaatgcatgctcatctgctcctcatattagctaggcagaggtgtgatctccactttatggttggaaaaaaactgatgttcggagaagttaaataatttacaagactcgtagttcgttattcttattccaagtccactgctcatgttcccaagctgccctaggccagagcctgcttcacatttagcagactaagggtcctttttcaagtgccattttggtcaaggttaaataaatatggttttctccaatgcggataggaaattgataatgagatgatttgtaacaaatgattaaacggctatcacttgggagtctcctccctctccccttcatgtgcttcaaaagttaaaaggtgctggttgaaggtgggagcgacatcactttccttgaagagaaagaagctttatcyccacacccctcaccatccagtccttctgcaaaaggagaaaggatccctctccctaccacccagttactctgaagggatgataacagccattggggggttaaaaagaggcagtgaacccccagttaatgagtaggaattcagcaggcagtgtaagataaatggagctctctctgcttctgctagagtcagcatgaactgcggccctgcggcttgtttgtggcaaatggagtgcgcgaaatatcaaagggcagtgatccagaagaagaccgactttgacaaattttaaattggccagaaagaaaaccagcaa

SEQ ID NO: 701298 - DNA, 1492 bp, Homo sapiens
agtagaaaagaagtgaggaatgaaagaagcaactgattggatttatcctctctctagccctctccttttaaaaccaaagatgtacagcttctagatggagaccttataaattttccaagccatatacatatacatgatcttagtacacacttctgtgttttatggaatatatgaaaacgcattgctgggcgcagtggctcatgcttgtaatcccagcactttgggaggccgagcagggcagatcacctgaggtcaggagttcaagaccagcctggacaacatggtgaaaccccatctctactaaaaatacaaaaattagccatgcgtagtggcacgtgcctgtaatcctagctactcgggaggctgaggcaggagaattgcctgaacccaggaggcagaggttgcagtgagctaagaccgtgccattgtactccatcctgggcaacaagagcaaaactccatgaaaaacaagaaagaaagaaggaaagaaagaaagaaggaaggaaggaaggaaagaaggaaggagattcatatatgaaattatgtactgaagaaagagaaaaagaaggaaagaaaggaagagagaaagaaaagaaaagaaaaagatggatgaagattcatatatgaaattatgtactgaagcctgtcagtgatgatcagtagttaaactggtgaaatgccttgttaagaacatgaaagtgctggcaaagttgcagtaagtgtcagtctccagcaggtattctttgggttatgcagatagaattcctatgaaaggtgggaagatggatataaatgatagcactcaggatagtgtccactagtagaaaatcagatcatgagatgggagcctggattgtgtcccagcattggcaaacattgggtggtggggcagtttttcagacctcacagggctttatctgatttaaaatggtaataataatattttccttttgttctttgaactgatattttaaatgtactctgaacttcttggaagaaaaaaaaaacctatgcaaacctaaaagttttgctgttcttagcagtggttacaatgaatattcaaaataaataggtattcacgaaatagttattgtttatcactatttctcctgaagcaccattaaaatgccaataaaagaataaaagaaaaaagattcaaactcacaaagaggagatgaacagatggraaatgtcagcagcattttggaagcacgagaagtgtatcattgtgtggttggcttcgatttctttctgcttatccaccatgctgagagctgggggtccagggtggggcaggaagaaacaagctgatttgtgcctcagggccctgcaagggctcaggaattagagtcaccagatgtctctgaaggcaggaatgtggatggggcaaaaggagcactggtttacagtctgtgatatgcaggcaaccccctcagagccccaaatggagcctgtgcagctttgtaactgtccatctgaccccagtagcaga

SEQ ID NO: 701299 - DNA, 1923 bp, Homo sapiens
tcgcagactgcatggaagtataggaaagggagatttggtctcctctatttcttaccgctttctatacctccacggatacataaaaagaacatcatgtaccacagatatgtactctcacatacatctgtttggttgatggtaccacagaatcatcaatatttccctcactttagaacttgatcctaggtgtccctctgccttggctcatacaaggccagaaatctcagagctacaaaccagtgtgttcatttgcttgggggcaatgtgtgcagcacaaacagtactggatttggagtcagcaatccaggatcaaagccatgcttcaccacctcctggttatgtgacttaggacaagtcactcactgtttctcggccttgcttccctttcctattgatatggtttggatttgtgtccctgcccaaatctcatgttcagatgcaataccgagcgtcggtagtggagactgctgcaatgagattggatcatgagggcagattctcatgagtggttaacatcattccctcggagctgtcctcatgatagtgagggagtgagttctcacgagaactggttgtttaaagagtgtggcaactgccttgcttggtttctctctgactactgctctgtgcaagtgactttctggctcccccttcactgttcaccatgattggaaggtatcctgaagcctccccagatatcaagcagatgctggcatgatgctttctgtacagactgcatgaaccagttagacctctgtataaattaccagtctcaatatttcattctagcaatgcaagaatggactaatacacctgttcagtgtggacatgacctaccctgagttcttcatagaatattgcaaaacctatacaacacataaaaggtatgctcctttcatatataaaatttcatatataaaaattatacatttactatagaaattcaaaaaacaaaatttcatatataaaaattatacatttactatagaaattcaaaaaacaaaacacttcacagtcctaccacccagttgattatgtccttccagtcttttctgtgcataatgtgtgtgtatatggatgtatgggtatgcatgcatgtatgtatacatatatatttaatgtatttaaatgtgctatccacttcatgctgccttgtgatttcttttttaactgatcacattgttccatgttttatttatttattttttgagatgaagtcttgctcagtcacccaggctggtgtgcagtggcacaatctcagctcactgcaacctctacctcctgggttcaagcgattcttctgcctcagcctcccaagtagctgggactataggcatgggccaccacgcccagctaacttttatactgtagtagagacaaggtttcactatgttggccagactggtctcgaactcctgacctcaggtgatccgcctgccttggtgggattacaggcatgagccaccacgcccggcctgttccatgttttaaaatattctacaactttattggtagtgactactctatatgtatgaatgtaacattgtttatttaaccatatctctgctttttgcaattagagagatggccattattcttatacaaattraatcctttttacagctcctaaaattagatatacatgataaaaatgaatgtatctttagagtatttggtgcatattgacatagtgccttttagggaagtttacccatttatattcccaatatatgataatgctcttcccctacacctttgccagcactgaaagttgttattctttttaatccatgctaatttgaaagatataagatgatttcattgtttaatttgaatttctttgagtactagtaagattaaactttttagtcatttataattgcatatacataagcttatatgtatttatacatatatgtgtaa

SEQ ID NO: 701300 - DNA, 599 bp, Homo sapiens
tgggtctgtttgcattagagtcaaagagctgggagggagtgtttaattggatacaggaggatgataatttgcttacctgtcctaccagactgaattcagtcacacatgggctactttttttttacagacataccggaaacaaagttggctgctattaagcagggttgggggagggaagctggacatgtatgctgggtggtgaagaaacaaccaatatcaactctgccagtgttatcattgcatgcacacatgcgcacacagatagtagtgcccatttgtctatttctggactttttattcatattcattcaacattcatatgtctgtttattcatattccagagcaataccacttaaattaccttgactttataatctatttttatacatggtaggacaagttctaccscttaccccatcccggacttttaatctatttctttaaaatgttcttgcctggttttaaatgtttagtcttctagatgcactttgattttcttttgccaagacttggaaagaatggatttgagatttgaattggcatcatattaaatttgtagattactttgagggaaaattaaaacatctaaacaatacca

SEQ ID NO: 701301 - DNA, 774 bp, Homo sapiens
aaaaagagagagaacaagagataaaggctgagagtcactatggcaaagtgtttctttttttatctcagttctttttttaatttgctacatactttggaatatatgaaaatcctaatgtgttttcgtgggtattaaaaatacttcatggaatttgtaatgattgaaacacaagtactataaaatctacttttaatgttggttttgttcttgaaataggacttttgaaagtacaatgctgcatggtcattttaaccttttactttccattttactttccctcaaattgttaaaaaagaatatgtactgtgtaatgaatgaatgtttacagtatttaatctagtttaaacattaactgagaaaataagatcatctgaaggctgggagtcattctgcattattgtccttagacttctgttttcagagaccatttcttgtaaacctaattagagatggctgcagcaaacttcaagccttagtgtctttactcatctcggtgtctaaaagtcacataaagcttcaatcatacaaactgtgcagttaaccaagtgtgatgatttttttcccaaagtaattttattaactcaattttgttttaaagtagtatttccaagtttaaatatattttattctagaaaaaaatcattggaatatttagtgctrtaagatctacaatccatgaatccttaaaaagcaggattgcaaattgccccgaatagattaatataaagtagtgaaataaattaagcaagggataaaaaagaaacctttggtgaa

SEQ ID NO: 701302 - DNA, 1358 bp, Homo sapiens
cggggtttcaccatgttggccaggatgttctcaatctcttgacctcctgatccgcccaccttggcctcaaagcactgggattgcaggtgtaagccaccacacccagccaagtttgaatcttttatgtgccctactagtttaggattatgatgaggtattataattttattttctatggcttcaaaacatgcctctgtttgtactattgtcttgttaaaaggaagagaggaaaaaacaggttgtgtgtgtgcatgagagagaagcaaggacatacattcaagagtaatgtgataacactctaataacagtatgtcatgtactgtgggaatacagagaatgaaatgtactaccttggaaaggtcaggaaataatttactcatgaagaaatatttgaagtggattgtgaagaggagtttttgagacacactaaggagggattgtggtaaagaaaaaaaggcacaaatgcaggaggcagcctggtacattctggttataataagtgtttcaacatggattaaggtgtgtgtgtgtacatgcacactctcgcacaagtttatgtgcctatattgtgagagaggcttgtgtttcatgtgatatgactgctggatagagaattgctttcttaaatgacttaagtttatcttataggtgatggagaacgatgcaacaattttaagcaaagaggacatgataggatttacatgatggataatgactgcattatcagtgtgaagggtgttaggaaaggaaaccactggtaacagtcaataggaagtgtccaggcaaaaaatgaatgggattcagagcaaggcagtggagacagagaagaggaacctagttattagtgcagtgggttagcaagagtgaggggggttgggggtcagggaggggctcctgagttccagctcgcacggtctctgagatatgggctacagggtatttatgcttaggattttcttgtttcatacatatatatcatacataaatgttatacktgtataccatatgcatgtatttagaaatatatatccctccagctttcctctttttcgaacaaagaaattgacatgaataatttctgaacagcaaagaaacaatggtcctttgtggtaggaagaataatggctgcccaaagatgtttacttgctatccccagaacagctaaatatgctgcgttacttgacaaagggaaattaaggcagcagaaggaattacagttgctaattagctgactataaaagaagattattctgaattatcttggaaagggctttcactgtaatcgcagttggtccttaaatgaggacgagaaaggcaagagagtcagcttcagagtgatgagatatgagaaggacaac

SEQ ID NO: 701303 - DNA, 1448 bp, Homo sapiens
atttgttattggacaccatttatgtgaggaatgaaatgtcactcgccatgttgttttcagtcagtcaaattgcttctgagtacttgacaatcttctatattgtaccagtgagatgcagatatatacgtatatatgtattcaagactcctctattatttattgcccctggcccaaacacaccaaatgaaagtactttctgcctacatcatgaatcactgtacaccataaataaagctgtcacaaaatgaattttattttagttaactgaaaaaaaatcaagaaaaaatacatttccctttgtttagaatagtagttgccaaaattgaattacaaaatgtattgtttttcgttgaagagcaaaccaaaaatgaattagacgtggactctcaggggataatatccactggcacagggaaagcagatttagtggctatgtttgcaactatgagccagagaatattaatttgttattctaaaatttagctttctgtataacttgaggtatgaagtgggaatatgctgttaataatgataacggttggcttatttgttggaatcttccaataagtatttttatgaccactagaaaaaaagggtgtaaatttaaaagtagttataaagtatattgaaaagataattttaaaattgagaaaggaaagaaaagaacttttaatattctgttgtggaattatggctctctttcatcctcctcgcattttcaataacacttagtattattgacataactttgtcttctttgaattgcttcttgagctctgccattcactaatggcttttgctcttagcattgtcttgaaaaaattaattttcagtctttttttttcttttttgtgccttcttaatactcttttcgaacaaaacctttagtagaatttcaacatataatggagctgctctcagtcagggattgactcagccctgttcagagaccgaaccctctttttccctcctcctccascactacagcaatcatcaagtgcctctttgaaacctcaggacatcaggagcaaagggtgaatgtgactattcccagcaatgcagatccatgtatttacctcttcttattctttctgttttatcaaacttttccgagtccaattctcacaacaagtagcaattaatacatggcaaagccatatctcggtggagttagatgtagataatttggcatttcttactcactcttcaagctggactgcccaggttccttgaaactagcctgtgccattttcaactcaaacatttttttcatgactttccctctaactggaatgcaacttttttttatctcttccatttgaaaacttgtacatcatttgttagtcatttctagtattccaaatataatttactggtgctgtcaaactaaatgagatctagtaccttttatgacaattatttaaccattgcttatgatatgatccaac

SEQ ID NO: 701304 - DNA, 826 bp, Homo sapiens
taacaaacctgtgcatgtacccctgaacctacaatatcagttatacataaataaataatatttgagtttcagtcccttagtatacccattctgaggtcccacagatatttttaacctccactttaccaggccacagaggaaagtcacacaatcaagatggtacagcagatatagtcattattaagtgtttattaagtttttaacttcagatgtaaacattatataaaatcagttatataccataagagcacatacctggcataatatatttttgatatacttaattggttaaataagttctatttttcactgtattttgtttgaaaaactcaaactaaatattttacccctaaatcttcctatttagcaatatagagcaaaagttctttattttgaaaagatacaagactttacatacccaaaggcatggagagaagagataattagtttaaaagagatttatcacccctgccaaagggaatagcattcaagggagcagtttgggaactgaggagatgcccaaacttgtgcttcacattggactagaacagcccagtttggtctgagctaagagtctagttattgttctcattgccaggtcatatggacatctctcaaacccaaaggcatgcaatacaatgattatttcaaatctcttgaccagtctcgacaaagcaccacccaaaaattccaacacttgtgcyccattcagtaaactgatgatcctgatcatactgatgcttctaactcaaccttccccactcccagaacatgggaacttccacgcttcccttccctgatggcccttgcatgtgggaggtgggca

SEQ ID NO: 701305 - DNA, 449 bp, Homo sapiens
gaattcaatcctttacatttttatctatctaaatgttgtgaggaacttaagaagtatagtcttttctatcaataataagtacaggatattttgactctccaactatctaattgtcttctatgtgactatgatgtatccttaatcactgccagattgatattgatattcaatgtaaattaccttatggtgctctcccaatgaagttaaaaaacatttccctttgggtgtacacttaactactaacatragccatcctcaaatcatgataattaataaaataaaataattaataaagtactaataaagtattttaattagagaacctccaaaagcagtcatagatgatccaataacaatggaaagcaaatagcttaataaagtaaacaattttcacataagaccaccagaaaaatattttgtttaaatatctggaaacagtgattgttact

SEQ ID NO: 701306 - DNA, 638 bp, Homo sapiens
ggacattgtccaatccctgaagacaatgttgactaatctttgctgcctgtaaccctaagtaatagccatttggctattgaatacttgcaatgtgatcggcataattaaaaatcagaatacttaattttatttaaatgtaagtaatttaaatatagacagccacaagtacgtagttgctgctatattaagccagcaccgtcttagactggcaaagagtttgaacgcatgccaagtaaggtacactgaagaacatctaaataccaatatgttgtaaatcatgcatatcataatattaataatctacttatcatgggaagaaactgtaggaataatatgaatgagaaagcattatagtatgcctttcactttgcaccacattttctgaaaatatcataaacctaaagtcaataaattatatgttatgatagtaatatatatccagaaacaataattgaaagcacggtgcttgctacaagtacaataaaatgccatctgcrtcatttttaacaatacagttattccttttaaaatatattctcttgctctttgtacgcattatgcatttcatgtcattgaattgacagttattacacacataagaaggcgttaacccgtatgacatctccttattttaaatc

SEQ ID NO: 701307 - DNA, 2500 bp, Homo sapiens
ttctttatctatgcctcattttgaaggaagaaaccttcccttgagaaggaaaagaacgaagaaagacagagcctagggtactgtgtatcatgaaatgaagggtagaacagtttctcaggagaccaactgtggttccctcattcaaatgacacacgagaagacactgtcatatgtttaagtttgcttttatgtaaggaactatttactgctattctgcttaaaatgctgacccttaaaatattttataaagatctaacatcaatgcaactttacccagccaattataaagaagtaggctgatttttctgatattttgtacagacatttttaaaaattttaatgtaaactttgatattgtaattattaataacacaaaaggattagttctcattttaagcagggaactatttgtgtcctctgtactacgtaaactcaacataagatgcaagagaaaactaacattatgctaatagataaaaccacacatgatctgtggtggaaggactggaattgcactatcactgaagtgcaaatgtatatatatatttaaaattttgaaagcttacactcttctcagatttagtttaaaaaagattctagtttcattctctcctttattgactgctgtttctgctacatgaccaaaagtagttttcattgttcatgtttggtttgttttgcttgtaggtaaagcttattataattaaatacatagagccaaggaagggaaaaattaacagttacataagagaataaggagaaagtaagaatgaaggtcaatatatactccaaacattgatgtttctgtctccttcacatacagatattggcctcgtgttgtagccttaaaccatctgatccagacaggtcaaagcaagaactttttaaaaaatctctcttcttttcagcaagttttcccgctaaggaaacacattctcatccctcaaatcacttgatgtcatacaataacttttagctcctaccccaaattggaaaacaatattgtgaggaataaaatcattgtagattttrcaggcaatcctaaataatcaggtgaattactttagatataatcatctcttagcttggaaatttgcagatcgatttcgtttatctatttgcagtgcaaacaactttaaaatatgcatattatttgacattttcatatcttttgagtatgagagaaagaaggtaaaagaagaaagtagagaatcttctgtctatatttaagtgatataatttcagttatattcatggcatctctagtatttatcacatagttttccatggaaaaatatcatttttaagtctggtctattgtttacttcaaactgtataatgtatagtaaactatttatggataagatgaattacaccgcagctttaatttttcaggtttacagctgtcacttttgacacagaaaatgaagagatttaaaatccatttcaggcatgtaactataatttcataaaattttatgccccacaatatataacatgtgataaaagatgtgaaatgcagaaaatattcatcatttactgcttcttcatgaccacaactttgggccctttaaacagggataaatattggaggaacagtattctttttcattgttgaaaagcttccaaaatagattacagtaaaatttaaaataaaaccagagaatatgtattattgagacaaagtcaggacacctgagttttgttcccagactctgaacctgtttgctgcaatatgctggacaaatactttaatatcccaaggtttagccccctcatcttgattgctaagaagaaaacgattattaataatgtcaaagaagataatatctataaaataattcacaggtctatagcaattattcaaatagaaaatattaatgtcattattaataaacaaataatcccatttcttttgatttacatttttctcttcaaacatacccaagtcagataatgacgcttctatctactaattttactccatgttatatttttctgtgttgctactggagcttgaacttgatgtcatcctttctaatcctggcagccatcaattctcagttcctaatgctttctggtagaactttttcctcatataaatgcggtaacacatttacatatgaaatccatttaatgtaatgtattttatctgaaaccatcagaaaacaaaacttgttttatttttaactgttttaaattttataggaacataatattttgatttgtgaaacattaaaaggctcctataatgagccatctagcccaaatagcagcaggtaattttatttggtgtaatggaaagaaccctgggcagaggattggataacccagtttctattctgatttctgtaattaactagctctatgatattggggaaatcacttagccttcctgattctcaatttcctcatttgtgaactgaagtaattgaaacaatgttctctaaggaacttcctagttccagcggcctgattttatgccgacagaagccatgca

SEQ ID NO: 701308 - DNA, 2500 bp, Homo sapiens
ttctttatctatgcctcattttgaaggaagaaaccttcccttgagaaggaaaagaacgaagaaagacagagcctagggtactgtgtatcatgaaatgaagggtagaacagtttctcaggagaccaactgtggttccctcattcaaatgacacacgagaagacactgtcatatgtttaagtttgcttttatgtaaggaactatttactgctattctgcttaaaatgctgacccttaaaatattttataaagatctaacatcaatgcaactttacccagccaattataaagaagtaggctgatttttctgatattttgtacagacatttttaaaaattttaatgtaaactttgatattgtaattattaataacacaaaaggattagttctcattttaagcagggaactatttgtgtcctctgtactacgtaaactcaacataagatgcaagagaaaactaacattatgctaatagataaaaccacacatgatctgtggtggaaggactggaattgcactatcactgaagtgcaaatgtatatatatatttaaaattttgaaagcttacactcttctcagatttagtttaaaaaagattctagtttcattctctcctttattgactgctgtttctgctacatgaccaaaagtagttttcattgttcatgtttggtttgttttgcttgtaggtaaagcttattataattaaatacatagagccaaggaagggaaaaattaacagttacataagagaataaggagaaagtaagaatgaaggtcaatatatactccaaacattgatgtttctgtctccttcacatacagatattggcctcgtgttgtagccttaaaccatctgatccagacaggtcaaagcaagaactttttaaaaaatctctcttcttttcagcaagttttcccgctaaggaaacacattctcatccctcaaatcacttgatgtcatacaataacttttagctcctaccccaaattggaaaacaatattgtgaggaataaaatcattgtagattttgcaggcaatcctaaataatcaggtgaattactttagatataatcatctcttagcttggaaatttgcagatcgatttcgyttatctatttgcagtgcaaacaactttaaaatatgcatattatttgacattttcatatcttttgagtatgagagaaagaaggtaaaagaagaaagtagagaatcttctgtctatatttaagtgatataatttcagttatattcatggcatctctagtatttatcacatagttttccatggaaaaatatcatttttaagtctggtctattgtttacttcaaactgtataatgtatagtaaactatttatggataagatgaattacaccgcagctttaatttttcaggtttacagctgtcacttttgacacagaaaatgaagagatttaaaatccatttcaggcatgtaactataatttcataaaattttatgccccacaatatataacatgtgataaaagatgtgaaatgcagaaaatattcatcatttactgcttcttcatgaccacaactttgggccctttaaacagggataaatattggaggaacagtattctttttcattgttgaaaagcttccaaaatagattacagtaaaatttaaaataaaaccagagaatatgtattattgagacaaagtcaggacacctgagttttgttcccagactctgaacctgtttgctgcaatatgctggacaaatactttaatatcccaaggtttagccccctcatcttgattgctaagaagaaaacgattattaataatgtcaaagaagataatatctataaaataattcacaggtctatagcaattattcaaatagaaaatattaatgtcattattaataaacaaataatcccatttcttttgatttacatttttctcttcaaacatacccaagtcagataatgacgcttctatctactaattttactccatgttatatttttctgtgttgctactggagcttgaacttgatgtcatcctttctaatcctggcagccatcaattctcagttcctaatgctttctggtagaactttttcctcatataaatgcggtaacacatttacatatgaaatccatttaatgtaatgtattttatctgaaaccatcagaaaacaaaacttgttttatttttaactgttttaaattttataggaacataatattttgatttgtgaaacattaaaaggctcctataatgagccatctagcccaaatagcagcaggtaattttatttggtgtaatggaaagaaccctgggcagaggattggataacccagtttctattctgatttctgtaattaactagctctatgatattggggaaatcacttagccttcctgattctcaatttcctcatttgtgaactgaagtaattgaaacaatgttctctaaggaacttcctagttccagcggcctgattttatgccgacagaagccatgca

SEQ ID NO: 701309 - DNA, 2500 bp, Homo sapiens
ttctttatctatgcctcattttgaaggaagaaaccttcccttgagaaggaaaagaacgaagaaagacagagcctagggtactgtgtatcatgaaatgaagggtagaacagtttctcaggagaccaactgtggttccctcattcaaatgacacacgagaagacactgtcatatgtttaagtttgcttttatgtaaggaactatttactgctattctgcttaaaatgctgacccttaaaatattttataaagatctaacatcaatgcaactttacccagccaattataaagaagtaggctgatttttctgatattttgtacagacatttttaaaaattttaatgtaaactttgatattgtaattattaataacacaaaaggattagttctcattttaagcagggaactatttgtgtcctctgtactacgtaaactcaacataagatgcaagagaaaactaacattatgctaatagataaaaccacacatgatctgtggtggaaggactggaattgcactatcactgaagtgcaaatgtatatatatatttaaaattttgaaagcttacactcttctcagatttagtttaaaaaagattctagtttcattctctcctttattgactgctgtttctgctacatgaccaaaagtagttttcattgttcatgtttggtttgttttgcttgtaggtaaagcttattataattaaatacatagagccaaggaagggaaaaattaacagttacataagagaataaggagaaagtaagaatgaaggtcaatatatactccaaacattgatgtttctgtctccttcacatacagatattggcctcgtgttgtagccttaaaccatctgatccagacaggtcaaagcaagaactttttaaaaaatctctcttcttttcagcaagttttcccgctaaggaaacacattctcatccctcaaatcacttgatgtcatacaataacttttagctcctaccccaaattggaaaacaatattgtgaggaataaaatcattgtagattttgcaggcaatcctaaataatcaggtgaattactttagatataatcatctcttagcttggaaatttgcagatcgatttcgtttatctatttgcagtgcaaacaactttaaaatatgcatattatttgacattttcatatcttttgastatgagagaaagaaggtaaaagaagaaagtagagaatcttctgtctatatttaagtgatataatttcagttatattcatggcatctctagtatttatcacatagttttccatggaaaaatatcatttttaagtctggtctattgtttacttcaaactgtataatgtatagtaaactatttatggataagatgaattacaccgcagctttaatttttcaggtttacagctgtcacttttgacacagaaaatgaagagatttaaaatccatttcaggcatgtaactataatttcataaaattttatgccccacaatatataacatgtgataaaagatgtgaaatgcagaaaatattcatcatttactgcttcttcatgaccacaactttgggccctttaaacagggataaatattggaggaacagtattctttttcattgttgaaaagcttccaaaatagattacagtaaaatttaaaataaaaccagagaatatgtattattgagacaaagtcaggacacctgagttttgttcccagactctgaacctgtttgctgcaatatgctggacaaatactttaatatcccaaggtttagccccctcatcttgattgctaagaagaaaacgattattaataatgtcaaagaagataatatctataaaataattcacaggtctatagcaattattcaaatagaaaatattaatgtcattattaataaacaaataatcccatttcttttgatttacatttttctcttcaaacatacccaagtcagataatgacgcttctatctactaattttactccatgttatatttttctgtgttgctactggagcttgaacttgatgtcatcctttctaatcctggcagccatcaattctcagttcctaatgctttctggtagaactttttcctcatataaatgcggtaacacatttacatatgaaatccatttaatgtaatgtattttatctgaaaccatcagaaaacaaaacttgttttatttttaactgttttaaattttataggaacataatattttgatttgtgaaacattaaaaggctcctataatgagccatctagcccaaatagcagcaggtaattttatttggtgtaatggaaagaaccctgggcagaggattggataacccagtttctattctgatttctgtaattaactagctctatgatattggggaaatcacttagccttcctgattctcaatttcctcatttgtgaactgaagtaattgaaacaatgttctctaaggaacttcctagttccagcggcctgattttatgccgacagaagccatgca

SEQ ID NO: 701310 - DNA, 2500 bp, Homo sapiens
ttctttatctatgcctcattttgaaggaagaaaccttcccttgagaaggaaaagaacgaagaaagacagagcctagggtactgtgtatcatgaaatgaagggtagaacagtttctcaggagaccaactgtggttccctcattcaaatgacacacgagaagacactgtcatatgtttaagtttgcttttatgtaaggaactatttactgctattctgcttaaaatgctgacccttaaaatattttataaagatctaacatcaatgcaactttacccagccaattataaagaagtaggctgatttttctgatattttgtacagacatttttaaaaattttaatgtaaactttgatattgtaattattaataacacaaaaggattagttctcattttaagcagggaactatttgtgtcctctgtactacgtaaactcaacataagatgcaagagaaaactaacattatgctaatagataaaaccacacatgatctgtggtggaaggactggaattgcactatcactgaagtgcaaatgtatatatatatttaaaattttgaaagcttacactcttctcagatttagtttaaaaaagattctagtttcattctctcctttattgactgctgtttctgctacatgaccaaaagtagttttcattgttcatgtttggtttgttttgcttgtaggtaaagcttattataattaaatacatagagccaaggaagggaaaaattaacagttacataagagaataaggagaaagtaagaatgaaggtcaatatatactccaaacattgatgtttctgtctccttcacatacagatattggcctcgtgttgtagccttaaaccatctgatccagacaggtcaaagcaagaactttttaaaaaatctctcttcttttcagcaagttttcccgctaaggaaacacattctcatccctcaaatcacttgatgtcatacaataacttttagctcctaccccaaattggaaaacaatattgtgaggaataaaatcattgtagattttgcaggcaatcctaaataatcaggtgaattactttagatataatcatctcttagcttggaaatttgcagatcgatttcgtttatctatttgcagtgcaaacaactttaaaatatgcatattatttgacattttcatatcttttgagtatgagagaaagaaggtaaaagwagaaagtagagaatcttctgtctatatttaagtgatataatttcagttatattcatggcatctctagtatttatcacatagttttccatggaaaaatatcatttttaagtctggtctattgtttacttcaaactgtataatgtatagtaaactatttatggataagatgaattacaccgcagctttaatttttcaggtttacagctgtcacttttgacacagaaaatgaagagatttaaaatccatttcaggcatgtaactataatttcataaaattttatgccccacaatatataacatgtgataaaagatgtgaaatgcagaaaatattcatcatttactgcttcttcatgaccacaactttgggccctttaaacagggataaatattggaggaacagtattctttttcattgttgaaaagcttccaaaatagattacagtaaaatttaaaataaaaccagagaatatgtattattgagacaaagtcaggacacctgagttttgttcccagactctgaacctgtttgctgcaatatgctggacaaatactttaatatcccaaggtttagccccctcatcttgattgctaagaagaaaacgattattaataatgtcaaagaagataatatctataaaataattcacaggtctatagcaattattcaaatagaaaatattaatgtcattattaataaacaaataatcccatttcttttgatttacatttttctcttcaaacatacccaagtcagataatgacgcttctatctactaattttactccatgttatatttttctgtgttgctactggagcttgaacttgatgtcatcctttctaatcctggcagccatcaattctcagttcctaatgctttctggtagaactttttcctcatataaatgcggtaacacatttacatatgaaatccatttaatgtaatgtattttatctgaaaccatcagaaaacaaaacttgttttatttttaactgttttaaattttataggaacataatattttgatttgtgaaacattaaaaggctcctataatgagccatctagcccaaatagcagcaggtaattttatttggtgtaatggaaagaaccctgggcagaggattggataacccagtttctattctgatttctgtaattaactagctctatgatattggggaaatcacttagccttcctgattctcaatttcctcatttgtgaactgaagtaattgaaacaatgttctctaaggaacttcctagttccagcggcctgattttatgccgacagaagccatgca

SEQ ID NO: 701311 - DNA, 667 bp, Homo sapiens
tttataaggcagtaaataaagcctgttttaaactaaaaatacagcagtacttgtgggctgttttttatgcaatcagcatcaaaacttggaatgaaacaaaaattatgttgagcacaaagtgtttccctcagaaaaggataggagagaggttagcttggagtagccaaataatggtaccacaaagtttcaagcagaagatttaaatgtgttctgtgaattacagtgatacctcctgtgtgtgcctatgattatgaattgggaaaggggagtggggagaaactgaaccctggccccgcatttttccacagacatttagcataatgaggtggctgctaagctttcattttcaaaaatcccctgttttaaaaaatgcttaggatggctgagttggagaatactggcatggagcacagtaaaactaatgaatctatacatttgtttaaaatttaattaacttccattatttgaatggcagaaaaagaggcctataccctgacgcatcagtaggaagtacacaccacgtttcatttgcctttgcatatcaatttacatgatgaaagctctgtcctctatattgagctcactacacactagatcaacagcccagaattccctccttcataagtttggattggctgacattttgtgtstggaattggttccttcc

SEQ ID NO: 701312 - DNA, 669 bp, Homo sapiens
tatgaatacttagattgtgtgctgttgacctttagaatgttaggagacaagccagaaattaaacccaaagtaacaccaagcactggaaaagcatcaaagttaaaaaagtaataaaaatacggttattaaagggaataaaattatataaatggaaactgatttaaaaagaaaaggagagtttatctctcagggttctacagttctccagagaaacagaaccagaaggrtgtgtgtgtgtgtgtgtgtgtgtgtgtgtgtgtgtgtgtgtgtttgtgtgtataatagatagatgggtaagtagatttattttgaggaattggcttatgtgattttgagtgctggcaagtctaaaatgtgtagggcaaagaggctggaaattcagggaggatttctgtgttagactcttgaggctcctcttctcagggaaatcagtttttgctcttaaggctttcaattcactggatgagacccaactctattatcaagggtcatcttttttacttaaagtcaactgattgtagatgttaatcacatcgacaaaatatgttcacagcaatatctatactagcatttgaccaagaagttgggcaccgtagcctagtcaaattgacgtgtaaaatttaactatctcagagaaccagaaaaaatataaacacaaactgttttatt

SEQ ID NO: 701313 - DNA, 629 bp, Homo sapiens
acaggaaatctaagctgctatttttactttcattattctctttgctgtttgccatattaatattgtgatttcgattatgatttttttattcagtcaatatgcagaggcctctatgtagagtattttgcttaattttcacaattaacaaatactgccaaatgctgcatatacataatttaaagaggagaacactaaatgttaaagtatatgaagaaatgtgtacaaggttacataataagcaagtaacagaatcaggattcaagttcaagcttctctggaaaaacttgtgcttatcttacagcagcaaactcagcctttttattcacttataaacagttttaaatgtcatatattttttggaattgtaaaagtcatatagagttattcaacttttttgttatgcatatattataaaattgtacattctaatatgtgtaaaactttatatattattttaaatgcctctctgatcactacagtagtttrtgaatcacataaacattgtggaaaagaatagaatcggaaatgaaaatctccctgactgccttcatccattttacatacttgcattaaaaatatatattcttccttaatctagctcctcttacaggcttcctgtcaatggctca

SEQ ID NO: 701314 - DNA, 582 bp, Homo sapiens
attacccccaggccaaggggacaaggaaaatgaacttgagtgtacttcataagtgacagccaagagggaaccaaagctcctagttcttctcttcccttcctgtctccatgtaaccttttcttcctgggccattcctggtcctggaggtaaggtcactgctgacagcacccatctggtgaccsaggaagccaagggtcagctggcttctctgacagtggtggatgccctattgtgctcctcctagaagagggttctcttaactcttgcttttctgctttgttttcccatgcttcatttgattttctttttacttacaaaagtaaccagttaatttatgtgtctatttgagaggttaatcatctccagtgccaccttcagatccatttttcagctccatgaaattcataagattctctttacatattccatttgtaaaccgaaactgaataataattcagatgcctgaaatacctcttagcccctgggagtgacctaatttctcaagatctcagttttatcatctgtaaaaatggaatcataagattctctttacgtattccatttgtaaaccgaaattgaata

SEQ ID NO: 701315 - DNA, 606 bp, Homo sapiens
gatgagcaaagaaagtggtttcttgagatagaatctgcttctggtgaagatgctgtgaacattgttgaaatgacaacaaaggatttagaacattacataaacttagttgataaaacagtggcagggtttgagagcattgactccaattttgaaagaagttctactgtgggtcaaacagcatagcatgctacagagaaatctttcctgcaaggaagagtcaatcaatgcagcagacttcattgtcttatttgccacagccaccactgccttcagcaactgccaccccgatcagcccatagccatcaacatcaagtcaataccctacaccagctaaggattactacttgctgaatgcgcagatgatcattagcatttttagcaataaaatatttttaaacaaggtatgtacrttttttagacataatgctattgcacacagaatacagtctagtgtaaacatagcttttatatgcgttgtgaagctaaaaaattcatgtgactcactttattgtagtgttcactttactgcagtggtctggaactgaacccacagtatatgtgaagtatgcctgcagttgcttaataaagaaatctttctttaaattt

SEQ ID NO: 701316 - DNA, 1118 bp, Homo sapiens
tgggaagaactaaatccatttctgttgtataagaacagaagtgaacacacccctccaaagagacttcctttttggggggcaggacattgtacatctggcctagatcattctggaagtgactaagaaaaagacacaggcctcaatttctcctttctaagccatgtgtttatgccaaagtctgactcttgttcatctagaagattttctttcatttctaccctaatgtgccggatttagattgaggcagtgaagcattagtccccattgctccatttatcctttttgagactgctaaagattccacaaaagaaccaatctcatttctgtagcaggttcctccctatgagaaaagaacaaaagaaagcaagccctttcttttcatttttgatggtctctttctatttctctaggaatattaacttgctgattccctccttcatctcgaaatcttttttttcctttaatttcagctgactctctgacatattagggtaagaagaaaacaaagtacctggatgcttgttacttagtagatatgttaatgaaacgtttataatgcagttaaatctcagctttttgtgcttaaaaagaaagaagaaacactctattggggcatcctctagcagtaaaaattctgctgagggtctattacttcctttcctttaaaactcccagcttcatagccaatattgccagacaaacaaaacagtccttttctttccttttygctgcagtcaattgtagaaaagaatctgtacttcagtggagataattttaaacgggaattcaaaaggctgtgttcttttataatttcaacacctcatttaacactttgcttaaactcaaatattcctgaggaatagtgaaaatatacatttgtgatttgggagaaaaagaaagttgctattgaaatttacacataaaacaaatggtgaactgggtccaaaatgagaataggatgatggttttatttttatccagaaggctgtcagatgtaattgaaacaatcttataaacattccttttgttaatgccttttattctcagtcttcacttttctcaattggtttctcatatttaaaaagtgaactacaatttctcaaaggaaaagaaaaaga

SEQ ID NO: 701317 - DNA, 611 bp, Homo sapiens
taaattgttcccttttctctctctctcttccctcccactttttatgtaggagaggggaatagagagaatatgatgcatttgcataaattttatgtactcaacatgactctattttatattagtaaatttaatgtagaagatttatctgatataatacagaaggcaaaactgtggtcaaagagtagacattaccaggtaaaatagggtttcatttaaagtaatatgtcttactgtcccacaaagcatttatataatggttacatgccatgtattattattttggattagataattaataaattccatcccaatattataacaatacttttgtggaacaagtagacaaaataaaacamaaaaataagaatgactttatgctattttagattgacattattatttcccttattgcttgtaattcaaatgggcgtataattagtaataaatttaggattcttagagtacataataatctatgatattccaaacattcagaatgaatgagttgctggattcaattccttatcattataaattatttcaaatgtaggacaggattacaataattttcaagtttcaaaaaatgccaaaggcagtaagcaattaagtaa

SEQ ID NO: 701318 - DNA, 579 bp, Homo sapiens
agctctgggtgcctttaggctacactaactaggtgagtttcagctagagtggagatggctctggggtccagtggaatcataattaggcaaatggtgcagggccttacatagacttccaaacagaggattctttttggtagggaagaggaaaccatgaaggtttaggaccacgtgccctctatgagaagcccccaagaaaccattttccccatgtttgtgtttgccccgggtttaggcttctgatgaagaagggtgtttttggaagttattggatgcatttcctctgcatctggaggagtatggaagagctgaagtgggagggaggaagaccatgtccctgggacgtcattgcccgtgcatgcagtgattccctttctcagtagcagaggctggggagtaggtgtggccatctgagcatctttattctttcagtctgggcttccttagatttggagttgaaggctggcggtcaggggcccctgtgtctggactgagagacagctcrctgtgcaatgaactcgcctagttctggagggcagagccagttcctcaggccattccggttgtcttgggttgttc

SEQ ID NO: 701319 - DNA, 1429 bp, Homo sapiens
agcctgtaatttcaaggactcttcagttcctaaatgacctttctgttggatatccttttcactgtatatctgacattatgtgtaaacaacctagcagatgcatttaattaaccaggtattctccttgtttataatttttgcaattttttaaaaaaataaaaagacctttcatttagccttatctgtaaatgcatgtttttgaaaggttttaattagctgtatactatgaagcatttagtcggaatcactgttgaatttatatggacatatagattcctaagtagttacagttatatttatactcacccaggctaataaatggttatataagaaagtccacatgtattttagttcatgcttttttgtaattgtcagaaattcgtgtcctaaaagaaagtatgtaacttaattttaaggaggtcraaatgttctaaaaatattaccttataaaaactgcattcctgtgagtaaatatatctctaatattcttcagttgaaaagaacatcattttcattagttgaaaggcacaatggagtaatacaaagaaaataagttttttgaccatttctttgattattgcccccaccaaatcaacatctaatctaatctaaaataagattccccattatacattaaatgtttagatttctctgtctagcagatttttaaaattctaaaaccaagaatcttcttactaaagtctagttgacagtattgtcatatttctaacaactagagagaatcatgtagattttcttttctacattagctatcaaatatataggacttgtgaaagataagtgttggattaatcactaagattagctgatcttttaatatgaggacaaattctgaaaatggtggcattgaatggaaacctttaatgtaggttcattccaggaatatgtttatgttagttaagtttaaaattgtattccttggtaaaccataaaagatttccaaagtattagacacccacttttgtgctggaatttaatatgcaactttttattggaaaataatcgtccttgtctggcaaaatccaccatgcaatatttctgttagtaggtataatgcaataaagccagggagggctatttatcactacaaattttgaggatttcaggattctttttattattttaatatatttctttgatattaaatcagaaaaatgataaattacacctgtctaggctgtttttcctttttactggaaagtgatgtacaacccaattccaatggtcatttggctttttaagatatgtattttttcttattaaaaaaaaaactcaacccatatttttttctaataataatgctgaaatactctttatttctaacatatgaagtggtttataagtacttcctagtattgcaaactctggccttttcacaatgaattactttgaaagcatattatctgca

SEQ ID NO: 701320 - DNA, 1429 bp, Homo sapiens
agcctgtaatttcaaggactcttcagttcctaaatgacctttctgttggatatccttttcactgtatatctgacattatgtgtaaacaacctagcagatgcatttaattaaccaggtattctccttgtttataatttttgcaattttttaaaaaaataaaaagacctttcatttagccttatctgtaaatgcatgtttttgaaaggttttaattagctgtatactatgaagcatttagtcggaatcactgttgaatttatatggacatatagattcctaagtagttacagttatatttatactcacccaggctaataaatggttatataagaaagtccacatgtattttagttcatgcttttttgtaattgtcagaaattcgtgtcctaaaagaaagtatgtaacttaattttaaggaggtcaaaatgttctaaaaatattaccttataaaaactgcattcctgtgagtaaatatatctctaatattcttcagttgaaaagaacatcattttcattagttgaaaggcacaatggagtaatacaaagaaaataagttttttgaccatttctttgattattgcccccaccaaatcaacatctaatctaatctaaaataagattccccattatacattaaatgtttagatttctctgtctagcagatttttaaaattctaaaaccaagaatcttcttactaaagtctagttgacagtattgtcatatttctaacaactagagagaatcatgtagattttcttttctacattagctatcaaatatataggacttgtgaaagataagtgttggattaatcactaagattagctgatcttttaatatgaggacaaattctgaaaatggtggcattgaatggaaacctttaatgtaggttcattccaggaatatgtttatgttagttaagtttaaaattgtattccttggtaaaccataaaagatttccaaagtattagacacccacttttgtgctggaatttaatatgcaactttttattggaaaataatcgtccttgtctggcaaaatccaccatgcaatatttctgttagtaggtataatgcaataaagmcagggagggctatttatcactacaaattttgaggatttcaggattctttttattattttaatatatttctttgatattaaatcagaaaaatgataaattacacctgtctaggctgtttttcctttttactggaaagtgatgtacaacccaattccaatggtcatttggctttttaagatatgtattttttcttattaaaaaaaaaactcaacccatatttttttctaataataatgctgaaatactctttatttctaacatatgaagtggtttataagtacttcctagtattgcaaactctggccttttcacaatgaattactttgaaagcatattatctgca

SEQ ID NO: 701321 - DNA, 1470 bp, Homo sapiens
cactttaggttttagaagcctcatttcatctgagaaactttagagattttaaaaatcatcatatttgtattaaatatttcttttaaaaataagtttccccccttacagtatggtttatttggaattgatttctttctttttctttctttctttcttttctttctctttctttctttctttctttctttctttctttctttctttctttctttctttctttcttttcttttcttttctttctcgctctgtttctttctttctttttttgagacggagtctcgctcttgttgcccagcctggagtgcaatggcatgatctcggctcactgcaacctccgcctcctgtgttcaagtgattctcgtgcctcagcctctcaattagctgggattataggcgcccaccaccatgcccagctaatttttgtatttttagtagagacagggtttcaccatattgcccgggctggtcttgaactccagacctcaggtgatccacctagagcggcctcccaaagtgctgggattacaggtgtgagccactgtgcctggcctggaattgattttgtattgccttttagatttcatggcttttttttttattgttttgaagtagtttatatttggcttttacagtattttataatctgtagctttactttctttgggaaggacaagtcaataattagtttttactttttatatgactatagctttttttttttttttttttggtttctaacatagatctatgatcgaattctgtcaatttcctctcaagagggtgagacgattgaattggataaacctgtcatggcagagggcaatgtggaagtttggcttaattctcttttggaagaatctcagtcctcattgcatcttgtgattcgccaggcagccgcaaatattcaagaaacaggtttccaactaactgaatttctttcatccttccctgctcaggtcagtgtattgaaatttgaaagtatgttttgtaaaatagtcattttaagtctcagacattacctattgtaagcttcaaaaatggctataatttaactctagaccagtattaagattttcataaggacccattaaatatacttaacctttcagattttaactacagattatatggtcatatatctatagacttaaatgtgtatttgggttatagatatatttgatgtattgtctttaatttaaaacggttttttccctaatcaatcttttgatgtaacaatgtacaaaaatcatgaaaatgtactgattgaacactttactaaaaaaagaaaaatagattcmgcattaaaatacaggaaacaatgagaaacgtgacttcaacataaatgactcaaaatgataagaaatagaatttccataggttatgaaaaaaggtatcaaagttgatgtaatcatggctttacacttgtgtaacaatcacagctgttgatcacattgtatttctatttaaata

SEQ ID NO: 701322 - DNA, 812 bp, Homo sapiens
atatatgctaaataatgacacagtgcaataaacatgagactataacatgaataacacttcctaacatatataatctttgttccatcttatcacttaggctttaatttcaaacttctttgaatctttattactttttatacccacaggttcaacctaattacattcctactaaaaagttcttttcctatgagtgttcagacacacacagactcttctggctctggccattgagcctttctggttagtctgaccctaacattttgtctcccaacattcttggtttcttctgcttattggagcccttactcactcattcttattgtattagtctgttctcatgctgctaataaagacatacctgagactggttaatttataaaggaaagaggtttaattgaatcacacttcagcatggctgggaaggcctcaggaaacttacaatcatggtggaaggggaagcaaacacgtccttttcacatggtggcaggaaggagaagtgttgagtgaagagggggaaaagccccttataaaacygtcagatctcatgagaactcactatcatgagagcaacatgagggtaactgcccctatgattaaattaccttccactgggatcctccagtgacatgtggggattatggaactacacttcgggatgagatttgggtgggaacacagctgaatcatatcattttgcccctggccccttcaagatctcatgtcctcacaattcataatacagtcgtgcccttccaacagtccctcaaagtcttaactcattccagcattaactcaaaagtctaagtccaaag

SEQ ID NO: 701323 - DNA, 1262 bp, Homo sapiens
tgatatggtttggctctgtgtcgccacccaaatctcatcttgaattgtaactcccacaattatcacgtgtcttggtaggaacctggtgggaggtgattgacttatggaggcgggtctttcctgtgctgttctggtgatagtgaataggtctcatgagatctgatggtttgataaggggaaatctgttttccttgggtcttatcctctctttgcctgctgccattcatgtaagacgtgacttgctcctccttgccttctgctatgattgtgaggcttccccagccacgtggaactgtaaggccaatcaaacctctttcttttgtaagttgcccagtctcaggtatgtctccatcagcagcatgaaaatggactaatacttagcataactgtcctcacaaaatccttccttagtctacacgctcttgacccttttgcattctgatgggggccagggagaagatgtctaatcagttctaggacaacagctttgaaatttctgcagatttttttttcctttgaaattctgttttctgatgtctatcatgcgttggtgccttggttgaaacttgttgcctaacatcttattactcatgagacccaggtgatattagccaggagcgggatgcaattttgaatgagggggagattgatcttctagttacctttaatgagggttcactgtccaagccacagtcaaggtctctagcctagcaccatgggaggaagatccctgagggaggattactccaagaggttccaatcccaggattttaggattcaacttctggtccactccccatcccaaagtccaccattagcgccatcctcccactgcagtgatcctgattgagctaccggtccatttggagatctaaacatttcttgggcaggtaagaacacaatgaaacagctcagagtgtattctatgtacttaaattatctactcaatgagccacatgcttggataatcaaagatgactgttcaagtactgataataataatgcttacagaggctagtattcttatgtgcttttctaaggactttacacagtgtgttgattttcacaacaatttcagatgctaagttctagtatcattcttttttttttttttttgagacggagttttgctcttgttgctcagcctagagtgcaatggtrtgatcttggctgaccacaacctccatctcctgggttcaagcgattctcctgcctcagcctcctgagtagctgggattacaggcatgtgccaccacgcctgg

SEQ ID NO: 701324 - DNA, 599 bp, Homo sapiens
cccatggtttcaatcatataaccgaatgtcataaggacatccaacatgacatctccccctccgtctccccaagctctttctctaagtccaggctctatagttccagctgttctataagaacccaaaccaaaactgaataaaacaaaagcctccccacaaaaccacaggctgtggaaataaggttctttggaacttaatggctagattgatagttattacaaggcaaaatctttgacataaatcacagactcttagaaatcaacatgtatttgaaatgactgaataaatcatcctatgggtaacaggaatagtgtcagattttgagtcaacaagataaaactttcaacagtatgctacttccaatggrgaaggaatggtcatgttttctgagtcagttcctaaaaactgtaaagagttttcatttgttttttgttttaaaacttaatgaagctttggatcctatagtcaatttacttaaaattactcattttggcctctagactatactgtaccaaagttcattgtgtgtgtctcctacagcagctcttgcattgttaagagtaagcccctttcactgttgtacaatgcgaaacacaatg

SEQ ID NO: 701325 - DNA, 608 bp, Homo sapiens
tttctacatawttatgtattttctgaaatttcttttattactgatctctaggtttataccattgcattcagaaaaagatatttgatattatttacatcttcttaaatttgttaaaacttgttttgtgaccttacatatgatctgtcatggatttttcatttagctgaatcttatttaataaccaaataaatggtcgtgagaaagttctaaaatatggtttaccctttcctgctttcttaaatggagttagcaagcataatggtaaattattcttttctgcatccaccccttgtcagtatccgccaccacactcaagttcctgtgtactctagccaaatggctgtcttaactctagaggatttaccaaatgctatgattttaatgtcccctctaaatctcatgttgaaatttaattgccattgttgcagtattaggcagtggagcctttaagaggtgattaggccatgagggctccccccgcccatgggtaggtttaattcctctaaaagggaggctttggggagtagattctcttttgccctcatgcactgtattggtctgttctaacactgctatgaagaaacaccccaaactggataaattataaa

SEQ ID NO: 701326 - DNA, 608 bp, Homo sapiens
tttctacataattatgtattttctgaaatttcttttattactgatctctaggtttataccattgcattcagaaaaagatatttgatattatttacatcttcttaaatttgttaaaacttgttttgtgaccttacatatgatctgtcatggatttttcatttagctgaatcttatttaataaccaaataaatggtcgtgagaaagttctaaaatatggtttaccctttcctgctttcttaaatggagttagcaagcataatggtaaattattcttttctgcatccaccccttgtcagtatccgccaccacactcaagttcctgtgtactctagccaaatggctgtcttaactctagaggatttaccaaatgctatgattttaatgtcccctctaaatctcatgttgaaatttaattgccattgttgcagtattaggcagtggagcctttaagaggtgattaggccatgagggctccccccgcccatgggtaggtttaattcctctaaaagggaggctttggggagtagattctcttttgccctcatgcactgtattggtctgttctaacaytgctatgaagaaacaccccaaactggataaattataaa

SEQ ID NO: 701327 - DNA, 600 bp, Homo sapiens
tgaagaaggcaaagactgaaacccagggttccagggagaggttaacattcattgagtttayggatacatcaagcgaggctccgcacttttatttgctttattgcttttttcctctccctagaccctgggcctaaacgcagacatgatggatgctcttgtcatattgtgtgctgataactgtcagccttcccctcccattctcactataatttcctttaggaggtttgacttgctactggctgagttcggagaaagccattcttgtcagacttaggagaaaagagagagaagaaatatggatttgtgagtccagtttaaatgaaaaggtagcactttccctggaaatattaaattggaggccatgattcaggctttcgggtttcactctagttattcagctttcacttaaaaaacaggacttggaagaaaaatataatctcaatatttatcaaaaacattcagggaaaatcatcccagtgctcccttgagaattaataagaaataacaattaataacatattttatttcacagatgccaagtatttcgggtgcccaagatcttaggaattgttcattgtatgcatggccctttgaggagga

SEQ ID NO: 701328 - DNA, 381 bp, Homo sapiens
caaagaagccacatgaaatttttactagtgtgtgttttccttgtgttctaccaccccaggagcagcttctgctactgaagatcacagtagagttatttccaaaagttgtgggtctgcagggtggacttatcacatagctgtttgccaaaattcaaaagtccagaaaccatttccaaattttcacctcttttatcttcaaatcctaaaactatgaaaattcacaaacttagctccatacattatggtagaaaggttaataatttggactttgagkttgaccaggcctgatttttgaataaattcacaaacttacctccatacattatggtagaaaggtcaataatctggactttgaggtcgaccaggcctgatttttggatc

SEQ ID NO: 701329 - DNA, 628 bp, Homo sapiens
cttcttaatcacatatttagaattatttttccctaaaaacatttcattaaagttgtttatgttcagggatttaacataaatgtagagattgttgcttttgctgtgtaactctttttacaaattattttaaacaaagttaaaataaggtataattcatcattgatcttttggtgacctcatttttttgcatgtctctgctcacagatatttttactaaccccttccatttctttgaatcctggagttagaaaacagccctgaagatcaaagaattgtagatcattgaattttcaactataaatgaatttagatatagtgggtttctagaacctaagccaattctttattcatctgtggtaactaagctattttctctttaaatgcttttacaaaagtccctttaaaagtatacctgaattatatctcctaatttcctctacttcacagggtttttcagtcctcttaaaaatgctttcctgttagtaagtaataatttcttcttatatattgcatactggctcttctctattatctgatgcttcctttaaaaaaacagatcctttgcatttawatacatttcctctaattgctatgaattgaagtgaaacatcctagttatctctagata

SEQ ID NO: 701330 - DNA, 628 bp, Homo sapiens
cttcttaatcacatatttagaattatttttccctaaaaacatttcattaaagttgtttatgttcagggatttaacataaatgtagagattgttgcttttgctgtgtaactctttttacaaattattttaaacaaagttaaaataaggtataattcatcattgatcttttggtgacctcatttttttgcatgtctctgctcacagatatttttactaaccccttccatttctttgaatcctggagttagaaaacagccctgaagatcaaagaattgtagatcattgaattttcaactataaatgaatttagatatagtgggtttctagaacctaagccaattctttattcatctgtggtaactaagctattttctctttaaatgcttttacaaaagtccctttaaaagtatacctgaattatatctcctaatttcctctacttcacagggtttttcagtcctcttaaaaatgctttcctgttagtaagtaataatttcttcttatatattgcatactggctcttctctattatctgatgcttcctttaaaaaaacagatcctttgcatttaartacatttcctctaattgctatgaattgaagtgaaacatcctagttatctctagata

SEQ ID NO: 701331 - DNA, 628 bp, Homo sapiens
cttcttaatcacatatttagaattatttttccctaaaaacatttcattaaagttgtttatgttcagggatttaacataaatgtagagattgttgcttttgctgtgtaactctttttacaaattattttaaacaaagttaaaataaggtataattcatcattgatcttttggtgacctcatttttttgcatgtctctgctcacagatatttttactaaccccttccatttctttgaatcctggagttagaaaacagccctgaagatcaaagaattgtagatcattgaattttcaactataaatgaatttagatatagtgggtttctagaacctaagccaattctttattcatctgtggtaactaagctattttctctttaaatgcttttacaaaagtccctttaaaagtatacctgaattatatctcctaatttcctctacttcacagggtttttcagtcctcttaaaaatgctttcctgttagtaagtaataatttcttcttatatattgcatactggctcttctctattatctgatgcttcctttaaaaaaacagatcctttgcatttaaayacatttcctctaattgctatgaattgaagtgaaacatcctagttatctctagata

SEQ ID NO: 701332 - DNA, 628 bp, Homo sapiens
cttcttaatcacatatttagaattatttttccctaaaaacatttcattaaagttgtttatgttcagggatttaacataaatgtagagattgttgcttttgctgtgtaactctttttacaaattattttaaacaaagttaaaataaggtataattcatcattgatcttttggtgacctcatttttttgcatgtctctgctcacagatatttttactaaccccttccatttctttgaatcctggagttagaaaacagccctgaagatcaaagaattgtagatcattgaattttcaactataaatgaatttagatatagtgggtttctagaacctaagccaattctttattcatctgtggtaactaagctattttctctttaaatgcttttacaaaagtccctttaaaagtatacctgaattatatctcctaatttcctctacttcacagggtttttcagtcctcttaaaaatgctttcctgttagtaagtaataatttcttcttatatattgcatactggctcttctctattatctgatgcttcctttaaaaaaacagatcctttgcatttaaatayatttcctctaattgctatgaattgaagtgaaacatcctagttatctctagata

SEQ ID NO: 701333 - DNA, 628 bp, Homo sapiens
cttcttaatcacatatttagaattatttttccctaaaaacatttcattaaagttgtttatgttcagggatttaacataaatgtagagattgttgcttttgctgtgtaactctttttacaaattattttaaacaaagttaaaataaggtataattcatcattgatcttttggtgacctcatttttttgcatgtctctgctcacagatatttttactaaccccttccatttctttgaatcctggagttagaaaacagccctgaagatcaaagaattgtagatcattgaattttcaactataaatgaatttagatatagtgggtttctagaacctaagccaattctttattcatctgtggtaactaagctattttctctttaaatgcttttacaaaagtccctttaaaagtatacctgaattatatctcctaatttcctctacttcacagggtttttcagtcctcttaaaaatgctttcctgttagtaagtaataatttcttcttatatattgcatactggctcttctctattatctgatgcttcctttaaaaaaacagatcctttgcatttaaatacwtttcctctaattgctatgaattgaagtgaaacatcctagttatctctagata

SEQ ID NO: 701334 - DNA, 1521 bp, Homo sapiens
ggtcagtgaaacagcaattctccaagtcattctagttcccacctttgatttctccatctcttgactcctgtcaccaaaccctgtcaattctaccatcaaagtatgtctagaggctaggcctaacttcttgcacacctggattttggaaatgtctggtaccccactgaacccagacccatctcctattcatcctgctttttagcccagagtccatatcactgccctggtgtaagatcctcctatgacttttcctgatctactccagggtaggctaaaaatgcatactgtgagtttagccacagtcttgctttcaggtctcatctctaaatctttgccttccagattcctgtttcataacctgttctcccagtgtttggaacctccaaactgcawgtatcccgtttacctacaatatcctttctttattttgcacacattcttctgcttattagagattaatgtgaattttaattttcatgaaattttctatattcactgcattctgttctgaacttgctaatagtcatgattttatttgtttgcaatctaatcctataacatgcattattttaaataatttaaaattatttcatgtaggagtatgttacactgaaactataaaaccattgaggattactggttttggagtcagatatgtgttcagtgacattgaatagctctgtaacttgtgttaagtttcttgaccactctgaatctcccatgtccacgtctgtaaaatggagataactaaatgaggcatttaaagattgaaggagattacaaatcttttagcacagtgcctggcacattgtacttagttaatcttagctgtcttccctctgtcaccactaagacttgcacagcaattttaagtaattaaatacgggtatcaggcagggtccaggcaatgaaaagatggcgtacatgtcttagataatttgagaagaacttaatagagggtttgttgtaaaaaggatgagcaggaattgggaaaatttaagggatgttgcagtaccaggagctagaagtgacagggagccattaccacctctaggcctaaaggggtgagagagggaacagttatagaacccggagacgcgaagacgtgagacaggacctgtgaccttaggtaaaaggacacagccagtcatatctgcagggaggtaccaggaggtatctcaaccttattttctgaactcttgttgtgctccccattagcagaagccagcttagacaccagagggaaagggagcccatggatgttgtccatgcaggccagactccggggcccagcatggggtggagagtagttccagatgggcaaatgaagtacacctaacatggtttataaggaacacatgccaggctgccccttactcttagcattttgcaagccaaagtcagtgttcaggtgttcatggcctacatcactggggcctgaacagttcaggaatttgaacagattctaagctgcttttcatgaaaagccatggcccccagccattgcccactgttgtgtga

SEQ ID NO: 701335 - DNA, 838 bp, Homo sapiens
tgttcagtaaccctgttgggttggggatgtgtttcagaaatgcctcctggtgggagtaggtaaggatgcagttgataatccagaagctaggtgatgcacacaccagtgatttgaaaattgccaaagcatctcagacctttaaatcactctctttgcctataggcccagactggagtcctgggagctagagagaataatgtctacaggaaaacaaaacacatttaaaagtcgcttattgaaaccaagggaaaaggagaaattgaaatgtgtttcaatgccaagtggaaattaattgttccaagaactcatcattacaagttgcagaagtatttcaagttactgatttttgtttaatatgttgtcttgttttattttattaaatgtaaaatacttataagggtattcagagtgattttgagtgattctttagtctgagcactccaattctgttttaactgttgattctcaatttcttcaacatccaagtctttcatcacaatggtttgcaggagtgcaccttttgaagctgtgtgaattcaacatttagcaagaacactcaagtctaaacaacccgatgaggttagaaattatcgttcctattagttaaatgagggaactgccaccaccgagagcctcagtgtgcttgcctaaggtcttatggctggtaatccatatcttaacctttccagatcagaccttgttcatcaaaaacttcttctgcttggaaayataaaacaataagtgtgtgaggtggggcaaaatggtggtgataatttgtacatctgaatgtttggtggaaaagattggctttcaaggagaagagttcattcttgccacc

SEQ ID NO: 701336 - DNA, 527 bp, Homo sapiens
gagctaccaaatttatggtatttttgttatagcagcctaaatagactaagacacttacctttaaaatagaatagtaattctgactgtgaagggttattgtaacaagttaatgataaatgattgtaaagccctaaatatgatgcctctagcctatagtgggcacscaataaatggtgactattaatgggaatatgattatttaatttttaaggttgtacaagtcttactatactataaaatacatacatactgtaagtactataaaaatacatacactaaaattttttagtgtacagttttgagtttggacaaatgtatatcgtcatgtaaccaccaccacaatcaagatagagaacagtctaccacctcccaaaaattccctcatgctgtcccagtccctagcaaccactgatctgttctcagtccctttagtttcgccattccagaatatcatatcagttgaataataagcttgtgtgtgtatacccttttgattctggcttcctttatttagtattgtatatttg

SEQ ID NO: 701337 - DNA, 527 bp, Homo sapiens
gagctaccaaatttatggtatttttgttatagcagcctaaatagactaagacacttacctttaaaatagaatagtaattctgactgtgaagggttattgtaacaagttaatgataaatgattgtaaagccctaaatatgatgcctctagcctatagtgggcacgcaataaatggtgactattaatgggaatatgattatttaatttttaaggttgtacaagtcttactatactataaaatacatacatactgtaagtactataaaaatacatacactaaaattttttagtgtacagttttgagtttggacaaatgyatatcgtcatgtaaccaccaccacaatcaagatagagaacagtctaccacctcccaaaaattccctcatgctgtcccagtccctagcaaccactgatctgttctcagtccctttagtttcgccattccagaatatcatatcagttgaataataagcttgtgtgtgtatacccttttgattctggcttcctttatttagtattgtatatttg

SEQ ID NO: 701338 - DNA, 1736 bp, Homo sapiens
tgatacattaaatctgactaatattgttttcatgaatgtggagtaattgctagggggattacaaatcattatagatactgtgtgttaggcccatctttcattgctataaatacttgagactgggtaatttataaagaaaagaggtttaattggcttgcaggtctgcaggctttgcaggaagcatgatgctggcatctgctcagcttctgggaaggtctcatgaaggctaagggggagcaggagcaagagagagggagatgccacacacttttaaacagccagagaacagaactcactgtcatgaggacagcactcatcaccaaggggatggtrcactcatcaccaaggggatggtgctaaaccattcatgagaaatccaccccagtgatctagtcacctccaccatccaatcacctccactgggccccacctccaatatagggattacaattccacgtgagatttaggcagggatgaatatacaaactatcacacagccactatcgataggaagcatcatggcaccgaagagaaaagttttatatatgtggactcaattattctgtatttcttctcttattatgtatcttagagaaattattgcacatttgtaccagtacacatatgtaagaatgtccatagcatcattgttcctaatagcagaaacataaaaacaactcaaatgtctgatagtagaatagataaaatgtatatttgtgcaatgaaatactatattgtagtgaaaatgagttatatacattttatatatacaacataaatgaattgcaaaaaatagtattgagcaaaaaaaaaaaacacacaggtcttaaaatagtgttaatccatgcatatgcaatttaaagagaagtaaactgtttagatttctgtgtgtgtgtgttacatttaaaggtgataaaactataaagaaaagccaaaatatgattatctcaaatatctgggtagttacttttagtacttttttttttttttttttgagacagaattttgctcttattgtccaggctggagtgcaatggcgcgatcttggctcactgcaacctctgcctcccgggttcaagcaattctgcatcagcctcctgagtagctgggattacaggcacgcaccaccatgcccagctaattttttgtgtttttagtagagagggggtttcaccatgttggccaggctggtctcaaactcctgatctctggtgatccacccacctcagcctcccaaagtgctgggattgcaggcgtgagccactgcacctggcagttgttatctttgggaggggaatgtatggggtttcaaaagtgttttttaacctagctggtggtagttacacaggcatttgctctattattatttttctttaatgtggaagtatatgtgatataattcacagtaaagtaaatggtgaatcagagagagtcaaagggcaatgagttagtgaagatggaatacaggagttttctcaggtggatcagagaaatgggatggtattggaaggccacatggaaagattgttgcattttctagggaaagatatttctagtcctgattagtcttattaacgtctatgcatgatccctattaacaactgagacttgagcatctcattgttctccccctagtggcatcattctcccagtcatccaggcttgaaaccttcttgttatgcctgtatgttgtcaccatatcatgattttttcctttgaaaaatttttcatgtatc

SEQ ID NO: 701339 - DNA, 581 bp, Homo sapiens
ccttctatataaattctataattataaacagttatgaaataaaaataatgttaaacatttacatttttgtaagattttgtttctgtaatttttcaggggcagaagagtgtagaagaaatagagaacctttaatatgtcccctttgtagatctaagtggagatctcatgatttctacaggtaataattttgaaatgatacrgatatgtttaatttttaaaaatttctcagtgtggtttgtcttaatttttttaaagcaagttttgttatttttcattttagccacgagttgtcaagtcctgtggattccccttcttccctcagagctgcacagcagcaaaccgtacagcagcagcctttggctggatcacgaaggaatcaagagagcaattttaaccttactcattatggaactcagcaaatccctcctgcttacaaagatttagctgagccatggattcaggtaagtagttctttgtttttcatttctcaaagaaatatttatagatcaattaatgtatttgtctccttccctcagttgttcataatttaaaaaaacacttttacttgcctccatcatgac

SEQ ID NO: 701340 - DNA, 630 bp, Homo sapiens
tccatctgtgaatgctttattgcttctcttgcttttgagggcattatacgcaagtcaagttcagccctccttattcctcacagccatagtccacctggcagtttgtgaaaaaatgataacaatgaacccaggagaaaggaagacttctgcagcatctgcccaaactggatatactctagttcaacataaaaaatggctaagttcagggttgaaggtctagactgggtcttgaccacgtgctgggagaattagcaaagtgataggagctttttgttgagtaatcaagcactttgtcaaaacagaagtgctttatgaaaagcaagctatgttttttctcccctccagctatgcttttttaagaagggctgtcaaatggcattttgggcagaaacagttaattttcctttaagtaacatacaaaaggaagagtctcactgcccccagcatgggggcaatttaataaaatcacaagcagcaaagccacraacaactaggatctatgatctataatcaattgttgttgatttaacaacttgtgcattttctttgagtttgggtttagcctggaggcatggcttagttttattaatgattttcaagcatgagctggattgcaattttgtagagttt

SEQ ID NO: 701341 - DNA, 613 bp, Homo sapiens
gctaatttttgtatttttagtagagtcggggtttcaacacgttggccaggctggtcttgaactcctgacctcaagtgatccacctgccttgacctcccaaagtgttggggttacaggcatgagccactgtgcccggcctatttaatgacttctgaaaagagtaagaactgattcccttcaggattgggagtaatttattatacttagttcaagtcatgactaataatcctaacggctttggatggcctaaataattctcttctttggaaaggacccattcagaccatctacattattgctgcaaatgaaataaaacattactaagtaaaatatttgggaaaaaatgcacacyattcccatgcatcttgataataaactctttcatttatactctctaataccctaaatttatcctaagcttacacaatataccttttaaaaaatattatttaatgtaactttgcaactggatatattttctatcatatgccttttctgataaagatgcttgaagatctattcaggaaataaaggttgttctgattcacaaagaaaataattacctggatgactgtctggccacttggcaaatccccctacaaggcgatcttga

SEQ ID NO: 701342 - DNA, 2352 bp, Homo sapiens
tatttttctagagtaacctctcacagatgaatgaaggtccttcttcctaatggccagtgctcatcctccaagatttctttatagctgacattgtggaacaacctgttcttaaaactctctcctcacttagtttccaccatccagtgagtccgtttccgtcctggcttctccagcttctccagcttctccagctcagacctttgccctgtttgctcttggcctgcttccccactaagttctctccactgccctcttctcttcgaactcctgtgctatcctatggtgatctcaaatctgcatttctcaactcctttcttaataccaaatatgcattttcaactctttgttggtgaacctccacctgaaaagccatggtgccttatacataattagtgcttatacttactaagcattaattatgcaaaaggccccatggcagatacaaatttgaaaagataaatctttgtgagctgcagagggaatgattgtgtgagagggatgatggttaaccagagagtgaagtcccatagaccagagttcattgttagagccttgaaagggcaagttctaaagtatgaataaaagaaaattggagaaaattgtgcccctaaatttggattagctctaaattagttctggatacaaccctggaaggtactcagatggcctgaaggcacataccaaatgcttcatcaaaagaaaactgagatatacagcagggggtagcaaactatactacagcccataggccaagcccgacctgctgaatgtttttgtaaataaatcttattggaacatagccacattcatccatttacatcttgcctatggctgcttttggactataggagcaaagcagttatgactgatgccacatggctcacaaactgtcaaatatttactctctggccctttaagaaaatctttgccagcccctgctgtactgtatggcaaccccaacttgccttatcttcaatatcacctggagtgttcattaagagaatgcatttctaacccccagctcagatctaagaatttgaaggtgctacaggtgatccttaggatcaagtctgggaaaccgtaacagagtttttaaatgcttaatccttagaatcttacagctttggatttatatcttggctccaccatttctaattacgttaccttgggcaaggtacttaacctctgtgagcttccattttcttattataaaataggaaaacaaatatatcttcttcatagagctgttgtgaggattaaatgagaaaagcttcatcaaaagtgtggtacctggtatcaggatagggttttatcatccacatcaccattattattttcttctcttcttcaccacttaatattatcactcatatgatcacctgcttaaaacgtttttggtgtaattatgtttgaaaatggtggcttagtttaccttcagttcatgaattctgagttctaccttctcctccttttagtttaaaaatattcagcaaataaatctttaaatgatttatagcatcttttatttaagaagtacaaagtactgtacaaacaactgagtggatgggggagatggagagggtaaattgacctaccccaaaccacacagcaaatccaggaacagattatgcaatgcctgactcccaacccaatacctgaactcaaataccaacacacctttccggaccagtctcattatcatttatttaacatcctcttgcagatgggatccaacaaatctatcagccaaaaaccttttacagtcccacaaatgctcacaagccttccccaccttaaccagtgtcaaaatgctgcagaggtgaaggaagggagcaccacctacctgggaaccccaggcttactttgattgtgtccctccctttctcagaatacttcggtgggccccagttgctttccaatcagatttaaatttctcattgtgagctttaaattccacccatctcttgtatctaattgccctcatctctcacttcattcatttctaccttgtcttgtggtattcacccccctgcccagaaaacctaccacggcccagctgaacaaatcccaggcattcctgcggaatctcaaagtccattaaaagaagaaaaatgccctgaacaagagggataatggccttaaccatactctcttctggtccgaccacgcttgggaaattatgtcccattccaggaaggacattctaagaggggtttggaaaacaggtggccattcagaraagaggctccagtttggtgaggggataaatagttctgtgaacttgcaacatgatagcatctttcagatatttgaatgactccagttgacctaatatcaacacaatgcactgat

SEQ ID NO: 701343 - DNA, 596 bp, Homo sapiens
catgttttggcttgggagcctgaatgtaaacttaccacagcgacctaagctcacctcaggaacattgttagctgacaaccaccttgggagtgaaaaacaaaatcccattccagctccctttgactgatctaaactccttttgctgtcatttaacactgcagatttgatttaatttgatgagacttctaaaacaatttagaaacttaagcatttaataccaaccctgatcatttctctttcacacatgttcaaaggcttcttggtttataaataaaaactaggatcagatgtaagggccatgayggtattgtttttctactttttagtctttaagtaaaagttatcttccaaaggcagaaccaggaggaatgagtggaaattgcagaaaaacaagttacaactgaacataagaaagcactctctaaccatcagagctgttgccaatggaaggaaacttccctgacctgggaggggttcaggcagagacttggaaccacataaggcttgggttgtataatctctgaagttcatcactatacattatatggctcaaaaattcggaaaggattttgctttctggctacaataacatgaca

SEQ ID NO: 701344 - DNA, 596 bp, Homo sapiens
catgttttggcttgggagcctgaatgtaaacttaccacagcgacctaagctcacctcaggaacattgttagctgacaaccaccttgggagtgaaaaacaaaatcccattccagctccctttgactgatctaaactccttttgctgtcatttaacactgcagatttgatttaatttgatgagacttctaaaacaatttagaaacttaagcatttaataccaaccctgatcatttctctttcacacatgttcaaaggcttcttggtttataaataaaaactaggatcagatgtaagggccatgatggtattgtttttctactttttagtctttaagtaaaagttatcttccaaaggcagaaccaggaggaatgagtggaaattgcagaaaaacaagttacaactgaacataagaaagcactctctaaccatcagagctgttgccaatggaaggaaacttccctgacctgggaggggttcaggcagagacttggaaccacataaggcttgggttgtataatctctgmagttcatcactatacattatatggctcaaaaattcggaaaggattttgctttctggctacaataacatgaca

SEQ ID NO: 701345 - DNA, 595 bp, Homo sapiens
  misc_feature 408, 409, 421: n = A,T,C or G
attcctgaactgaacttctacagaatttgatacttaattaagcaaaaatcagagagtgatgaactacatgcaagataaatatgcctatcagagattctggggcacattcgagtgtgctccatgtgcagtgaaagaaatatggtggcccactttggtttaatacaagtgggaaggctggaagaaaatcatgcccttataattgtcaggggtaagtggctagactgggtcttgtccaacagctgaaaattagagctgggaggtcagaggagctaactgtgaatyttcacagtacctattatggtcctggagaacaaacaccaagaattgtgtcagaggaaagagatcacaatgatagagataggaaaacttgaggacagatctttttttttttttttttttttttttttnngggggtgttgtngggttttttttttttttttgagacggagtctcgctgtcgcccaggctggagtgcagtggcgcaatctcggctcactgcaggctccgccccctggggttcacgccattctcctgcctcagcctccggagtagctgggactacaggcgcccgccacctcgcctggctaattttttg

SEQ ID NO: 701346 - DNA, 2025 bp, Homo sapiens
tgccactgctgctgcccatagcttaggtttgggatgatagaccctctaccccagctactcagaacagccaagcacctgggccattctacttgctgaaagtctgatctccctgagtgttgccaccaccctggggtgctcatttccaactcccaagtctgcaggtgtctctgcctggtgggacccaggtcacatgtgaaaccttctctgcaagggagtctgggaaatgcagactgaggcttcccatcctctagattcccgggaagacactgggtaggttgtgagggtaccagtctgtggggcmtgacatagcagcatcctggaggacccctcagaatctgtgggcagtgtggggctgggccttaggggcagagctgggcactgggcactgtggggaggtgaggacgtcatctctacctccttgtttcctctgcctctctctgcctggctgctgccttggagtaacacagcttccgggagcactagagttttacatgttagaatccaggtcccacaggggtctaagtcccagttccaacctccttgggagagtgatgggttggaactgggacttatcaaatagccatccgtatgataaccattggaaacagaagaaaccaacgttccaaacaggagagtagcagagggtagaagtgaggtgtggagaccgggcgtggtggctcatgcctgtaatcccagcactttgggaggtcgaggcaggagaatcgcttgaaccagggagttggaggttgcagtgaactgagatcacaccacagcactccagcctggtgacagagtgaaactctgtctcaaaaaaaaaaaaaaaaaaaaaaaaaaaagtggggtgtggagtctctgggcaaaccaaataataccaagaagccaagaattcttttgaagcaactttacccctcagctgctattggctgagtctaggtctgtctccttcctgcatggcagcatgattttcttagaatgttacacaatccctgtccttctgggctgtggtcatcaggagtaaagggtggtgacagtgaattgtcagggctgggcaagcttggcctgggtgagtatccagccaagtggccctgggcaagcccctcactcctgtcttccctatttgtaaaatgggcttgcaatggtgcttctagagatcatggaacctatacataagatacagggatccttctccacagcatcctacaggagcaaaggcaccagcgtgctccttcagatcctccagaaccttgtctggacactggtgtcctctagagaacctcctttccagcgtcccataccctcagcactacggtcagacagaactgatcctggcctccagatgccgtttttgtagccactggtagtgctccccttggccactcagcattccactgggacaccaagcctctttttttgttccaggcctaataattatagaatctttctatgcaagttttataaccctgagtttttaataaaatatcccagattatctatatacaacaacccattggaaaaacagcaatgattgactctaatcccgcaaccagtttatatctcaaaaggaaaggctggctgggcgcggtggctcacgtctgtaatcccagcactttgggaggccgaggcgggtggatcacctgaggtcaggagtttgagatcagcctggccaacgcggtgaaaccctatctctgctaaaaatacaaaaattagctgggcgtggtggtgtgcacctgtaatcccagctactcaggaggctgaggcaggagaatctcttgagcccgggaggcggaggttgcagtgagccgagatcgtgccattgcactccagccttggcaacaagagcgaaattccgtctcaagaaaaaaaaaaaaaaaaagaggaaaggctaagaaaataacacttagagattccaagtgaccttgcgtctccagattcaaccccagtacttgaaagcttgaaattcacagaacgtaaaattaaccattttaatgtgaacaattagtagcatttggtaactgcacgatatgg

SEQ ID NO: 701347 - DNA, 1547 bp, Homo sapiens
tttattttgttgtactttcaaagaaaataaccttctttgcttgtacaattctgggttgatagttatttagttttaatattttaaaaatattgtttaaaaatatatattaacttagtagtatagcaagaggacgcttctgaggttaatgcaaactttgaacactcatctttttttttttttttttttttttgagatgagtcttgctctgttgcccaggctggagtgcagtgggacaatcttggctcactgaaacctccgcctcctgggttcaagcaattcttctgcctcagcctcctgagtaactgggactataggcatgcaccaccatgcctggctaaactttgtatttttagtggagacagggtttcaccatgttggccaggctggtctcgaactccttacctccgcccacctcagcctcccaaagtgctgagattacaggcgtgagccaccgatcctgacctagaacactcatcttctaatttaaaaacagagacatccatttttgtgttaacctttgttgcatctcatttccagagtaagtagacatgaaataaaatttatgaagggaaaatacagaacaattttgatgcttacagtgaggtaaatattagaacattactgctccaatgattcagtgaggatctcgaaatgaattctgaagtcttccaatgtttgcatttattggaggggctcccgagttctatcaacttgttttttcaagtcttgttctcatcttgtgcataaatgttaacgcttcccaaagtaaaaacttagctttcttacttttactttgtattaaatttaatacaaaatatgacctgagtagttaaaaaatattttacattatttgcagtaagatgtcattagccctttcaaagagcaaattttaaaacttcaatctgggtgaaagattggctagttttatagaaagatttgccgtcttaaactcaagctgatttttctatttttatgtaaataactgagatgccatcttattaattcttccaaggtcatgtttgtaaaataaacattacatgagagctttcctgtcatctacactgtatgttgtttagagtgttgaacaaatttgagttcctaagttgtaatctgtcctcatgtggtctatgctatttgcacgtgtgccactacacgctgagatgataacgctgtacaattttaaatggtagcagtttctgtaggctgtaggctgaaatattttgatgaactgcttagtttgggggttttattttttaagttatataatttattttcttgcaaagtaaaaacaaaaaatattgttacacatgctgctggcttttatggtttctgatgagaaatatgcagtaattgcagtcacttttcctttatgtgtcacacgattgtgatgtgtctgtctgtggacttattcaagtctatgttgtggcggtttgaacttcctgaatctgtaagttattgrtttgcaaacgttgtattgtttttccatatttctttggtactatacctccgctccttctgggacgcaggtgacctgaatattagacctt

SEQ ID NO: 701348 - DNA, 604 bp, Homo sapiens
tttttatggttccatggtgctttattgtatggatgtaactttrtttttccagtcccctactggtgaacgtttgcttcaaatcttttgctcttccaaacaatgctgattttgtgcatatataattatgagcaccttagtgagtgtgcccgtggcataaacttgcggaagtagaattgttaggccaaaaggcatgtgcaacctgatgtaattgtatcaagaatgtatctgaatgcctgtcacctctcactcttgtcaatacagtgtgttaccaacctttttgacctttgccgatcagataggtgataatgttctctcttttcacttgtgttattatgagtgtggttgagccatttgtatttcgttttttgtagattgtttctatcttttgccgtttattaaaatttaatgtttaccttatcaaagttatacatgcactcagtttgaagagtcaacttgttctgcaaagcttgttaaggaaaacagaaattcctttccccataccataattttttcccactccctacaggtaaccactctcaaattttttatataattatctttgtactttagtttatatctcaaattaatatatagtagaataaat

SEQ ID NO: 701349 - DNA, 604 bp, Homo sapiens
tttttatggttccatggtgctttattgtatggatgtaactttatttttccagtcccctactggtgaacgtttgcttcaaatcttttgctcttccaaacaatgctgattttgtgcatatataattatgagcaccttagtgagtgtgcccgtggcataaacttgcggaagtagaattgttaggccaaaaggcatgtgcaacctgaygtaattgtatcaagaatgtatctgaatgcctgtcacctctcactcttgtcaatacagtgtgttaccaacctttttgacctttgccgatcagataggtgataatgttctctcttttcacttgtgttattatgagtgtggttgagccatttgtatttcgttttttgtagattgtttctatcttttgccgtttattaaaatttaatgtttaccttatcaaagttatacatgcactcagtttgaagagtcaacttgttctgcaaagcttgttaaggaaaacagaaattcctttccccataccataattttttcccactccctacaggtaaccactctcaaattttttatataattatctttgtactttagtttatatctcaaattaatatatagtagaataaat

SEQ ID NO: 701350 - DNA, 2919 bp, Homo sapiens
tcaggaactggcagccagctgtgagaagacaaacccaggagatgtttgcaaggggaacacctctcatgtgcagtgaaatccaagtcttaagatcagccagggagctgaaatgcctgatactccatcctgcaggaagaatgggatgaggactggcacccatcatccacctgagaggctttagaggctccctcctatcatgagtcaaatggcactttcaacccagtcaaataagttcggggcaaagactttctcctttagaatgagaaatgggccaggacccacaagtttaaggagcttccacttaggccaactttgcaggttcaggtcacactggtccctggctgcattcacaccttgcctttccaccttatccactcaccctcctccccagcattcctctggcactgtgttcctgatggcttccagttatacaggtgtggtttacacagctctttgaccatttgagatgtggcatagggcacaaccccacagtgcctattwcatattcctaacagagaacctactaagaaggagggaaggaccacaacactcatcctgaggccctgatgtggagacatccaagaggagggctgtgatggggacgtctttggcttccagaagtttcagagccctcaagggctcatagtcaccagagttatccccaactgctgggaaactgaagagactctgacactctgtgcattgaatgtgcagtctggaagctcagacgacctctgaaggacttttcccaccctcccctcatccagcagtggagaaagtcctcagcaggggaaggcaacagtattcctgggaatctttatcccaagcaactaaaaggagcatacacattattgggaggtgtttcatgagaaagctggaggccaaggaggctggcagaaaaaaaggaagcgaattttactttcacttcctagaagtcttgtttagggctttgtttagggcccctaaacaactaagcctccaaacaggcatttattgctaacgttgacattccctctgtcaatgcataacccatatgtcgaatctggagagtctgttttgaacttattttgacaagttcctctttcctctgatggtctattgacacctggagatgatagtggaagacactgaaactccttaggccagaccaggctttgctgcaggaatcctcgcagtttagttccaccttcctcctaagtcccccatggactatacacagtaggggagcaccatggaagacctgctcacaagcactcctgaaaattagggcatctcctactttatcagcatcagagttccctgcagtcttctaagaagtgcaggtccacagaatccccagctccaaggtcctgggcagctattggcacataggccagtttctagcatcttccatgggcctcttccaggctgagcatccagagcagtggtgacagtggggacaaaggagaacccgtggattccgcctgaagaaataacgtggggacaaaggagaacccgtggattccgcctgaagaaataacatggggtcaggaaaacaaggcaatggagcagaagcaagatctaggatgctatgtcattggaaaggataggtgaaaggatagctgtggctctcggtgctgggaagagctgtcctggacaggcactggcaaaaacagctggcggtacacgcttccagaacctgttctccctggagtggccattgccagaatgctaggctgataataaaacactcaaaaaagtccagcttggctagatgagccacttacagcaagaattgcggcaagcagacggccaggcccatctccacactgtcccttagacatgcagcagctctgggagcctcgagatcactgctgcccggtcatagtgtccccaacgatgggtgagcgccctgggaggtttcctcagaggaccgtgcaggcagtctggaggcagtggtccacattgcggtgtggcctctgtggctttgccttctactccagacataaaatccgagggcttcttgcatgggctgatccggggcacgtgtgccacggagccaccctcacccttcctgggtgatacccgacgcttgacgactctccaccgtctgccgcacctctcagcgcctaccttgccggctgggcagctacaacctgaaacacctggaatctgagtccccagccttgccccccgcagctgccagcttcttctgtcctgttggtccccgcgggaactggttggggaggggacggggcggtggtactggagggctgggccagtcgccagcggtgctagagaatgagttccggtcctgccccgcaccgggctggcactgggcacagggacaggccttggaccccgcgaggaccccactgctgaaaccgccccagccgccgccctccctgagtgttcactcaggtagtgcattttcttcaaatgtacaaatgcaactgttcacgttttccacagcatgcggaagattaattccagctggactaaagacctgaatctgaaaagcaaaatttgaaacaataaaggagaaaacataaaaatataatttaaaaagtaaaaagtaaattggaaaaaaatcaaaatatatctttcctacattctgaactcaaggaggtttgtagacacaaaactgctctgatatcctatattcattacttcccagtgagtaagtctgaaataattgacttggtaccgggagtggttaccaacctctgattgattggttaattagtgtggatagggctaacagtaacaacccacaaaatatctaaagatgggatatagcaggctaaagtcagcaagacaaccttcttaattattaccagaagagtcctttaaccattcaacaaaatggagcaacagttaaaaatctgctacaacaaaaagaaaaggccaataccattctctgacagttttcaccaaaca

SEQ ID NO: 701351 - DNA, 2919 bp, Homo sapiens
tcaggaactggcagccagctgtgagaagacaaacccaggagatgtttgcaaggggaacacctctcatgtgcagtgaaatccaagtcttaagatcagccagggagctgaaatgcctgatactccatcctgcaggaagaatgggatgaggactggcacccatcatccacctgagaggctttagaggctccctcctatcatgagtcaaatggcactttcaacccagtcaaataagttcggggcaaagactttctcctttagaatgagaaatgggccaggacccacaagtttaaggagcttccacttaggccaactttgcaggttcaggtcacactggtccctggctgcattcacaccttgcctttccaccttatccactcaccctcctccccagcattcctctggcactgtgttcctgatggcttccagttatacaggtgtggtttacacagctctttgaccatttgagatgtggcatagggcacaaccccacagtgcctatttcatattcctaacagagaacctactaagaaggagggaaggaccacaacactcatcctgaggccctgatgtggagacatccaagaggagggctgtgatggggacgtctttggcttccagaagtttcagagccctcaagggctcatagtcaccagagttatccccaactgctgggaaactgaagagactctgacactctgtgcattgaatgtgcagtctggaagctcagacgacctctgaaggacttttcccaccctcccctcatccagcagtggagaaagtcctcagcaggggaaggcaacagtattcctgggaatctttatcccaagcaactaaaaggagcatacacattattgggaggtgtttcatgagaaagctggaggccaaggaggctggcagaaaaaaaggaagcgaattttactttcacttcctagaagtcttgtttagggctttgtttagggcccctaaacaactaagcctccaaacaggcatttattgctaacgttgacattccctctgtcaatgcataacccatatgtcgaatctggagagtctgttttgaacttattttgacaagttcctctttcctctgatggtctattgacacctggagatgatagtggaagacactgaaacyccttaggccagaccaggctttgctgcaggaatcctcgcagtttagttccaccttcctcctaagtcccccatggactatacacagtaggggagcaccatggaagacctgctcacaagcactcctgaaaattagggcatctcctactttatcagcatcagagttccctgcagtcttctaagaagtgcaggtccacagaatccccagctccaaggtcctgggcagctattggcacataggccagtttctagcatcttccatgggcctcttccaggctgagcatccagagcagtggtgacagtggggacaaaggagaacccgtggattccgcctgaagaaataacgtggggacaaaggagaacccgtggattccgcctgaagaaataacatggggtcaggaaaacaaggcaatggagcagaagcaagatctaggatgctatgtcattggaaaggataggtgaaaggatagctgtggctctcggtgctgggaagagctgtcctggacaggcactggcaaaaacagctggcggtacacgcttccagaacctgttctccctggagtggccattgccagaatgctaggctgataataaaacactcaaaaaagtccagcttggctagatgagccacttacagcaagaattgcggcaagcagacggccaggcccatctccacactgtcccttagacatgcagcagctctgggagcctcgagatcactgctgcccggtcatagtgtccccaacgatgggtgagcgccctgggaggtttcctcagaggaccgtgcaggcagtctggaggcagtggtccacattgcggtgtggcctctgtggctttgccttctactccagacataaaatccgagggcttcttgcatgggctgatccggggcacgtgtgccacggagccaccctcacccttcctgggtgatacccgacgcttgacgactctccaccgtctgccgcacctctcagcgcctaccttgccggctgggcagctacaacctgaaacacctggaatctgagtccccagccttgccccccgcagctgccagcttcttctgtcctgttggtccccgcgggaactggttggggaggggacggggcggtggtactggagggctgggccagtcgccagcggtgctagagaatgagttccggtcctgccccgcaccgggctggcactgggcacagggacaggccttggaccccgcgaggaccccactgctgaaaccgccccagccgccgccctccctgagtgttcactcaggtagtgcattttcttcaaatgtacaaatgcaactgttcacgttttccacagcatgcggaagattaattccagctggactaaagacctgaatctgaaaagcaaaatttgaaacaataaaggagaaaacataaaaatataatttaaaaagtaaaaagtaaattggaaaaaaatcaaaatatatctttcctacattctgaactcaaggaggtttgtagacacaaaactgctctgatatcctatattcattacttcccagtgagtaagtctgaaataattgacttggtaccgggagtggttaccaacctctgattgattggttaattagtgtggatagggctaacagtaacaacccacaaaatatctaaagatgggatatagcaggctaaagtcagcaagacaaccttcttaattattaccagaagagtcctttaaccattcaacaaaatggagcaacagttaaaaatctgctacaacaaaaagaaaaggccaataccattctctgacagttttcaccaaaca

SEQ ID NO: 701352 - DNA, 1216 bp, Homo sapiens
tcaagagtgaggtgatattactgctcctgaccctgaagtcatgattcatgaggctacggaacagttgtttttacataaaacaataagatcaatgtccttatataagacacaccaaatctgtggcttcaatgttagaaatttatttccttacaattctggaagctggtatgtccaagatcaaggtgacagcagatttggtttctactgggggaccccttcctgtcttcttgcaggcagctgtcctcttgtgcatctttgtttctcagattttaaaggaactactcaaagaatctgttatagactggatgtgtcttccccaaattcatatgttgaagtcttaaaacctagggcagctgtgtctggagacagacactttaaggataaatgaaatcataaaggtgtgaccccaatccaataggatcaatgtccttatataagacacaccaaagagcactctctctctctctctctctctctctctctctctctgccaggtgagaaagcacaagaaggcagctgcctgcaagaagccaggaagaggtcccccagcagaaaccgaatctgccatcaccttgatcattgacatcccagcttctagaatttaagaaaataaatttctaactttgaagccacagatggggttacacatcacaattctggaagcggggattgtgggatttgttctgttggccgagctgactaacgcagaaccagaacattccaactytatattccaaggaaggtaaaaaaaaaaaaaaaaaaaaaaaaagttgaggaaaataaaaagtacccaaaaactcttaactaaaatttggattagaataaaatatcctcaaatcagagggaccttcctagaataagcaatgccgtgagttttaaaggatgaaaaagggttcagttaagcaaagatgaaaaagaaagtcaagccatgaaacagtggcgcatgaagaagacatacaggtgaaaagatcataatggtgcagaaatgcaaggagttggagaaggaaaagatttcaaactaaaggggaggtgggatgaggtcattgggggcagatcaaatgcctacaaattatttcaaaatttgcaatatacatatctaatgaaaatcctcctttaaaatttgctccctgtatgtgcctcatcagaattgcttatttgggaactaagagcgctcattaggaaatacagtatttccacattgtttctattattttaa

SEQ ID NO: 701353 - DNA, 1771 bp, Homo sapiens
aaagaaaaaaaggcaagaatcatgtttaaaacatcacccatagaaaagataactctcaaaattgactatattttcattaagttcagaatagagaacttgcttagcaggtgaatcagtttggattaggcgtggctccttacaaaaacagcgacaacaaaaatcccaaataaaagtagctagacaagcagaagtttatttttctcacataaaagcaatcctgaggttggcagtcaagggctggcataagtgttccacaatgtcatcaggaaaccagactcttttcagcttcccactccatatctggatgtgatccttgktcagcagtattatctactttgaacagtaaaataaaagaagacaagaagggctcacccaacacttcttatgactgatcaccagcacttagtcttacaactaactgcaatggacacttggaagtgtaatcctttagttaagctaaaaatatataaatctacactaaggaaggaggagagagtgaaaaggaggcaatacctagaaatctctgctataagagtggtgtaacaatcatcaaaatttctgtcatttcgagtctaaccaagcaatgagcataaacaagttatatttataaactgcacttagaaattttcaatgagcttccataaattaaatgtaaacttttaagttttttttctacttttatgtgccaatggtaattatcctgcagccatgttactcatatatatttttcaaaagctgtgtgccagatcaaaaagttataatgttcaatgcacacaatgaactctgttttcaatcactgtgcaaaagggaggaatgtttagaaaaagcaagtaatcacttaagtaatggcagagtctgaaacagattatagggtaccatgtcaatttctcaacaaacatggagacttttccccctgtaggtgcttgaagatggctaaaaattatttgattcctccttctattgaggctggattctacctctcttctcagtaacctggctacccctgtaatatgcatctattaacagaatgcagtacaagaaatgttatgtaacttctgacgctaagtctcaaaggatttgcagtgttttccttcattgcttgaaatactttcttttggaacccagttgccatatacttagaagtctaagccaagttgagaagccatgcgtagaaggaacaaaatacaagccaatgctaactgccagtcatgtgcatgaattatattggatgatggagcccagtcagatctgccctcagctgagataaagagtaaatagagtaaaacaatccagatgagcctgtcaaaccttatgaaatatggtacattttttgggccactaagatttgttatacaataatatataactgacacacacacaaaactgacacacacaccctcccacattaaatcagtgataaaatacaatttgttttcatatggcattagattgaaaatatttgttgtctttctaaaataatgattcttaaacttgttaaatcattaggaaatgccaattgctccttatgaatcaagactatgccttctcacctttaaatccatactgcatggactagtagtagactgagtcacatgtaaatatttatttaataaaagattcttttcaagaaatacacatttataatgtcaaaagtaagtgaggtataaagaatgaaaactttttgataagcagtgtaaaaatctcaataaaagatttattcttttggaaattattttgagcgttttaaggtgaatgacatttacggatagaa

SEQ ID NO: 701354 - DNA, 1771 bp, Homo sapiens
aaagaaaaaaaggcaagaatcatgtttaaaacatcacccatagaaaagataactctcaaaattgactatattttcattaagttcagaatagagaacttgcttagcaggtgaatcagtttggattaggcgtggctccttacaaaaacagcgacaacaaaaatcccaaataaaagtagctagacaagcagaagtttatttttctcacataaaagcaatcctgaggttggcagtcaagggctggcataagtgttccacaatgtcatcaggaaaccagactcttttcagcttcccactccatatctggatgtgatccttgttcagcagtattatctactttgaacagtaaaataaaagaagacaagaagggctcacccaacacttcttatgactgatcaccagcacttagtcttacaactaactgcaatggacacttggaagtgtaatcctttagttaagctaaaaatatataaatctacactaaggaaggaggagagagtgaaaaggaggcaatacctagaaatctctgctataagagtggtgtaacaatcatcaaaatttctgtcatttcgagtctaaccaagcaatgagcataaacaagttatatttataaactgcacttagaaattttcaatgagcttccataaattaaatgtaaacttttaagttttttttctacttttatgtgccaatggtaattatcctgcagccatgttactcatatatatttttcaaaagctgtgtgccagatcaaaaagttataatgttcaatgcacacaatgaactctgttttcaatcactgtgcaaaagggaggaatgtttagaaaaagcaagtaatcacttaagtaatggcagagtctgaaacagattatagggtaccatgtcaatttctcaacaaacatggagacttttccccctgtaggtgcttgaagatggctaaaaattatttgattcctccttstattgaggctggattctacctctcttctcagtaacctggctacccctgtaatatgcatctattaacagaatgcagtacaagaaatgttatgtaacttctgacgctaagtctcaaaggatttgcagtgttttccttcattgcttgaaatactttcttttggaacccagttgccatatacttagaagtctaagccaagttgagaagccatgcgtagaaggaacaaaatacaagccaatgctaactgccagtcatgtgcatgaattatattggatgatggagcccagtcagatctgccctcagctgagataaagagtaaatagagtaaaacaatccagatgagcctgtcaaaccttatgaaatatggtacattttttgggccactaagatttgttatacaataatatataactgacacacacacaaaactgacacacacaccctcccacattaaatcagtgataaaatacaatttgttttcatatggcattagattgaaaatatttgttgtctttctaaaataatgattcttaaacttgttaaatcattaggaaatgccaattgctccttatgaatcaagactatgccttctcacctttaaatccatactgcatggactagtagtagactgagtcacatgtaaatatttatttaataaaagattcttttcaagaaatacacatttataatgtcaaaagtaagtgaggtataaagaatgaaaactttttgataagcagtgtaaaaatctcaataaaagatttattcttttggaaattattttgagcgttttaaggtgaatgacatttacggatagaa

SEQ ID NO: 701355 - DNA, 1771 bp, Homo sapiens
aaagaaaaaaaggcaagaatcatgtttaaaacatcacccatagaaaagataactctcaaaattgactatattttcattaagttcagaatagagaacttgcttagcaggtgaatcagtttggattaggcgtggctccttacaaaaacagcgacaacaaaaatcccaaataaaagtagctagacaagcagaagtttatttttctcacataaaagcaatcctgaggttggcagtcaagggctggcataagtgttccacaatgtcatcaggaaaccagactcttttcagcttcccactccatatctggatgtgatccttgttcagcagtattatctactttgaacagtaaaataaaagaagacaagaagggctcacccaacacttcttatgactgatcaccagcacttagtcttacaactaactgcaatggacacttggaagtgtaatcctttagttaagctaaaaatatataaatctacactaaggaaggaggagagagtgaaaaggaggcaatacctagaaatctctgctataagagtggtgtaacaatcatcaaaatttctgtcatttcgagtctaaccaagcaatgagcataaacaagttatatttataaactgcacttagaaattttcaatgagcttccataaattaaatgtaaacttttaagttttttttctacttttatgtgccaatggtaattatcctgcagccatgttactcatatatatttttcaaaagctgtgtgccagatcaaaaagttataatgttcaatgcacacaatgaactctgttttcaatcactgtgcaaaagggaggaatgtttagaaaaagcaagtaatcacttaagtaatggcagagtctgaaacagattatagggtaccatgtcaatttctcaacaaacatggagacttttccccctgtaggtgcttgaagatggctaaaaattatttgattcctccttctattgaggctggattctacctctcttctcagtaacctggctacccctgtaatatgcatctattaacagaatgcagtacaagaaatgttatgtaacttytgacgctaagtctcaaaggatttgcagtgttttccttcattgcttgaaatactttcttttggaacccagttgccatatacttagaagtctaagccaagttgagaagccatgcgtagaaggaacaaaatacaagccaatgctaactgccagtcatgtgcatgaattatattggatgatggagcccagtcagatctgccctcagctgagataaagagtaaatagagtaaaacaatccagatgagcctgtcaaaccttatgaaatatggtacattttttgggccactaagatttgttatacaataatatataactgacacacacacaaaactgacacacacaccctcccacattaaatcagtgataaaatacaatttgttttcatatggcattagattgaaaatatttgttgtctttctaaaataatgattcttaaacttgttaaatcattaggaaatgccaattgctccttatgaatcaagactatgccttctcacctttaaatccatactgcatggactagtagtagactgagtcacatgtaaatatttatttaataaaagattcttttcaagaaatacacatttataatgtcaaaagtaagtgaggtataaagaatgaaaactttttgataagcagtgtaaaaatctcaataaaagatttattcttttggaaattattttgagcgttttaaggtgaatgacatttacggatagaa

SEQ ID NO: 701356 - DNA, 1771 bp, Homo sapiens
aaagaaaaaaaggcaagaatcatgtttaaaacatcacccatagaaaagataactctcaaaattgactatattttcattaagttcagaatagagaacttgcttagcaggtgaatcagtttggattaggcgtggctccttacaaaaacagcgacaacaaaaatcccaaataaaagtagctagacaagcagaagtttatttttctcacataaaagcaatcctgaggttggcagtcaagggctggcataagtgttccacaatgtcatcaggaaaccagactcttttcagcttcccactccatatctggatgtgatccttgttcagcagtattatctactttgaacagtaaaataaaagaagacaagaagggctcacccaacacttcttatgactgatcaccagcacttagtcttacaactaactgcaatggacacttggaagtgtaatcctttagttaagctaaaaatatataaatctacactaaggaaggaggagagagtgaaaaggaggcaatacctagaaatctctgctataagagtggtgtaacaatcatcaaaatttctgtcatttcgagtctaaccaagcaatgagcataaacaagttatatttataaactgcacttagaaattttcaatgagcttccataaattaaatgtaaacttttaagttttttttctacttttatgtgccaatggtaattatcctgcagccatgttactcatatatatttttcaaaagctgtgtgccagatcaaaaagttataatgttcaatgcacacaatgaactctgttttcaatcactgtgcaaaagggaggaatgtttagaaaaagcaagtaatcacttaagtaatggcagagtctgaaacagattatagggtaccatgtcaatttctcaacaaacatggagacttttccccctgtaggtgcttgaagatggctaaaaattatttgattcctccttctattgaggctggattctacctctcttctcagtaacctggctacccctgtaatatgcatctattaacagaatgcagtacaagaaatgttatgtaacttctgacgctaagtctcaaaggatttgcagtgttttccttcattgcttgaaatactttcttttggaacccagttgccatatacttagaagtctaagccaagttgagaagccatgcgtagaaggaacaaaatacaagccaatgstaactgccagtcatgtgcatgaattatattggatgatggagcccagtcagatctgccctcagctgagataaagagtaaatagagtaaaacaatccagatgagcctgtcaaaccttatgaaatatggtacattttttgggccactaagatttgttatacaataatatataactgacacacacacaaaactgacacacacaccctcccacattaaatcagtgataaaatacaatttgttttcatatggcattagattgaaaatatttgttgtctttctaaaataatgattcttaaacttgttaaatcattaggaaatgccaattgctccttatgaatcaagactatgccttctcacctttaaatccatactgcatggactagtagtagactgagtcacatgtaaatatttatttaataaaagattcttttcaagaaatacacatttataatgtcaaaagtaagtgaggtataaagaatgaaaactttttgataagcagtgtaaaaatctcaataaaagatttattcttttggaaattattttgagcgttttaaggtgaatgacatttacggatagaa

SEQ ID NO: 701357 - DNA, 1096 bp, Homo sapiens
ttcagcaggtggagaggaagctttctctccacctatacaaacctaagcaatactcaccaaaagccagraaaatttagtcattttagagaacttaaagggcacaaaccatcccaaaaagggttggttatctggaaatctctgggggcagtggggaagccttctcctaagagaaaagagcaattttggtctggaaataataccttagcatctaagggccaagctgattttgattacggcatgtgtcttcactctgtcctcattcattcattcctacacctattacatccctggtgctgtcctaggtacaggggatatagcaatgtacagacaacaattgatgctttcttgaagctggtgttgcataaataaatataaataataaattacacaagttaaatatataatgtgcgagttggtgagacacataaagaaggaaaagtggggtagaaagtgttcctccaaaccagcccctcatggatttgtgatatgaatggaaaaagcacaaaaccataagagccaattttgcatgcttctgagaaataatgaaggcattggcagcactaaattatttgagtagacacaaaaatggggaaaagccacaatccctattttagtagagctgtgtggaaatggagtaccttgtaaaggcagcacctagggagagttttggactggaggggttgaggggcttgaaggagcgaggagctcatgacctcagagcatgccaagcttcaagcttcttttatttatttatttattgagaaggagtttcacgttttgcacaggctggagtgcaatgacatgatctcggctcactgcagtctccacctcccaggttcaaatgattctcctgccccagcctcccgagtagctgggattataggtacgcgccaccatgctcggctaattttgtatttttagtagagatggggtttcaccatgttggccaggctagtctcgagctcctgatctcaggtgatccgcctgcctcagcctccgaaagtgctgcgattacaggcgtgagccactgtgcccagccagcatgccaagcttctgagtctaggcagtaaacatcactatggagctcagtgacaga

SEQ ID NO: 701358 - DNA, 1096 bp, Homo sapiens
ttcagcaggtggagaggaagctttctctccacctatacaaacctaagcaatactcaccaaaagccagaaaaatttagtcattttagagaacttaaagggcacaaaccatcycaaaaagggttggttatctggaaatctctgggggcagtggggaagccttctcctaagagaaaagagcaattttggtctggaaataataccttagcatctaagggccaagctgattttgattacggcatgtgtcttcactctgtcctcattcattcattcctacacctattacatccctggtgctgtcctaggtacaggggatatagcaatgtacagacaacaattgatgctttcttgaagctggtgttgcataaataaatataaataataaattacacaagttaaatatataatgtgcgagttggtgagacacataaagaaggaaaagtggggtagaaagtgttcctccaaaccagcccctcatggatttgtgatatgaatggaaaaagcacaaaaccataagagccaattttgcatgcttctgagaaataatgaaggcattggcagcactaaattatttgagtagacacaaaaatggggaaaagccacaatccctattttagtagagctgtgtggaaatggagtaccttgtaaaggcagcacctagggagagttttggactggaggggttgaggggcttgaaggagcgaggagctcatgacctcagagcatgccaagcttcaagcttcttttatttatttatttattgagaaggagtttcacgttttgcacaggctggagtgcaatgacatgatctcggctcactgcagtctccacctcccaggttcaaatgattctcctgccccagcctcccgagtagctgggattataggtacgcgccaccatgctcggctaattttgtatttttagtagagatggggtttcaccatgttggccaggctagtctcgagctcctgatctcaggtgatccgcctgcctcagcctccgaaagtgctgcgattacaggcgtgagccactgtgcccagccagcatgccaagcttctgagtctaggcagtaaacatcactatggagctcagtgacaga

SEQ ID NO: 701359 - DNA, 880 bp, Homo sapiens
caatccctataatctgatgtcaaactgaaattttacatcatttctcctttgagttcagcagcttttgattctagattcttctgcctaatatgagttctgagtaatttattttagttaaaattgtatattattaaggatgttgaaaaattgagtcgagtcacacatttgacttacttaaacacatctgcacttattttaccagtaatatatttggtctgcggcctgtcgattatacagatgatgaaagtatgaaatcgctattgctgctaccagagaagaatgaatcatcctcagctagccactgctcagtagtaagtatggatttagctttgggacatttatatattttattaaaattggttatgaaaggaacataatagaaaaatttccatttgaccaattgcttacattcaccaaacaattattgagcacttcctgagtattagctactgtggattcaaagacataatcacagtacgaccatctagaaatacttattgagcccactctgtattttaggcagcattcataaaacaatgaatatgactggtagaactcttattctcagggaggagcttaccatctggtgagaggtaggaaagagacaaactgtaaatattgaactaatataaataaaataatttcagacacttagacatgagtgtttcgaagatgttgtagagtgtcgttgggtggaggtagtgggcttctgcaaggccattgctttagctagggtcacagagtggagccttaaagcactgatttgaattgaarcctgaatgttgaagtgaggaggctgccaggtgactatctggaggacacagtgtataggcccttcagtgaatgaggctggtatgttggaaggttagaaagaagtttg

SEQ ID NO: 701360 - DNA, 644 bp, Homo sapiens
ataaattttctaagatatatttattcttgtactaatagtttgtttctagatatttgctgctaacacacttaactgaacacagacatacacacacaaacacacacagactcacatactgtgagtttatctataggataaaatccaagcattactgaatacaaatgactaacagattttatttttaagacttacagatttaaaacaagagtagtatcttaagacactagtatcctgctgaaaatttacaatgtttacctttccccaaagggactctggccttttaccagagacctgtgcactggggaagattaagtctgcctttagagaatactggacagtggctttaagttgacaatgattccaggagacttaaaacatcactgtggccctacagtcagagtagggggctgatggaggtcaggtgatcaataaagttttaactcaagtccaacttacagtgggtgcagtgggtcctcaaacccattctgtgattattatctcagttccagatccataattgaaatagacatacttagctactggcataatcmtcacgtggtttccctaacctgtggagtgaggtcctttatggtggaaaatgtcaaatggaagcaagtagagttttctctccctaggacaataat

SEQ ID NO: 701361 - DNA, 646 bp, Homo sapiens
ttgaataaattaatcaaatatgtatttattatttacttttaagttttcacagagtacaatataagtatattatattttttattttactcactgaggaaaaataatataaaaataaattatataatgtgacaaaggaatcatattttaaaagataaatgtaggttagttttgaaatgtctactggataaggctctgcactgtttgttgaacacacaaaggaatgaaatactgggagaagtctactattcactacagcttctcctagatttacactttcatagtgattgttgcataatgacagggctattaccatatcttatccaaaaaaaatctttcccagggataacatttatataaatttaagtaaacctttattcatctgtatagcagtaagcaagaagaagttttcatatgtgactatatataattccatgcttttttcagctaaataatagaagtttacatttctttcttcttcttctccatactataaagaaaaaaaatattgagactacayttatttattaaaatgttcaacaaattgataaaataacttgtgatgtttctcattaaaatttatgtcatttaagttactgttgtatcattgatgtagctctggacaatcacttcttattttggaagaaat

SEQ ID NO: 701362 - DNA, 1012 bp, Homo sapiens
tgtgaaaccacagtctccaatgtccagatgtccaactgcgtctcctcttctcctcttctctgctctctgccagtcaggtcatggttttgttgttgttgtttttgttgttgttgttgttgttgtttaattttaatttttatttttggctcactgcaacctccgcctcccgggttcaagaaattctcctgtcacagcctcctgagtagctgggactacaggcccccacaaccgcgcctggctactttttgtatttttagtagagacagggtttcaccatattgatcaggctggtctcaaattccaggtcagttgtttttatgggaacaggatatggggcagagtgggccataggtggttttggaagaggcaacattcaaatgggaaaacaggaatgtatgttctcaytttgggctaaagttttagatttgaggatggggccctcgtcagggaccccacccttttcggcctagaattcctctgcctcctgtatctatcacttctacccacagtgtgtatgtacgtatacatatatatctcataacaattgttacttctgagaagtggccatgataaatctttcagaggtgattaaaatgttttatattttgataaaggttggagctacagaggttttgaatttgtcaacactcattaaaagggtagcttaagacttgtgcatttctttgtaaatatcacctcaaatacacaaaataaaaggaggaccattaccatatattgatttcttactattttatatgcatgctgaagcatctgggaaaagtaaactgatgtctgaattttgaaactaataaatcataagccttataaatggcataaattgaaggatagatgggctatgtctgttgaaataatgaggtaaaattttatttgtagaatttagatagtgggacacgagtattcactacaaaactgttttaactattttataatcaaaacttttaataataaaatgttgttaacaataaaaacaaaatatataagctccttgtaa

SEQ ID NO: 701363 - DNA, 2505 bp, Homo sapiens
ctttatgataaactctatcataacattacattatttagttgttccccttgtatacattgatatagcatgagccatacatatagtatctgtttttaaatgtttcattgttggaaaatgaaattttcaaattatctgcattttaatatactgcatgcctccaaaggagactgtcatggtttttttctggtggacataaggtgacagtgcagctctcatgatgccatcttgtgataaggctgcttggaaatatagtacagatgacccaatggtgtcagagggacctatttcaccgtttgtgaacctacagaatcagtaaaaagctgttcatctctatgtcttgtcagatgaatgtaatgcaccttgaggatagaaaaagacattccatctatacagtaaaaaatgaaggctagtgtgggaggtgaataaaattccaggaagaaaaagaacacttgtatttaaaaaatatttttcattttgagtggaatacctgttttcggtggctgaatttttgacaacatagtaaaaccctgagtatttagaagatgtcaggacaaaagataagtgatcaattttcttcacaatgcaagttacctctgagtgtatcatcttggagctttccattgtctgtcagtgactaacaccatatccaactgtagctttgtgttttctccaaatttgagaagacactatatgactcattgacagacaatggcaaactctcttcaagaaagcagggggcagaagaaacgaacatctgggaactaagctgcaaagaactaatttaagagttaagatgctgctgtccacctccatctgtgcatctcttctcctgaaaaaggtttatgtgttcttctttagatagagaaaaaaatgtattttgtacaatggaaataacaactttagactgctggagcagcatgctcaaccatgtagcacagggttaatatttctccagatcacaagaaaagttgaaatacattgatttgttattgttgcttttaattcaagtaattcgtattattttttctaagtatagggataaaacagaagactggcagagaaccacagtttaacaaccacttagtcatattaatatactattctataatataatcaaatttgaattttatgtcttaaatatataaacttattttatgcagttatctttatgttgtgcttatatcttagtatttatctttaaaaatatatttttcacctgatctcaatcaaaaccaacaaataatgtggtatctttcccctttatttcagactgatacacatttctgagagttcttttttttacatctagtttcagaaggcatgatataaacacttttcactctgtaagatttttacagaagtccctttttttcttaagcactaaacactagttattttttctatttaacaatgaacgttaatagagtcaaaaatgcagtgccattcatcggtaaacaaattgttcaaatttttgaaactttcagttttactacactaggtagtcaagaatatccaatgaatatctrtatttcatataatatcatgcttatttgctctttctcaatgatttccatttgcaattaagcacaaagagtatatgaaatttccaacatgctgtgtctctggaacaaattacttcaagaaaaatttttattataatgattttctataaagagacccttttgctactattgttatttttgagtgtgtgtttgtgcgtgtatgacctttttttataaaatactctgcaaccacaaaatcttaatgttttgctagtgttcttggaagactccaagtccatcttcatatcaatatagacaattcctcttagcatccctgagaagctaacatctacttcctgcgtaagtacctccatttgctacacttaaaaaaataagatcaatttggcatcaactatgttccagatactctctgatatggtttggctgtgtcctcacccaaatctcaccttgaattgtaataatccccaagtgtcaagggcggcaccaggtggagattatggaatcatgggggcaggtctttcccatgtcattctcggggtagtgaataagtctcatgagatctgatagttttataaaggggagttcccctgcacacactctcttgcctgacaccgtgtaagatgtaacttttatcctcatttaccttcagccatgattgtgaggcctctccagccatgaagaactgtgaatcaattaaacctctttccttcataaattacccagtctcaggtatgtctttaatagcagcatgagaatggactaatacactgtattaatgctgcaattagcaaaatgaatactgggtgtgttggttgccagaagcactctatctccttagagagatgaaccaacaagcaaataactagacaatagtatgttacgtgtcacaatggaataaagtctccagaaggtagagagagactatctctttgaaaagttagaaaagaccacataaaagaaagaatatttgagcgacatttca

SEQ ID NO: 701364 - DNA, 1177 bp, Homo sapiens
ttttccacaaaactgaaaagaaggaaatagagtgatattgggttctgtgtagcaccctgatagttcctatgagtttcacaaagcaagcaggtgtatatatttagcccacttgacaatttaggcaaacatgtagccatgactacatttacaaaatggtcccttgctatatttcctagtcatcacataggcacaatttaactgagttctaaaaacaaaatatttagagagcttttaatcaggtaaaaagagggtaaaatgggaaggaaaacccacagtatagaaaacagatatagataaaggaattaagtaaaaaggtttacaagaattttaaatgtgaaaactgatccgcaagagaatcagacaacttaatgaagatgcctttaagtaattacagaaattctacatataaataaacatagggtttttccaactccatgttgcatcatattgttcagtttgcaaagtaattttgtgtgctgtactttgaaaaagtccaaagaatgactattcaagactttgagttatgagttatgagttcaagatattgaaccagagttatgtaatgactatctttgctttttgaatatttaaaaacagtggtatacaaaaggaatctgcataattttctctgattttctagtcaaatattattaaagagaaataaaaaatctattcattggcaatgccagacgaacaatcagaatccccttagctgatgtacagtagtgccattcaatataaatataatgcaagcaacaatcatttataaaaamaagtaataactttgaaaaagtagagatttgtgaaataaatttaaatgatatatttcattaaataaaatatattcaaaatattatcatctatttcagaatattttatttcaccatgaagtgaatgtatattagtttcaaaactgtctgtccaagtaatatcagtaacacttgtgtcaactcagtattatcatcgttgaattcaaaggatattgagtaagttgaaaaacaattctaaatgtattgaaatcaataaatgttcttcaaattttttctatagctttcttagtcaatttatttaacactatttggttaccatttaaatcttctgcatatagatttatagtagaaaatgtataaaatctttattatttggtttgtatatgaaaaatttgaatgtcaacata

SEQ ID NO: 701365 - DNA, 1177 bp, Homo sapiens
ttttccacaaaactgaaaagaaggaaatagagtgatattgggttctgtgtagcaccctgatagttcctatgagtttcacaaagcaagcaggtgtatatatttagcccacttgacaatttaggcaaacatgtagccatgactacatttacaaaatggtcccttgctatatttcctagtcatcacataggcacaatttaactgagttctaaaaacaaaatatttagagagcttttaatcaggtaaaaagagggtaaaatgggaaggaaaacccacagtatagaaaacagatatagataaaggaattaagtaaaaaggtttacaagaattttaaatgtgaaaactgatccgcaagagaatcagacaacttaatgaagatgcctttaagtaattacagaaattctacatataaataaacatagggtttttccaactccatgttgcatcatattgttcagtttgcaaagtaattttgtgtgctgtactttgaaaaagtccaaagaatgactattcaagactttgagttatgagttatgagttcaagatattgaaccagagttatgtaatgactatctttgctttttgaatatttaaaaacagtggtatacaaaaggaatctgcataattttctctgattttctagtcaaatattattaaagagaaataaaaaatctattcattggcaatgccagacgaacaatcagaatccccttagctgatgtacagtagtgccattcaatataaatataatgcaagcaacaatcatttataaaaaamagtaataactttgaaaaagtagagatttgtgaaataaatttaaatgatatatttcattaaataaaatatattcaaaatattatcatctatttcagaatattttatttcaccatgaagtgaatgtatattagtttcaaaactgtctgtccaagtaatatcagtaacacttgtgtcaactcagtattatcatcgttgaattcaaaggatattgagtaagttgaaaaacaattctaaatgtattgaaatcaataaatgttcttcaaattttttctatagctttcttagtcaatttatttaacactatttggttaccatttaaatcttctgcatatagatttatagtagaaaatgtataaaatctttattatttggtttgtatatgaaaaatttgaatgtcaacata

SEQ ID NO: 701366 - DNA, 614 bp, Homo sapiens
gctttagtaagtataatataaaagattttatatgcagagtctcatacatagaacgrcaaacaaacaagtccaacaaaagattcaaagagacttctacacacataagagtgtgtagctcataaatgttcacttccttaactgggaattattatcaatcaaaatgaaacaggaataagaaagtatgctttgttactttaaaaagcaaatgcatttttaggatattttaatgaaattctgatgtataagggctgggaatagacccttttaatatattttacaattgtcaggtccttggttaaaatctgggtatgctattttattctccaaatgatgaaaaggggaaaagtgcactaaaaataatcaaagggatagaaaataggtcatttcagaaagactttttttctaaaaaaagatttgtctacaaacaaatggaaaaacattctgtgctcatgggttggaagaatcaatattgttaaaatggccatactgcccaaagcaatctacagattcagtgctattactatcaaactaccaatgtcatttttcacagaactataaaaaactagtctaaaattcatgtggaaccaaaaaagagcccaaataactaaaagaat

SEQ ID NO: 701367 - DNA, 614 bp, Homo sapiens
gctttagtaagtataatataaaagattttatatgcagagtctcatacatagaacgacaaacaaacaagtccaacaaaagattcaaagagacttctacacacataagagtgtgtagctcataaatgttcacttccttaactgggaattattatcaatcaaaatgaaacaggaataagaaagtatgctttgttactttaaaaagcaaatgcatttttagratattttaatgaaattctgatgtataagggctgggaatagacccttttaatatattttacaattgtcaggtccttggttaaaatctgggtatgctattttattctccaaatgatgaaaaggggaaaagtgcactaaaaataatcaaagggatagaaaataggtcatttcagaaagactttttttctaaaaaaagatttgtctacaaacaaatggaaaaacattctgtgctcatgggttggaagaatcaatattgttaaaatggccatactgcccaaagcaatctacagattcagtgctattactatcaaactaccaatgtcatttttcacagaactataaaaaactagtctaaaattcatgtggaaccaaaaaagagcccaaataactaaaagaat

SEQ ID NO: 701368 - DNA, 614 bp, Homo sapiens
gctttagtaagtataatataaaagattttatatgcagagtctcatacatagaacgacaaacaaacaagtccaacaaaagattcaaagagacttctacacacataagagtgtgtagctcataaatgttcacttccttaactgggaattattatcaatcaaaatgaaacaggaataagaaagtatgctttgttactttaaaaagcaaatgcatttttaggatattttaatgaaattctgatgtataagggctgggaatagacccttttaatatattttacaattgtcaggtccttggttaaaatctgggtatgctattttattctccaaatgatgaaaaggggaaaagtgcactaaaaataatcaaagggatagaaaataggtcatttcagaaagactttttttctaaaaaaagatttgtctacaaayaaatggaaaaacattctgtgctcatgggttggaagaatcaatattgttaaaatggccatactgcccaaagcaatctacagattcagtgctattactatcaaactaccaatgtcatttttcacagaactataaaaaactagtctaaaattcatgtggaaccaaaaaagagcccaaataactaaaagaat

SEQ ID NO: 701369 - DNA, 878 bp, Homo sapiens
  misc_feature 623: n = A,T,C or G
ttttttttttttttgtacagactgggtcttgctacgttgcccaggctggtcttgaactcctagggtcaagcaatcctcccacctcagtctcccaagtagctaggattataggagtgagccaccacacccagctctctacttgtatcagtgtagactcatagattcttatttcattcaataggttatactcctttactatcgctatttattttgatgctcaaattgtcccagatttggccagcagaagccccttctagctggccactgcatcctttaaacatgttcccatctttcttaggatgtaccctttaaccttgaccgtcaagtaagttttcagagatagaagwgtgaataagtggtatggcagctatatctttccctcctcaccgcttcctcttcatctcagatggatgatgagatgggggattcccccaagaagatctgccgtgagggcctcagacacggtgggctatccatcagtctttttgggagtgtttgcattgagcctggtatgattgccattgtcattatcatcacctggcagagtgtgccaagttctatcaattgaaaataaagatacttgcacatgtatgtttatagcagcacaatttgcacttgcaaanatatacactggggccctaaatgcttatcaatcgatgagtggataaattaacttgtggaacacttgaatatatattatatatattatatattacatatataatatatgtatatattactgatataatatatgtatattttacatctatgtatgtatctagtacttatatgttatatgttatatattcatatatacatttcatatattacatatataatatatgtactatatattatataaatgtaatatataacat

SEQ ID NO: 701370 - DNA, 878 bp, Homo sapiens
  misc_feature 623: n = A,T,C or G
ttttttttttttttgtacagactgggtcttgctacgttgcccaggctggtcttgaactcctagggtcaagcaatcctcccacctcagtctcccaagtagctaggattataggagtgagccaccacacccagctctctacttgtatcagtgtagactcatagattcttatttcattcaataggttatactcctttactatcgctatttattttgatgctcaaattgtcccagatttggccagcagaagccccttctagctggccactgcatcctttaaacatgttcccatctttcttaggatgtaccctttaaccttgaccgtcaagtaagttttcagagatagaagagtgaataagtggtatggcagctatatctttccctcctcaccgcttcctcttcatctcagatggatgatgagatgggggattcccccaagaagatctgccgtgagggcctcagacacggtggsctatccatcagtctttttgggagtgtttgcattgagcctggtatgattgccattgtcattatcatcacctggcagagtgtgccaagttctatcaattgaaaataaagatacttgcacatgtatgtttatagcagcacaatttgcacttgcaaanatatacactggggccctaaatgcttatcaatcgatgagtggataaattaacttgtggaacacttgaatatatattatatatattatatattacatatataatatatgtatatattactgatataatatatgtatattttacatctatgtatgtatctagtacttatatgttatatgttatatattcatatatacatttcatatattacatatataatatatgtactatatattatataaatgtaatatataacat

SEQ ID NO: 701371 - DNA, 878 bp, Homo sapiens
  misc_feature 623: n = A,T,C or G
ttttttttttttttgtacagactgggtcttgctacgttgcccaggctggtcttgaactcctagggtcaagcaatcctcccacctcagtctcccaagtagctaggattataggagtgagccaccacacccagctctctacttgtatcagtgtagactcatagattcttatttcattcaataggttatactcctttactatcgctatttattttgatgctcaaattgtcccagatttggccagcagaagccccttctagctggccactgcatcctttaaacatgttcccatctttcttaggatgtaccctttaaccttgaccgtcaagtaagttttcagagatagaagagtgaataagtggtatggcagctatatctttccctcctcaccgcttcctcttcatctcagatggatgatgagatgggggattcccccaagaagatctgccgtgagggcctcagacacggtgggctatccatcagtctttttgggagtgtttgcattgagcctggtatgattgccattgtcattatcatcacctggcagagtgtgccaagttctatcaattgaaaataaagatacttgcacatgtatgtttatagcagcacaatttgcamttgcaaanatatacactggggccctaaatgcttatcaatcgatgagtggataaattaacttgtggaacacttgaatatatattatatatattatatattacatatataatatatgtatatattactgatataatatatgtatattttacatctatgtatgtatctagtacttatatgttatatgttatatattcatatatacatttcatatattacatatataatatatgtactatatattatataaatgtaatatataacat

SEQ ID NO: 701372 - DNA, 691 bp, Homo sapiens
agtctgctgatgcattgatcttgggcttcctagtctccaaaactgtgagaaataaatgtctggtgtttaagccacccattctatggtaatttgtcattgaaaccctagttaagaaagacaacttgttagtgagagaaattactactcatatcaccctataggcagaaacaggaattgaccacagaatcattaaagatggtatttcttgcaagaataaatgctgacagaagagactttaaatggaaagagaaattaccctcttaaaaaaaaaaatgaggaaaataggtacggacttcctgagagtgtaatgtaccatgtactgatggacaccagaaccattcttgcccttctattgtgtgcctgtctatagcgatccggaaaagtgagctaaatatgcctggctagattcgcaggccctgagattaaatagaacctggcaagtttctgattatgctactgtcttctaaacccaaagccgttggacatattcttmaaagtgctacaaatctactctcttaactttgcacacattaacagatttaaaaaaaatttaattatagataagacatgcaaaattgacgttaattacatccttaggcttttctttctctttacttttttcatattagagggagaaactcacctagcaaagatgtgcattggtgtgtacgtggataagttatctcatgtt

SEQ ID NO: 701373 - DNA, 825 bp, Homo sapiens
tagtgacactgtggcatgtcatcttcaatgtgctgaactgtggacaataaatcctagcaggctggataggttaaaataaccacattcaccatcatcctcactgccttccgagcaatgctatttcaaggcaacaggttcaggatgtcctcctaagtggtggtctggggatttcagaaacataaaaatatgattaatactgaaagttttaagatttcgagtgcttaggaaataggctggagatatcracagaggataatgtcatgctgtaggtctaaaagctgaccatggaggtgtctgttcccccatagctcaaatgtaataactactatgtgctgatagaacctgaggcatacacataacaaatgctagaatgtggaaactggtttggctgaggctttagacatcgagttccattttgctgattgactaccttggattaatgggaagtatatcctccacccccacccctgcctttttttaagttaaaaaatgaacaatctccttcttttttggggggctggggaggcgggtggacagggtcttactctgtcacctacgctggagtgcagtggggtgatcttggctcactgtaacctctacctcccaggttcaagtgatcctcccacctcagtctccttagtagctgggacttcagatgcacaccaccatggctgggcctttttttaaattttgtatcattttgtagacacagagtctcgccatgttgcccaggctggtcttgaactcctgggctcaagcaacccatctgcctcagcttcccaaagtgctgggattacaggcatgagccactgtgcccagccaaaa

SEQ ID NO: 701374 - DNA, 1211 bp, Homo sapiens
aaaattccataccattcctcaacattccataagcctcaatctttctgaatatcattttctgtctcctcaactcagagatatcattgtattatgattagcttattccttattgcattggagttcagaaatttctattaacaagaaagccagagaacttacaacactaattgtacttgtttccttctttcagggatcagagacccatgctggctattgttgaatgtctggaaacagttgatttgtatattttgtccagttttctttactctttttttttattattattaaaggaaacaagggaatcaggtctatttccagttactccatggccagaaaaaaaataaaataaaatgtcaaaggtttatcattgaacaaatatgattgaatccaaactacttagaaaacataagagttataatccaattccagtctgcccctctggcctcatatagttttgctcttttagtaaatgttttgttccagctatgatgaacaatgtttatcttgcaaatgtgaacacttttatgcgttcttatgtttgtatacacacattcgtttttctgaaaatgtcttctcattgacttcctcttgtcctgaactgtgtgcacttttactagagaaataatcatagactgttataagcatgtaattttatgtttctcccattggactaygctgtctatgtgtaacctcaggcacatcaaactacctcttttgtaagtaaatatcttcccctattatatatatctggaagactagatgttctaagaggttttttacatgtttaaaatggaaagaaactctgattatttaaacattagtgtatttccaaagaagctatcctaagcatttaattttaaatgcttaaaaaatggtgaatattcactcagagaaactagaaaaacaagagcaaatcaatcccaaagctacaggaggaagaaaaaaaaaaaacccacatcagagctgaactgaatgaaatgaatacgtgaaaaagcataaaaaccaaaagttggttcttcgaaagtataaatacaattaatagactgctacatagcctaagaaaaaagagagaaaagtcaaataaacacaatcagaaatgacaaaggggacattaccactgaccccatggaaatacaaaaagccttcagagactattatgagtgccgctatgcccacaaactaaaaaacgtacaagaagttgataaattcct

SEQ ID NO: 701375 - DNA, 1211 bp, Homo sapiens
aaaattccataccattcctcaacattccataagcctcaatctttctgaatatcattttctgtctcctcaactcagagatatcattgtattatgattagcttattccttattgcattggagttcagaaatttctattaacaagaaagccagagaacttacaacactaattgtacttgtttccttctttcagggatcagagacccatgctggctattgttgaatgtctggaaacagttgatttgtatattttgtccagttttctttactctttttttttattattattaaaggaaacaagggaatcaggtctatttccagttactccatggccagaaaaaaaataaaataaaatgtcaaaggtttatcattgaacaaatatgattgaatccaaactacttagaaaacataagagttataatccaattccagtctgcccctctggcctcatatagttttgctcttttagtaaatgttttgttccagctatgatgaacaatgtttatcttgcaaatgtgaacacttttatgcgttcttatgtttgtatacacacattcgtttttctgaaaatgtcttctcattgacttcctcttgtcctgaactgtgtgcacttttactagagaaataatcatagactgttataagcatgtaattttatgtttctcccattggactacgctgtctatgtgtaacctcaggcacatcaaactacctcttttgtaagtaaatatcttcccctattatatatatctggaagactagatgttctaagaggttttttacatgtttaaaatggaaagaaactctgattatttaaacattagtgtatttccaaagaagctatcctaagcatttaattttaaatgcttaaaaaatggtgaatattcactcagagaaactagaaaaacaagagcaaatcaatcccaaagctacaggaggaagaaaaaaaaaaaacccacatcagagctgaactgaatgaaatgaatacgtgaaaaagcataaaaaccaaaagttggttcttcgaaagtataaatacaattaatagactgctacatagcctaagaaaaaagagagaaaagtcaaataaacacaatcagaaatgacaaaggggacattaccactgaccccatggaaatacaaaaagccttcagagactatyatgagtgccgctatgcccacaaactaaaaaacgtacaagaagttgataaattcct

SEQ ID NO: 701376 - DNA, 770 bp, Homo sapiens
gtacagggatgttatcatatactccttagaaagaatgatacagtgtttgaatatttgctccccactccggaatcatgttaaaatttaattgtgattgtgtgattgcaacagtattaagaggtaaaatcttacggagtatttaggccatgagggttctgccatcattaatggattaatgtctttattatgggagtaggtttgttatcacaggagtgggctccttataaaaggacgagttcagcctccttttgtttctctctctctcaccctctctttgcccttctgtcatgggatgatgcagcaagaagtccctsaccagatgccaacctctcgatcttgaatttcccagcctccaaaactgtgagtcaataagtttctgttcattataaactacccagcctgtggtaggttgttatggcagcacaaaacaaaccaagacaaggaattacaggatttattccttaataattgatagaatccatcatgcaatccacccgcttctagagttctccttgtggcaaggtttctaattatgaattaaatttatgtaatttactaaataaatttatctttaattcattctttatttttatctttaattgatgtaaaattattcaaatattcttcctcttcatacattcactttggtgatgtattttccttttatttttagttgacatgtaattactgtatatatttataaatacagagtgctattttgatacatgtaaaaaatgtgtaatgacaaagtcaggataattaatatatcc

SEQ ID NO: 701377 - DNA, 652 bp, Homo sapiens
ttacttgttttacttaatttcagtacagaaacactgttattttatcagatctatctgaactacagaaaaaattaaaaggaatatgtttaaagaagataggaaagaaacttcttatattctcaagataatcaaagacaaaatatggagaaaaattccatatctgagaaagaagctaacgtggcttggattatacttcatgctgtataaaaattaatttggttttcaaaagctcagtttgttctcttctgcttatcatcaatattgttcacttcaaagtttggaagctttataaattaaagtatatattcttaatagaataattcttttcctattagttttaaaagttaaacactgaattttttttgtacaaagcatttcctgtttcccctttgtaaagctgcataagctacttcattttaggcataaaagaaaaataaattatactcactttactacaagcacctgtagtggtctcacagactgtgaggatggagatgttctgagstcggtttaaccatcttaccacagtcttggtattgcttacccatttaaccatagtgatatagtattctctagtttggaaacaaaattaaaatgtatgtttagagccagagcattgatatagtaccaacaatatacatttgccatttta

SEQ ID NO: 701378 - DNA, 1236 bp, Homo sapiens
ccataatgcaggcaaggaatccagtcaaggaagacggtagctgtgcaggtggttagtgtgaaggatgtgagactatcctgcatggccctcgatgtgtctgggcaagggaattcactagcccatctgccaatggcgacctccagggcttgacttggtcatcatcctcaggagattcccatgtgggtatttaagctttccaactaaactttaagctttggttaggaattttgtcggtttgggtattaggtttgttttaacaccacctgcccacccaggtctctgtacacaggctttactgtcatgggatgggatggggggaagcgcagttggccctctgtatctgtgttttctacatccgtggatttcagctaaccacagatcaaaaatattcaggggaaaagtggatcgtgtctgtgctgaacatgcacagactttttttctcaacattgttctgtaaacaatacaacttagcaactatttacatagtatttacattgtattgggtattataagtaatctagacatgatttaaagtacacaggaggatgtgtattgattatatgcaaataatacaacattttttatcagggacttgagcatccatggattttggtatccacagtgtccttggggggtgggtcctggaaccaatctgctatggacactgagggacagcagtacatcgaaagtttttgtttctgcctcgtttaaacaccacatgactctgagcaagtcaacttctatgagccttggtttcctcatctggaaaatgtttgtggtgtaagcttatgccacatgaaatacagcttgttaaactgtaaaagattacataaagttaccattatccttcctgctaaatgctaatcatccacactgagatttgaatttcatcatgaagtatgttcatttcatttcattctcaccctggtaagttcctaaggagaaaacattataggaaacttctagagcgaaagaataaactactaatcactagagcctagcactgggctagatgctttctcatacttgaagactcatttattccacagctctgtgaggttagaaatataataatcccctttcagatggaaagaaacaggcttgaagtgaktttcagtgatatcttcgaggttacccaactgaagaaaagtcacagttctgtgctggtaaagtgactctgaagaaagagagaaaaaaaagcttgcccattactgtggtgtaaatgctcccactgtg

SEQ ID NO: 701379 - DNA, 2164 bp, Homo sapiens
cccgctagcccacaatctccatgaaggcagagaccagatcttcttagcccacattgtatgttcagcaccaaacacagagtcagacaaagaaggcacttgttgaataactaaattaactgttttctgttatttcaagagaaattccaaagtctcaaacagtcctcaaaacgaagtcaattttcttgcactctaattctttttaattattccattctttaagagtgataggaaaaaagttgtaagtcatgaaatctaagttgttggaagggccttttgtgtcttaattcaacaaattcaatatccagataatggcacgtccatctttgattagttaactccagatgcagggagctcattccttcctaaggatatgctttccctttatgggtagatcactggctttcttctagctattacaaaataatgtatcattttgacccttagtcttctttttttcccataagcccctcctgtgaacagggtctttttccctgttcaaaggttccccatggctgcacaaaaagaacaaagaccaaatgccttaatagagtttacctggccatttaggagctgtcccctgctttcttcaagtctctgccatccctctgtgctctggccatactgaatacatgctctatctctcccagggcttttcacatgttatcctctctgcttgaaactttcctcctccctcctccttcttccctcttccattctcccacctcttcacctggtatctgcttctcaatctttagttcttagctctaaagaccttccttctggaagcccttcctgacaccctctccgctcattctaagctgcattctttttctttgcttccaaagtactcagtctgtctaaatctgatgatcacacttcagctgtttcactaccagatccagtagagcatgcatatatgtatgtctcctgtaaatggatttttattttctatattgagaaaggatacagsaagttctttccatgtccgttgaagtcagtgagtaaaaagtttttggtttatttttgctaggttcatatcacccatcttacccttcaatgacatcggcttctaaacaatccctgatatggaactgattaactcttgcaggtctgtttggcctgtctttgagtggggaattgggagtggtgatgctggaaaaaatcctattaaatataattacacattgcagtaagggatatataggaaagcgctatggatgctatgaagagatatgtttcagattaaagagtttgaggtggactctgaagaagtgatataaaaacaatcaaatttgggatcctacctggagactcaggctgcatgtcgccccagaggtgtgcagatcttttggtctggacaccatttttaaaatatgtgaatttgactgccacccaatcccctcaacatctgaatttctagcctgcattataaaattttttttaatttttttatttccatacgttattggtgaacaagtggtgttttgttacatgagtaagttctttagtggtgatttgcaagattttggtgcacccatcacccaagcagtgtacactgaacccagtttgtagttttctatccctcaccccgttcccaccctttccccctgagtccccaaagtccactgtgtcatttctatgcctttgcatactcatagcttagcttagctccaacttatgagtgagaacatacgatgtttggttttccattcctgagttacttcacttagaataatagtccccaatctcatccaggttgctgtgaatgccattaattcattcctttttatggctaatataccttcatatgtgtgtgtgtgtatatatatatatatatatatatatatgaaaatccaaataacctcaatgagaaataaaatgggagatattacaacggacacaatagaaatacaaaaaaatcattcaagtctactatgaacacctttacgtgcataaactagaaaatctagaaaagatgaataaattcctggaaagataaaccctcctagcttaaatcaggaagaattagatactctgaacagaccaataacaagcagcaagattaaagtggtaattaaaaaattaccaacaaaaaaagtccaggaccagacggattcacagaaggattctaccagacattcaaagaagaattaattgttaccaa

SEQ ID NO: 701380 - DNA, 850 bp, Homo sapiens
gcaaagtaacgtaggcttgaaggatagaagccgccaacccagraggaaaagcaggccagggaccaagaagaaaaacaggctgagcaaatcgagtttgggttggttgaagtagggcctcccgggggagctgtccttcagaacctgggaatgtgggagctgcagtgactacagaggttgcttcctgatgacaaggtctgggccatttctgccaactctgcacctcgagcccaaccagcatggcagctggtgtggtctggagggattgctcgagtgggcactagggggatggggaggagaatggaaatctgatggtgaaagactgagtttaaaaatacatttctggctgggcatggtgcctcacgcctaatcccagcactttgggaggctgaggagggcagattacttgaggtcaggagtttgagaccagcctggccatcatggtgaaaccccgtctctactaaaaatacaaaaattagccaggtgtggtggcacgcgcctgtaatcccagcaactcaggaggccgaggtgggagaatcacttgaacccaggaggcggagattgcagtgagccgagatcgcaccactacactccagcctggggaacagagcgagactccatctcaatctaaaaaaaaaaaaaaaaaaaggaaagacaagaaaatacatttctgatgatacatgcagtatcagatatttgaaataccagccatatttgggcttgtttggggatagtattagaattagaacttaaaagtcagaagttcacaggttaggttccctaggaatcagactccaagatgaagttctggctttaaaaatataagaggtgtatttaaagtgtgttatctgga

SEQ ID NO: 701381 - DNA, 690 bp, Homo sapiens
taatatatatgtaaatatatatatttatatatgaaatatatatgtaaatatatataatatataaatatatataaaacatatgttagatatgtgattttttttcaggtctagttagtcagacttcatctttcatatattcaagcatgcattccttcaacacacacacatttgttaaagtagctgtcatattgattatgaacatgtatcagagttttattctaaacttgtatcaaaataagaaacatgctcaaaagtccaattcaaagaatccttcttacaaacacattttatagagaaaaaaatcagcagataaattattaaactagattttttaaagaaggaaaataatatcyagttaaggatgacagcctctttgccttattggttaaaggtcttaaaccagtttcaagagtaataatcagtcgagtgggtttcccgagagggtcttttaagctcattactctattagaaaattgctcaagtattttatcaggaaaagaattatttcccgaggaaaagcagctagtcacatcagaccacaaagttctgcccccacaaaggttcgggacccctttatttctcacatttattgggggctgcttatgccatgctttaccttctaggcaatggaaaactattgacagggtttaagcagagatatgccatgatcaaatttgtatttttaaaaga

SEQ ID NO: 701382 - DNA, 610 bp, Homo sapiens
aagacaccattcctgccctatcacagtgtcttaggagacacagatgaataagaatgcaattgaaacaattttatagatgccggattgggctatgcagcaggtattagggactcggattggggagtcaggaaacatttctggacgaagtgacaaatactgagccttgaaggatgcccaagagttasgaaaggagagtggcaagcagagttctggtttaaagggacagtatgggtgatggttcagggggtgaacaagcttgctgagctgtttccctccacagagtgcagaaaaatagggcctttctggaagcaagagaaaggctgtctattacctgggcttctaggtgagtagccaggaaggggagaaacggcttgagattctgtttgctctcaatctttgtccatcccaaaatgcagaacactaagtctagtggcctgggacacattttagtttgtcttttgatccttgacagtatttaagacatgttgagggtgggcacaacggctcatacctgtaaatcacagcactttgggaggctgaggcgggagggtcacttgagcccagaagttcaagaccagcccggaaaacatagtgggatcccttctctaca

SEQ ID NO: 701383 - DNA, 245 bp, Homo sapiens
ggccaactgtataactctttacttctgttttaaacggaataatcttccatagaggaagatttgcgatacagaaaccattaccatctttatcttttcatgtacactgggttagataaacagaaccagaactcaaaagcacatmatcaaagtagcatttatatttatgtttttaaaaattggaatcatgctttcatatgtagaatatatttaattaaatttaaatataattttaatcatttctaccc

SEQ ID NO: 701384 - DNA, 614 bp, Homo sapiens
agcaagcacgtcttaccatggtggaacaagagagagaaagaagggggaagtgttatacacttttagaccatgggatctcatgagaacgcacccacaatcacgagagcagcaaggaggtaatccgtcccatgatccagtcgtctctcaccaggcccctcctccaatttgacgtgaaatttgggtggggacataaatccaaaccatatcacctactctccattttatagtctttcctgaactccattttgctattcccatgctaaatttaattggtaatgtgcaaaatgacatcaaagaagggagatatttagaaggacaggaaaaaataatgagaaaaatatctttgtgaaaaaagtgggttagagggtcttgagagtggtcccaggaacagcagcaatatcatctcttgggaacttgttagaaatgcaaattattgagccccaccctagacctactaagttaaaaactctgggggaggtcctagaaatctgtgctttaacaagctttttaagtgattcttatgyacatcacagtttgagagccagccactgttttagatcagttttaggaaaaggaaaggtatctactataaaggaagtgagcttctttgcaac

SEQ ID NO: 701385 - DNA, 3453 bp, Homo sapiens
agctaaaggaacagttttccgggggctttatgagctatgtttatgtgacttacagtcatttctgtgtgtaatcaagctattgacagctatcctaggttggaatggcttccagaaaactttctaagaaagtttttcttagacaggaccctgaaaactgaataagcttcaggtcccacagaatctggacctgcccctcataaagggactcctatctacttactaattgggtactattcctgtttatgcttccaaggccacattttatgtttttcagccagtttttctctatcatcccacagcttcttgagctcagtgtgattatggcagaaactctgaagctaaagaaacttcccatgttgctgtggtcacagctcaagggtaagctgttccattagcattgccaagtctttgctattttctaaacttttctgaaaaatgggttccatttgggaatttgtaatgtggctgtcagaccacctacatacacaggttatttgacaacccaaagagtgagattcttcactgtaataagcaaaaatgaacataaaggctatggtggattctggttttgaactttgttggaatcacctcatctctcttgtcctattggcaatttgtcttcttaacacttaactgaacacatcatatgccttgctctcaaggaagaagccataagatcttaatttctttgccttccatagagtctaactgtaactctagttattaccagtaggcaaggcctcccgttaattgtgattccattaaaagggatttgtgcaattgtagaggacatctaaactccactacttctaagtgcccatctccaaggagccatagttagatcattccaacatggtagcagagttacaactgagacaactaactgaacagagctccagatgacttttaacgtccatagatgcttagacttatgtctctgaggctccacgtaaaacaaagcatttgtacgatgtttatgcttcatcaaattatcctataattttgccatccaaactgctactaaactttgcttctgccaaactttgaaatttcaagagatagcctgagtggttttcttacctttggtgctgaagtcatctaccagcagaatctccttgatgaggtgtggaggagagcgattgatgacactgtgaacagatctcaggagagtggaccacacttcatccacaaagcacatgatgacactggtggttgggaggttattgtgaactagctgctctgcacatctgggccagaatataagcagagcacaagagatgtgctaaggagatccacaagatagttttaaaagtcacagagtgcgatggtgtgcatatacacacacacttaatctgtcatcgatctgtctggtctatctatcatctatttatatataccaatgatgattttattatttatcatgtgcctttttttggggaggggtacatgcaaaataaaaaagcagaagaattacccgtaaccgtggttgttataaaaggactagaaatgcaagacatgagaatgtcccatgcagacatcacactgcagtggaaaggacagggtttacaggtagttagactctatttcaaatctcatggccaatatttctcaggtctttaaccattaatgccttctttaacttctctgtgcctcagtttcctcatctgcagaatgagrtaataaatggttcttattcaatagagttttgtagcctagtgataatgtacatacaaagcctagcagggttcctggcacaggaatttatgaaatggtagttattgctatcattactagattatatgctagaagatagcattctgacttatttaatgttcccaagtggtttatgattgcctttccaactggctgtctgccaactgccatgggatttattcttttctcccattctgcttgtgtatgtacttatggcataatatatatgtgccaaataattaaactctttttagcttccgtatccggggcttccttgctgatactctgctacagaatagccacagttgaaaaaccattttgctggcataggaatgcaatccaggctacagtgggagttagtattcaggtgggttgcaactggcctgggttttttcccatgccctgcagaatacactgcctcactgctggcattctttcaccccctgcctgtgccactcttcataagcagtgcccagtggaacctcacaaaatgtatttgccatcttactaacacagctactgtcagtaatgtgataattaatgatgatcataaatattataagcattctatattatttcaatgtcgacctcaaattaccagcatctctttccctttttattggtgaataatcaaaatcatggaaagactagtccatgattctgcagttagtaaatggcagagctgggactcgaacactgatccagtctggctccaaaagtaaccattgaggaagccttagatccacaagaatagaagcagctggcagtagatgcgacattttgtgagagctggcacttctgccaaataacatggttatactttacttattccataaataagaaataggtaagagcaaaaacgatagtaaagcaaatcacatttgcatgacactctagtgttgccaaagtgctattctgtacataattgaattcagtcttcataacaactgcttgagatacatattattatacacttcttcaaatcttgggaagttaaatgacttacccacatcatccacctagataggatatataaggaaatatgaacaaataatgtttttactttactgctggttttttttgtagaatgggctttggaaatagatatgtgctcaaatatcagtttttctaattactgatttggaacagctttactacttctttgaacctcaatttgccaactacaaagctgaaattaaacatgtacctataagattacatataaacattatgtaaaactcatctaatatatatctgacacatagggggtacttaagaaatggtagacaaatccagctgtgcttcataatttcaatggtttcctagatggttgtttatcataataattgacaaagccttagaaaaacataaatatccaatcctcagccccagaaaatcaatttacaaggtttgctgagggcccaagaatccatgtcttaaaatacaaacaaataaaagaaaacacaaagaaaccaacccaccaacaaacaaaagaatgactcacaaatcattgattggtgagtttaagaacttgagctcaagataaagttaatttattcttattatttgaggctaatattaaaaaaaataaattgacagctgataggagcatgtcctaaatgttcaagtgacagagaattaaaataacacattttgattcactatcttcatgtagtgatcaggtatctaatgctaacttaaaatatcagactgtctaaactaatattagtctacactaag

SEQ ID NO: 701386 - DNA, 1590 bp, Homo sapiens
taacggaaagttgaataagatgttcctttgctcacttcaagctgaagacagaaaggagttaagtggcctcacactctgaaggacgctgagcatcaacagtgtcagacgcccacacaaaacccacaccacacagtccctagccccacccccaaccccccaaagactgagttagtgaagtaagaggaagtcattgagtaattgcccttctgaggaatgtaattttctgttgtaagaggtcattccttccccaccctaggagaaagggaaaaaaacaggttatatcccttctcaaagataaatgaacaaggctcaagaaaaccactttaaaaaattagaggagtgtttctcatgcaggagcaatttggctccccagatgggatgaccaacaattccagtctaggttgggactgaagagtttcccagatgatttcatttcctactttggttctaacaaattagcacaaacgtagggacttaaacaacgcagacatattatctcacagttctggaggtcagaagtctcactagattaaaatcaaggtggtgacagggtcatgttccttttggaggctctagragagaatccacttcttgccttttccaacttctagaggctgcctgtattccttggctcatggccccttccatcttcaaaggcagcaattacatcgctccaacctctgctcctgttgtcacgtttccttctctgactctgacactgctgcctccttcttacaaggatccttgtgattaccatgtgcccacccaaatcatccaggataatcttctcatctcaagatgcctaacttaatcacacccacaaagtccattctgtcatataaggtagcatattcacagacttgggggatttgcctgtggtcagctttagggagacattattctgcatcccttaccagttcatgggatttttagacttgacatcaggaaagttggtcacgctattgccacaaaatctttggcaatatctgaaaacattttagattgtcacaattgtcatctagtgcaggggtccccaaccctggggccactggagcatgagtcctattgtgaactgcacgtgagggatctagactgtgcactcttcatgagaatctaatgccttatcatttgaggtgaaagagtttcatccagaaaccatcacccccacccccttacctccccgcacccttcgccccatgtccatggaaaaattgcctttcatgaaactggtccctggcgacaaaagcatcgaggaccactgatcgagtgggtagaggccagggatgctgttaaacatcctacaagatactggacagcccctcgcagcaaagcattattcagcccaaaatgccaaggctaaactcaatattagaggtacatagaaaagtcaagaatggcatccttagatggtgaaattgatgagctcctctctgccgagctgaggtgggaaaaagaagatggagggaaatggcaggtcttagacaagggcagcagtgagaggcatgcgtttctattcttggcatggaacaaacatttcagtttcctgtgggttgagtggctctcgtgaaaacgggctgggaggaagctgcc

SEQ ID NO: 701387 - DNA, 654 bp, Homo sapiens
tggtcatcttaaccaaaccaagctatctatcagtatatcaacttttatagaatatcacatgatcgaaagaacagaaactccatagagcgtatttcatatgtcttctatgacatgcttgtgcagaatagctggctaacccaagaaatcttgccttactcattcttctattgtgtctcatctctacattctgtttgttttgtttgagagggagtctgctctgtccctcaggctggagtgcagtggtgcagtctcagctcagtgcaacctccacctcccaggttcaagcaattctcctgcctcagcctcccaagtagctgggactgttggtgcgtgccaccacgcctggctaattttttgtgtgtttagtagagacagggtttcaccgtgttagccaggatggtctcaatctcctgaccttgtgattggcccgccttgacctaccaaagtgctgggattacaggcacgagccaccgcayccggcctctacattctttattattcaaactaccttacttatccaatagttttgagttcctgctgtgtgcctgtactttgctaggtcaaaggggtggacagatatgtaagatacagttcttgtccttaagagacatatatacaaacacatgtgatataccgtgacaaatgctgtgacgg

SEQ ID NO: 701388 - DNA, 606 bp, Homo sapiens
atatttattataacgtgaatatatttagagtagtaattgttcagcagcaatgggagctgccatgtgccaggcactgttctaagtgctgtagcaagcagtccgtgctgtttctgtcttttggactgggtcaggacatcaactcacgtgggaagcacagatagcgtaattttgttagaaaatctaggatatgaccgggcacagtggctcacgcctgtaatcccagccctttgggaggccragacgggcggatcatgagataaggagatcaagaccatcctggccaacatggtgaaacttggctctactaaaaatacaaaacttagctgggtgtggtggcacgcgcctgtagtcccagctacttgggaggctgaggcaggagaatcgcttgaagtggggttgcagaagcggaggttgcagtgagccaagatcacaccactgcactccagctgagtgacagagtgagactctgtttcaaaaaaaatgaaaaaaagaaaaaaatctaagatataattaatgcataaatatgtaggattaagtaggttttaacttttttgtctgccattctgtaatttttaaatccactttaataaatggactcatacattg

SEQ ID NO: 701389 - DNA, 606 bp, Homo sapiens
atatttattataacgtgaatatatttagagtagtaattgttcagcagcaatgggagctgccatgtgccaggcactgttctaagtgctgtagcaagcagtccgtgctgtttctgtcttttggactgggtcaggacatcaactcacgtgggaagcacagatagcgtaattttgttagaaaatctaggatatgaccgggcacagtggctcacgcctgtaatcccagccctttgggaggccaagacgggcggatcatgagataaggagatcaagaccatcctggccaacatggtgaaacttggctctactaaaaatacaaaacttagctgggtgtggtggcacgcgcctgtagtcccagctacttgggaggctgaggcaggagaatcgcttgaagtggggttgcagaagcggaggttgcagtgagccaagatcacaccactgcactccagctgagtgacagagtgagactcygtttcaaaaaaaatgaaaaaaagaaaaaaatctaagatataattaatgcataaatatgtaggattaagtaggttttaacttttttgtctgccattctgtaatttttaaatccactttaataaatggactcatacattg

SEQ ID NO: 701390 - DNA, 2316 bp, Homo sapiens
cattactgggtatatacccaaaggactataaatcatgctgctataaagacacatgcacacgtatgtttattgcggcactattcacaatagcaaagacttggaaccaacccaaatgtccaacaatgatagactggattaagaaaatgtggcacatatacaccayggaatactatgcagccataaaaaaatgatgagttcatgtcctttgtagggacatggatgaaattggaaaacatcattctcagtaaactatcgcaagaacaaaaaaccaaacaccacatattctcactcataggtgggaattgaacaatgagaacacatggacacaggaaggggaatatcacactggggactgttgtggggtggggggaggggggagggatagcattgggagatatacctaatgctagatgacaagttagtgggtgcagtgcaccagcatggcacatgtatacatatgtaactaacctgcacaatgtgcacatgtaccctaaaacttaaagtataataaaaaataaaaataaaaaaaatatttgctttattaaatgtttatgtagcacttatgatgtgctaagcattgtttattccatcaggtttactgaaatataatttacatacaataaaattcacccttatcaagtgtacagcttagtgagttttggcaaatatgtataggtatgtaaccaccatcacgatcaaaatacaaaatagattcatctctccaagaagtcccctcattcccttttacaattattcccctcttcctacccccaggaatctctggtctgatttccatccctatacttttgcctttttccagaatgacacatatgtggaatcacagtatgtaatctttttgtgtctggcttctttcagttgacattgcttttgagattcacccacattgtgtatatgagtactttgttcccttttagtgttaagcagtattccattgtatggacataccacagtatgtttatccattcaccggttgatggacatttgggttgtttccagtttggggcaattgtgaataaagctgctataaacatttgtgtgtatttgtgtgtacatgtgttttcatttctcttccctaagtatcaagaagtaggattgctgaattatttgatatgtggatatttaactttataagaaacaaagtgttttcctaggtgctgtaccattctatatttccaccagcaatgaatgaaagttccagttgctctgagtcttcctcagcacttggtattgtctgtttttttaattttagccattctggttggtgtgtaatgctgttgccttgtggttttcatttgtgtttccctaataactaatgaggttaaatatcttttatgtatttttttaaatctgtgtatcttttttggtgaaatgtctgtttaaattttggggctatattttaattaggtatattctttctattgaggtgtaggagttcattcatatatatatatatgtaattttgtatgtgtgtacatatatatatattttgtagagtactattttaagtgctttacaaatattaatcttcttaaaacccctatgaagtaagcactgttattttccttattttacagaaggagaaactgcagtagaagaaggttgagtaactagcccatcactcagctagaactggccaccagcatggatcccagatagccctactccagagttgcccatgctattagccgtgacgccatgctggctgtccacacccatgcctttttcctgccttaatcttgcaatgattcataaggtgagggagcacccacactggggtggcagcatatagatgtcttctgttggagagattttcaaggaaacttgtttttttgttgttgtttttgtttttttgttttgttttgttttgtttttgagacggagtcttgctctgtcacccaggctggattacagtggcgcaatctgggctcactatagcctccgcctcccgggttcaagcgactctcgtgcctcagtcttctgagtagctgggataataggcgcctgccaccatgcccagcaactttttgtatttttgctagagacggggtttcactgtgttagccagactggtcttgaattcctgacctcaggtgatccacccggcttgacctcccaaagtgctgggattacaggtgtgagccacctcgccctgcctttggttcagtttattttgagtcttagtattcataatggccattgctataagacagaccttaccaaatgatagaagtgcatcattcgctgcactcactatttcatggcatttatatttcactcacgatgcaatcaaattga

SEQ ID NO: 701391 - DNA, 2316 bp, Homo sapiens
cattactgggtatatacccaaaggactataaatcatgctgctataaagacacatgcacacgtatgtttattgcggcactattcacaatagcaaagacttggaaccaacccaaatgtccaacaatgatagactggattaagaaaatgtggcacatatacaccatggaatactatgcagccataaaaaaatgatgagttcatgtcctttgtagggacatggatgaaattggaaaacatcattctcagtaaactatcgcaagaacaaaaaaccaaacaccacatattctcactcataggtgggaattgaacaatgagaacacatggacacaggaaggggaatatcacactggggactgttgtggggtggggggaggggggagggatagcattgggagatatacctaatgctagatgacaagttagtgggtgcagtgcaccagcatggcacatgtatacatatgtaactaacctgcacaatgtgcacatgtaccctaaaacttaaagtataataaaaaataaaaataaaaaaaatatttgctttattaaatgtttatgtagcacttatgatgtgctaagcattgtttattccatcaggtttactgaaatataatttacatacaataaaattcacccttatcaagtgtacagcttagtgagttttggcaaatatrtataggtatgtaaccaccatcacgatcaaaatacaaaatagattcatctctccaagaagtcccctcattcccttttacaattattcccctcttcctacccccaggaatctctggtctgatttccatccctatacttttgcctttttccagaatgacacatatgtggaatcacagtatgtaatctttttgtgtctggcttctttcagttgacattgcttttgagattcacccacattgtgtatatgagtactttgttcccttttagtgttaagcagtattccattgtatggacataccacagtatgtttatccattcaccggttgatggacatttgggttgtttccagtttggggcaattgtgaataaagctgctataaacatttgtgtgtatttgtgtgtacatgtgttttcatttctcttccctaagtatcaagaagtaggattgctgaattatttgatatgtggatatttaactttataagaaacaaagtgttttcctaggtgctgtaccattctatatttccaccagcaatgaatgaaagttccagttgctctgagtcttcctcagcacttggtattgtctgtttttttaattttagccattctggttggtgtgtaatgctgttgccttgtggttttcatttgtgtttccctaataactaatgaggttaaatatcttttatgtatttttttaaatctgtgtatcttttttggtgaaatgtctgtttaaattttggggctatattttaattaggtatattctttctattgaggtgtaggagttcattcatatatatatatatgtaattttgtatgtgtgtacatatatatatattttgtagagtactattttaagtgctttacaaatattaatcttcttaaaacccctatgaagtaagcactgttattttccttattttacagaaggagaaactgcagtagaagaaggttgagtaactagcccatcactcagctagaactggccaccagcatggatcccagatagccctactccagagttgcccatgctattagccgtgacgccatgctggctgtccacacccatgcctttttcctgccttaatcttgcaatgattcataaggtgagggagcacccacactggggtggcagcatatagatgtcttctgttggagagattttcaaggaaacttgtttttttgttgttgtttttgtttttttgttttgttttgttttgtttttgagacggagtcttgctctgtcacccaggctggattacagtggcgcaatctgggctcactatagcctccgcctcccgggttcaagcgactctcgtgcctcagtcttctgagtagctgggataataggcgcctgccaccatgcccagcaactttttgtatttttgctagagacggggtttcactgtgttagccagactggtcttgaattcctgacctcaggtgatccacccggcttgacctcccaaagtgctgggattacaggtgtgagccacctcgccctgcctttggttcagtttattttgagtcttagtattcataatggccattgctataagacagaccttaccaaatgatagaagtgcatcattcgctgcactcactatttcatggcatttatatttcactcacgatgcaatcaaattga

SEQ ID NO: 701392 - DNA, 1414 bp, Homo sapiens
attctgtatcttcttgatactgtagtttatattaatggtctagtctcatccctcgaagctttacttttgataagtaatgggaagtgtttggaggtcagaaaaccttgtctgtcttcataaagttgagttttaaacattcttgtctttctaggatttaataaaaaaaatcagtttgaaagggcattaatgacatgttcaaaagacatcttttttctatgtgtgtagcttcaaaagtgactcagtaggccgggcatggtggctcacgcttgtaatcccaaagctttgggaggccgaggtagaaggattgcttgaggacaggagtttgagatcagcctggacatggtgagactcagtctctagaaaaaatttaaaaattagccaggtaaggtggcacatacccattgtcctaactacttgagaggctgaggtgggaggatagcttgagcccaagggttcgaggcttcagtgagctctaaatgcaccatcgcactccagtccaggcaacagaataagaccttgtctttaaaaaaaaaaaaaagactcagcagtaagcagtagtattttgcttaattctaagtgccaaggttttgtactctaatataactctacaccaaaggaatcaggattctagtagaaggtaactgatggcctgtctgtgtcctgggagttaagaaagatcaggatggtcctagaatatcctgctgttggccccaaacaatggaaggtttcaaaaatttggcaccaaaagaactgcttggccaaactgtaacaattggcaacaatttatcataatctgagcatcaaaatggaatacttgtattgttaagaataagtttagtctaaaaagacatgcgaatataatgatacctgaaaaagaaatgtttatagaaagtgtaaaaagatagtatttaaataaattgcagtagtgaggagagtgtggatatgtctgtttctaagtctatgtaagacgcattctccatgtgtaagtggtaaagaataaacatggaagcgtgagcaagtgagagatgaccaggaaaagcaaggaggacctatcagtgttgtcagtcacacaaagccccagagtagaacgatgcccaagagtgctgcacaatgatggaccaggtgagtctcccagagagaccagctgtccagactgcatccgtgacttctgggggatgagatctctagttgtcctaattaatcaaaatgcatcctaatcttgggtgatgggtgcaccaaaatctcacaaatcatcactaaagaacttagtcrtgtaaccaaatacactacctgtcccccaataatctatgaaaaaaaaagcatcctaataaaacaagcatatgtttcctcctgtccctctttctcctcttccttttcctccttctctttcttcttctacttaatctctgctcct

SEQ ID NO: 701393 - DNA, 648 bp, Homo sapiens
atcacaataaatacaaatggattaaacacttcagttgaaagatagagatggtcagattggattttagttatatttataagtggcatacctaaagactcaaggtaaagacatggaaaaaagtaagttaggcaaaawcaaactaaattaacattggagtggctagattattatcatataaagcatattttatgagaaaagacattattaggaatacagagaattactacataataataaaataaagatttaaatattttagaataatgtgcttttaataatatagcctcaaaatatgtaaagcaaaaaaaaaaaaagaaagaaatgtgaacaaatccctcattatactaagagattataacaaacagacaattatatgcatgtgtgcacatgtatgtgtgtataacaacacaagttggatataatacgaaatagaaaaattatatttttctcaagaaaacaaattgaaaacatattataccataaagcaaatttcaataaatttcaaataataagtatcggcattctctcaagtgagtgcaagaaagttagaaatcaagaacaaaatgctatatatatgtgtgtatatatatgtatacatacatatcatatatatgtatacatacatatatatgtatgtatgtatacata

SEQ ID NO: 701394 - DNA, 650 bp, Homo sapiens
tcaaaaaaaaaaaaggcaaaaaaaaaaaactagtctcctccagctctgctgaagccctgccacaggagtcacattccaagtaaccggaaagaaaatacagaatgaatgtaatccatcatttgtggataccctaaccctcgccttatagtaactctagttactagagcaactaggaagctctcctgaaatcgtagttcattttctggtgattaggttactttcagaaattagaggtttcatttatactaagaaacttaatatgaaactactattcccacctaatgagcaagaaatgctttcacttattaatatatcttgccagggcgaggcacagtggcttaggcctgtaatcccagcatcctgggaggtcgaggcagagggatcacttgagctcaggagttcaagaccaacccaggcaacatggcaaaaacccatctctacaaaaaattagccaggcatggtggcacacacctgtagtcccagctactcgggaggctgaggtgggagaatcatctgagcccaggaagtcaaggctgcagtgagccatgattgtgccactgcactccagcctgggtaatggagtgagaccctgtctcaaaaaaatagagagagagagasagacagacagacagacagacagacagagatag

SEQ ID NO: 701395 - DNA, 1822 bp, Homo sapiens
  misc_feature 1659: n = A,T,C or G
gaaaaagatgactatgagggcaggaagatctcaggtggtagagaacttttttcaaagggctcaggaaggagcaaggaagatgcagaaatggtaatagcattagttaacagcaaaagaatacaaagagctggagaaagatgtctggctctgttccactgaattaccagctcagtcatcagaacaattaagtattctcatcagagacgacctgcttatgataaattagttgcaatggctggaggaaaacatactaatagtccacaaggaagtgacaaatagctttctcggcacttctcgaaacaaatgaaaaacaagtctgacaggtgtctgagaagatatgaaactatcagtgatgaggtttcgctccaggaagaataaagttgttaagtcccaatcgtgataaacatccaaaacattcaggctatggctttggaatgttgaggggaaaataactttctgcacattcatgaggaatcatctcccactaattaagcactattttcagactcttatttttctctcttcacaatgtgcttgacccaatgtgttctgaatagccaggtggctgggttcctaggagagcaccgtgataatcctgcccacttcttggcaggggcactgcctaccttacccagggcatatttgatcctttcctttctgtttcctttgtttcagctgtgttttgcatagagaagagcaatgttggagaaaaggcaggagccacaagagagagctggggctttgcaaaaaawttttttttttttgagacagggtctccttctttgcccaggctggaacacagtggtgcgatcttggctcactgcagcctggacctcctgggctcaactgatcctcccacctcagcctcctaagcagctgggatcacaggagtaagccaccatgcctggctaattttagttttgttttttttttttttttttttgaagagatggggtttcaccatgttgcccaggctggtctcaaactcctgagctcaaattatctaacttctcaaagtgcggggattacaggtgtcagccaccgtgcctggcctggctttgcaatttgctggattaaaaaatgactctaaagggaaactacatgtcttactcaaatatttcttctttcctctggcaattattaattaaaatgagtatttttaggggccagaagagtgtaatggcgttgagaagatatccactagacggttggtgtggatgggccaaattatttgtatgttcaggaaagtgaacttccctcgcccctgtcttcaaagtggatatctcacacacatttttatcacgattatgggacaacttgtatgaaaggtccccccactcccagactgaaacgagcagaaagatgaggttgcttaaaagcctgaccattcctcattgttccattttaatatgaaccccaggtgtctgtgcaggatgacgctcctggggcacaatttttttacagtgattttaactcccctgcgatctctctggcagcactgacccctgcaggggaaggacggcctgattctttgctgggtggaggggacactctgcttcccactcttagagtccggagtagatgagacactccttccacgaagccgtccacactcgcctgtctcattccagtgaggtctggcgtgcatgcgctttgttnccttttactgaggcatctcaattaagctcagcaaggaaaaattcaaccacccgaaagcataaatgaggcacctccagaatccacggacatacaaatcgagtgttgtagctgaaagctccacttctgcagtatttcaatctggttgtgcggtagaggcgagtag

SEQ ID NO: 701396 - DNA, 957 bp, Homo sapiens
tttaaaatgtttataattgatttaaatatgtcttaaaatacaacaacattgttatgtgtttaaaacatatggctaaagtggctttgcactctacttacctaacctaaagcctctgccccatcctcactgctgtttcttgcccattctctgatagatcagctgactagctcagtatgcagcccacaaaccaagggtttagcatagagactcgggatcttatcttaacctcagaactgctactaatcactcaagtcattccaaacaaggtttataaccacgaatgaagacgctttggagtcaggtacagagctactcaccctcaaagatggggcagatcttcctccaggctgtgacgcctccctggctagtgtactggcctagtgctgtctccagaaggaagacaggaatgccacaggtaaagaggaagacgaggtaggggatgaagaaggcacctgtggttagaaaacaggctgttcatttcctgggactattctcctcatggtctgcattcacctcctcccattaccaacccatactgccagtcagaatctcggaggcagagaacatgcaaaactgcaggagacagctgtctagatgtttggaacatagcagagatcaagagtcaccccattatctaagatctacacagcctcttgccttttttcactgcagtttcagtctatacctattaaagtttgttccccactgaacaattactgcttaacayataacttgtggcaataacaaggagcttattaaataatggatgtctaggagcattggcacagcccacagtctataattcttttcaaagaaagcattgctcttaatgtcaggtagtcttttagtaagctgaaatcagatgccctttcagtcattgttatggtttgaatgtatcccctaaagttcgtggttggaaacttaattccctatgcaacagtgttgggacgtggagcc

SEQ ID NO: 701397 - DNA, 641 bp, Homo sapiens
ctcctcttcatgtgaaaagaataagtttactttgtcttaagtccagtacaaaggagttaccatgtcataattactcttgaaatgaaagtgctccgtaaacacaaattgcccctcttcttggtacctacagatgatgatacagtattgcgggtaagagcctgaaatggagcactagtctgtccagttcaaatcctgttttccatacttactggctgtgtgatgttggacaaattacttgatttttctatctgccttagtttcctaatctgttgtwggacagagtgataataggacatacttcttagaactgttgtgtgagttttaaatgaattcattatgaaaaatattaccacagggccaggcacatggtaaatatatgtattagtatttggttttgatggtagttgtttgtattcttttttagcttacctgttcctgtcattcccccatccttttctttcctttgatttataagaccttctttgctttcaacattttgaccctttcatgttggaaatagttcatatgtatcatctgccttttgtttatgttctattttattatacaggaattttaaaactttgttctaagttttataactatttacctttaatggcttctagattttggtgtcacacttg

SEQ ID NO: 701398 - DNA, 813 bp, Homo sapiens
tttgtgaacttggtagtttcgtgaagggcggtttatgcacttacactagaagtttcttactggaaaagtttgagaaatatatttttaaaccttacagttaaatagaagggctagaacaaatatatgactgtattagaagtttggaaaaagttaagaaatgtaaataaaatgatactgtttcygggaaataatattcctagttgttgctagagacaggtacagacttgggccacttcgtgaccttttatgtaaaaataagaaataactgcttttgttttttaaaaaactttgtagactgtaagtttattcccgttttttgctcggaagtaattttataaaggaatttatttttggcgtttccccacagttattcagaggctgctctgctgagaagatgaacaaatttcttgtccaaaacaatgtatttcaaacgtgccgctcgggcctttcccgtattgctcactggtaggtcagtagatcactggagaaaatgatctgaagctcaggagtgagaattaataccagcaaccttgttgctgaatctagggatagtttcactcctatccctgaccattttccctttctgaaacactgttcttttggcttctattacatttttcttctgatttttccacctgcttctctggcttctttttaaggctccctcctccttccccctttgtccatctttagctacacacctgtgtaatttctattttgatgtcctacaacttaaaacttaacatgtctgaaacttcgtctgttaccatccccccaaatcctgcttctgtgatcccaaccatttgtaatact

SEQ ID NO: 701399 - DNA, 813 bp, Homo sapiens
tttgtgaacttggtagtttcgtgaagggcggtttatgcacttacactagaagtttcttactggaaaagtttgagaaatatatttttaaaccttacagttaaatagaagggctagaacaaatatatgactgtattagaagtttggaaaaagttaagaaatgtaaataaaatgatactgtttccgggaaataatattccwagttgttgctagagacaggtacagacttgggccacttcgtgaccttttatgtaaaaataagaaataactgcttttgttttttaaaaaactttgtagactgtaagtttattcccgttttttgctcggaagtaattttataaaggaatttatttttggcgtttccccacagttattcagaggctgctctgctgagaagatgaacaaatttcttgtccaaaacaatgtatttcaaacgtgccgctcgggcctttcccgtattgctcactggtaggtcagtagatcactggagaaaatgatctgaagctcaggagtgagaattaataccagcaaccttgttgctgaatctagggatagtttcactcctatccctgaccattttccctttctgaaacactgttcttttggcttctattacatttttcttctgatttttccacctgcttctctggcttctttttaaggctccctcctccttccccctttgtccatctttagctacacacctgtgtaatttctattttgatgtcctacaacttaaaacttaacatgtctgaaacttcgtctgttaccatccccccaaatcctgcttctgtgatcccaaccatttgtaatact

SEQ ID NO: 701400 - DNA, 813 bp, Homo sapiens
tttgtgaacttggtagtttcgtgaagggcggtttatgcacttacactagaagtttcttactggaaaagtttgagaaatatatttttaaaccttacagttaaatagaagggctagaacaaatatatgactgtattagaagtttggaaaaagttaagaaatgtaaataaaatgatactgtttccgggaaataatattcctagttgttgctagagacaggtacagacttgggccacttcgtgaccttttatgtaaaaataagaaataactgcttttgttttttaaaaaactttgtagactgtaagtttattcccgttttttgctcggaagtaattttataaaggaatttatttttggcgtttccccacagttattcagaggctgctctgctgagaagatgaacaaatttcttgtccaaaacaatgtatttcaaacgtgccgctcgggcctttcccgtattgctcactggtaggtcagtagatcactggagaaaatgatctgaagctcaggagtgagaattaataccagcaaccttgttgctgaatctagggatagtttcactcctatccctgaccattttccctttytgaaacactgttcttttggcttctattacatttttcttctgatttttccacctgcttctctggcttctttttaaggctccctcctccttccccctttgtccatctttagctacacacctgtgtaatttctattttgatgtcctacaacttaaaacttaacatgtctgaaacttcgtctgttaccatccccccaaatcctgcttctgtgatcccaaccatttgtaatact

SEQ ID NO: 701401 - DNA, 883 bp, Homo sapiens
tgacttctaaatttacttctggaacacagtctgcttcctgtatagaaatggaatagaatggagtgtatggaacggaatggagagggatgggctaggattggtgaggctaggataggataatataggataggaaatgactccagtacttgcatcaaaagtgaactgttagggttcctcaaggagcagcagtacaagaaatagattttataaaccaccacttttaggtagcactaatatctgaagcatgttgctaagttcttagtgccttgagcacaacaggcccttaatgtaaagttgttgtcatagacaatcaataggcactataaaaggcagtgcagagtcccctgagtaccagcgtatatcctatctacagttcctttgcctgggaacactaatggaagtcagagagtgaagaagcaatgttcaagcaaatggagcagagttttaaagaaggcagtccagaaatgtctgatctagaagggtctctgccattgcccctttccctctccgctggatygtgtctgggtggtcttttccatttgcctcctctgtactaagaatctatagcttcatcccaaacttccttcctgctcccacatttatggttatcagcaccctccctgggctcccttgttagggcagcagcgtaactggcattgctttgccatcctgatccctccctcctctgttcatcccattttcaatctgacaccgtgttctgatgacttcacctccttcgaatctcttaaaccccaaacgattgcctcctgaggtacttagccatgtaacagcaggtcctggcttctatccttcgaagtcgctttcctttggtatatttaagggaaggtgtttcttttcatatcactttggagtcagtcaacct

SEQ ID NO: 701402 - DNA, 2030 bp, Homo sapiens
tggtaaaagtctttggcagctgaaaatctggcctgttctcacagaatcctggactgaaaacttaaaagtctaatttacgagggagacttttgagaacattttttaatctttccagagtacttccaacttccattaattctgctgccaaacaaaaaggaaggtagaaatacttaaaaaaaatagagaaaatgcataaagcagaaaatctaggttttaaaaagcatcaaataatatagaactatataactggatggtgtttccttctcctaaagtccattaatagtatgaattaaaccaggtatgatagaagctctggaggaccaagaatggaaaattaagtggaatccaagtttcatacacaggcaaactgataaagggcaattggggcaagatacctactacccaataaatttagtaatttttagtcatttaaaatagcattaaartagaaaatgtagattagtttctgaggaggaaagaaattaggatgagacaaataatatatggagtgataaaatttaataaggttttcattctgtactcaatttttattcttgtttgtattctaacaaatgtactttctatatttatatatttatctgtctacattcagagcctgaatatatttacttattgaccagtagaatgcatacacttaaaactttaataattttgaaacaagtcaaattacataactgtaacatacagcagatcaccaattcacaatcatctctaccttggttcatctttacacaagtacttgaattccctttaatgtctctttagaagttcataaactatatctagatctctgctacaattttcacaattaattgaagttataccagatagtaacttaatacagtatattctcccaattttctagagtagctagtctccatgaccatttcaaaatagctattcataattcacaaaatgcctttattctttggcccttcaactaactgatttgtacacagataataaatccaacaggtaatattgtaaagtaatattgtaagaagaaagttttaagacgattaagtagttgctgtccactggaaataaaagtagacttataaggtcttattttttaaatgaaactttatgtaaccttcaggttgtattttttaaataaccttaaatgctgacaccaacattgagaggcagtgtaaaattcatggttcaatacaaatcatcctgcattaacagttgagatctaagttctggcttggctcaggtgcctgctatccctatgaccctgtgtcttagcccatttgtgttgttaaggaatacctgaggctgggtaatttactgaaaaaaaaacaaaacaaacaaaaaaaaaaaacaaagaagaagtttatttggcttacagttctgcaggctgtactagaagcatggtgccagcctctgcttggcttctggtgagagcctcagaccactcatggcagaaagcaaaggggagctggtgtgtgcagagatcacacagcaagagagaggaagcaaagaagaaagggagggaggataccaggctcttttaaacaatcagcttccaggggaggaaaaatagagcaagaactcattactgcaaggacaacgccaagacattcatgagggatccgctccatgctcaaaacacctccagcaatggggatcaaatttcaacatgagatttgcaggggtcaaacaaaccacatatagcaccatttctaagtcatttaggattttcggaaactcagcatactatattttatgaaaatcatcatataatcagaatatctttcccctgacacacgcacatccacaccccaagctatacctcttctgatacaactatgttctccataacaatagtgactgtgggtctaatggctaaaatgagttttgttgagaaataacaccttcagaataaaagggcttatctaacaagaaagagcaaaattttcaaactggggttccaaagggaacgattccaattcaattaaaacagtattttttatttaatgccccccaatgtctatgtgagtggg

SEQ ID NO: 701403 - DNA, 616 bp, Homo sapiens
aaacaattacctgaatgacctaattccatctgtaagaaaaattttaaaatcgactctggcatctataatgtcaagaaaacaatataccacaatgccataaaacaaaaaatgatccatgcaatttctttccccactcctgccatcaccccaccccaacctcaatattcttgagatattattattattttgttttaccaaatagtaacaattggcttccagttgtttgggcaaagtctcaactcagctagaaaactgaaactcataaaacagtgtaattatataatgaatatcactgccccacctataaactacacacatgcaaaaacatgtaaagaatatcatgtttaggtttttactctagttcttgaaaaaataatttcttaagaaaattaaataatagtctagcaaaacaacttcatatatttttgccttgctaacacatcagtaccctctatctatgtaagctacaaacttacccaaaggaactgtgttaaattaaaattgacaatatgtctttaactcacaagttttaaacaaggcactttttacgagattttcctgccttaaggaaaatggytaactcatatttaagaaacaaaggtataaatttcacccc

SEQ ID NO: 701404 - DNA, 640 bp, Homo sapiens
tcaagtgtagaaatatgttgagccagggtgatgcatttgtaatggtatgtccaatgggtcccgaagccctgagctgacagcaacttcaggcaggctagtccttattatagttacctcccccagctctgcaagctagaacacgatcaagggaaacttctttttgcctgaggattcctggctggctctaagcttgaatcacaacaggtggatggccatgagcaacrtctcatctgcagacttttaagggggcctcagtgtttggggtggagcatcattagcccagaaccacctgttctataagacattatccctcacatgcctacaagaacctgccaccagccctatttcaaacacagagaaatgaagccatggcatgtgaaaggcatttctcctaaggctggaaggtggatgcatgttaaaaccaaggagagagagcaagtgtcaacagacagatgtatgccaagtcttttgggattctctttttttttctctctctgacagagtcacagatgaatagaatgggactttggcctgaaaaagggagcctcaagaggatcatgtaagtttcgtcaaactatagacgaaaacacccagtatcattccttctcaattccttgtgaaacttgtgttagtgagaaca

SEQ ID NO: 701405 - DNA, 543 bp, Homo sapiens
actcacaggatgctgtgaggactaaacaaggcaatcttgcaaagccctcaagtcagcaggtgacacacagtgagcctcctataggtgatgatgatgatgattcccattgcacagacgggcaacctaaggctcagagggcttaagtaacacccaggtctgtgctcgcctctctgtcacgaaggtggaaaagtgcctcttaggctctcattagatctggacacaccttttaaccagtattctgagttggcrtagggccgatcgtgcatgctgggggcgaagcccattcttggtctggttcttctgaggctccagccagaatatgtctcatttagtggctcagtgaaggggttggaagtcagaggctctggatgaaagctagctgccttcctcaggactggtaccggggccacgtgtcatgagattgtgtgtgatataagatgtgcgaaggttctgttaggatctgtccaaataccaggcacagttaggattttttcttattaatgcacatgagattgtaagaccacactttcttttaaatcacag

SEQ ID NO: 701406 - DNA, 543 bp, Homo sapiens
actcacaggatgctgtgaggactaaacaaggcaatcttgcaaagccctcaagtcagcaggtgacacacagtgagcctcctataggtgatgatgatgatgattcccattgcacagacgggcaacctaaggctcagagggcttaagtaacacccaggtctgtgctcgcctctctgtcacgaaggtggaaaagtgcctcttaggctctcattagatctggacacaccttttaaccagtattctgagttggcgtagggccgatcgtgcatgctggkggcgaagcccattcttggtctggttcttctgaggctccagccagaatatgtctcatttagtggctcagtgaaggggttggaagtcagaggctctggatgaaagctagctgccttcctcaggactggtaccggggccacgtgtcatgagattgtgtgtgatataagatgtgcgaaggttctgttaggatctgtccaaataccaggcacagttaggattttttcttattaatgcacatgagattgtaagaccacactttcttttaaatcacag

SEQ ID NO: 701407 - DNA, 666 bp, Homo sapiens
tttaagaagagacctttcctcaggaactttgcctrtgttatatatgcctgagctaagttttatggccacctctggctaaatggaggcttggaaacatagttttttagctttcttccctctacaggtggaggacagcaaaggagaagggacatgtgaatagcttttaggactagaatatgtctaccacagtcatgtggaatttgagatgctctctgtcatccaagtagagatgtcaggagacagatatattggctcagggctactctttttcttgagggggagggggtaatttggcagtaattttaaagcatgacaactaagacatacatctcaagtcttctctatttcctcaaacaagaggaaagcagaaacactctagccaaaataatgactccttaactgctgggttattgaaggcgggtgaccaaagggactttaaaataaggacacaaaaactctgtgtaggttgtgcttgaaagtggcagggaatgggcttcctgaccttgcaatgacccagccagcctctctgatggtacgtgaacctgtagcatcagctcttaataatgtgaccactctggagcacatcataaactttaatgcaccaattataatgatggtaataacttttttgcttcatgggctgaatcccattcctccccgtccatt

SEQ ID NO: 701408 - DNA, 666 bp, Homo sapiens
tttaagaagagacctttcctcaggaactttgcctatgttatatatgcctgagctaagttttatggccacctctggctaaatggaggcttggaaacatagttttttagctttcttccctctacaggtggaggacagcaaaggagaagggacatgtgaatagcttttaggactagaatatgtctaccacagtcatgtggaatttgagatgctctctgtcatccaagtagagatgtcaggagacagatatattggctcagggctactctttttcttgaggggragggggtaatttggcagtaattttaaagcatgacaactaagacatacatctcaagtcttctctatttcctcaaacaagaggaaagcagaaacactctagccaaaataatgactccttaactgctgggttattgaaggcgggtgaccaaagggactttaaaataaggacacaaaaactctgtgtaggttgtgcttgaaagtggcagggaatgggcttcctgaccttgcaatgacccagccagcctctctgatggtacgtgaacctgtagcatcagctcttaataatgtgaccactctggagcacatcataaactttaatgcaccaattataatgatggtaataacttttttgcttcatgggctgaatcccattcctccccgtccatt

SEQ ID NO: 701409 - DNA, 666 bp, Homo sapiens
tttaagaagagacctttcctcaggaactttgcctatgttatatatgcctgagctaagttttatggccacctctggctaaatggaggcttggaaacatagttttttagctttcttccctctacaggtggaggacagcaaaggagaagggacatgtgaatagcttttaggactagaatatgtctaccacagtcatgtggaatttgagatgctctctgtcatccaagtagagatgtcaggagacagatatattggctcagggctactctttttcttgagggggarggggtaatttggcagtaattttaaagcatgacaactaagacatacatctcaagtcttctctatttcctcaaacaagaggaaagcagaaacactctagccaaaataatgactccttaactgctgggttattgaaggcgggtgaccaaagggactttaaaataaggacacaaaaactctgtgtaggttgtgcttgaaagtggcagggaatgggcttcctgaccttgcaatgacccagccagcctctctgatggtacgtgaacctgtagcatcagctcttaataatgtgaccactctggagcacatcataaactttaatgcaccaattataatgatggtaataacttttttgcttcatgggctgaatcccattcctccccgtccatt

SEQ ID NO: 701410 - DNA, 472 bp, Homo sapiens
tgccaccatgcctagctaattttttgaagagatggactgtgttacccaggctggtctcaaactcctgccttcaagcaatactcttgccttggtatcccaaattcctgggattacaggagtgagccactgtgcccaacctgaacaaatcttcttttaaaggaaagagatacttttcatagataaggtcacactctttttttttttttttgagatggagtctcgctctgtcgccctggctgtwgtgcagtggcgcgatctcggctcgctgcaagctccgcctcccaggttcacaccactctcctgcctcccgagtagctgggactacaggcgcccaccaccacgcccagctaattgtttgtatttttagtagagacggggtttcaccgtgttatccaggatggtctcgatctcgtgacctcgtgaaccgcccacctcggccccccaggtggctcacgcctgtaatctcctcggc

SEQ ID NO: 701411 - DNA, 1447 bp, Homo sapiens
ttttcaagttgcagttttactcaaggctgtttttttgtttgtttgtttgtttgttcgtttgtttgtttgagacggagtcttgctctgtcacccaggctggagtgcagtgtcacgatttcggctcactgcaatctccgcctcctgggctcaaggattctcctgtcaaggttgttttgctacgtaataatttaatatcttcccttttatgacctataatacttcctttaataaatatgaatagatttggttctgcgacaacacagaaatcttgtgctcaaaaagagaacacacttgaagaaattctaatttgatggtgtttattattctctaygttaaaaaataatgaaaagaagaaatataggattgatttccaagagatacattttattaaaaaataaaatacatatatcataaaattcccaaaacttactaattgttactgattgtaacaattaattacaatcacaattgtcaaatggggaacagaccttgaatattaaagtagattttatactttaaaattcttgctctttgtcttctaaaggtagaaaaaaacactttattatttttgttcaagactctatattttttcaagtctctctctctctctctctcacacacacacacacacacacacacacaaacacaaaatgcatttgtggaatatcactaaatgtctctatggaggaatttatttaaatttaatttaattttattttttgaggcaaggtctcactttgacacccaggctggagtgcagtggcctgatcttggctcactgcagcctcaacctctggggctcaggtgattctcccacctcagcctcctgagtagctgggactacagtcatgcgccactatgcctggctaatttattagtgtttttgtagagatggggtctcgctatattgcccaggctggtctcgaactcctggcatccagccatcctgcctcagcctcccaaagtgctgggattacaagcatgagccaccacacccagccctatgcaggaatttaaataaaatattctgactctccaaatcagggtaattgtaggtgaaggttacaatatggaaatgatgaagctcccatttgagtcctcttgttaccttgcgtttattgtgacttagcatttagttctaaaagggccggtagcttggattttagagtagggatattatcattatctctaaaatgaacaacccacatcaccatcatcagtcagtaacttacgagacagattttcccagtggctaatctattaccttggagatctaaatgtggaaatcaagatgatctgccaattctaaactccaagccatttgcatcatttgtagaatgaataggagcttgatttcagagctttgaaggggggaagtatttaaaatttttcattattagcatggcattattgatgatgcaataaaagggatagctgtaaggcatgc

SEQ ID NO: 701412 - DNA, 1669 bp, Homo sapiens
gattacacttataagtagatcatatagtatttgcctttctgtgtctggcttattttacttattttcctttgggttcatccataaatagtagtcttttcataaatagtagtctttccttctttttatggttgtatagtatgccattgtatacatgagtatatgtatatatacacaatggaatattayatgtagaatatatattatttatatgttttcataatggctgtatcaatttacatttccaccaagagtatataagggttgacttttctccacaccctcaccaacacttggtatctcctgtcttttttatgatagccatcctaacatgtgtgaggtgatatttcactgtggttttgactagcatttctctgatgattcatgatttcttctaggagttttgcagtttcagatcttacagttaagtctttaatgcattttgagttagtttttgtatgtggtgtagagcaagagtccaatttcattcttttgcatgtggatatccagttttcccaacatcatttaatgaggagacatttctttccccactgtatattcttggtaccattgtcaaaaactagttgaccatatatacatggattcatttctatggtctcttttccattccatttgtctatgtgtctgtttttatgccagtaccatactgttttgattactgtcgttttgtaatatagttttaaatcaagaaataggatgcctccagctttattcttctttctcaatgttgctttgtctaattagggtcttttgagattacacacatattttaggacattttttctatttctgtgaaaaatgccattagaatttttataaggattgcattgattctgtagattgtttaggttatatgacattttaacaatattaattcttccaatccatgaacatgggatacatttccatatatttgtgtcatcttctatttcttttatcaatgtctcatagttttcagtgtacagatcttttatctccttgattaaatttatccctaagtattttattctttttatgctgttgtaaatgggatggttttcttaatttctttttcagaatagtttatttttagtgtatacaaatgcatctaagttttaactagcttctctacagcccttccttacaacagacttagatagaggtaaagagtcaaggatcctgaaaaggaggagaaacagagggatggagcccgtgctagtcactgccctgtccagactactgaaaagtgaggctggtgtgaattcgcctagactggtccctactacccttactcaagtcttctataagacatattcagggaattcaaagtttgcatagatattagtccaagtccacataatgagaaaggtaaagatgatgccaaacatactgacaatgcatttgaaacccaagtgtgattcatatccctctatcttgagttaataatattccttccacatcagaagataggtttgagtctttctaagtgtctataaacatacgttttctctcaaagccatgctcaaaataccgtttagaaacacatgctttcatcactgctccttccagcatcttctttattttttgttaaatacttctgcttagtgaatcacttccttttggcaatgcctattcatgctaatatgcaaaggggtcatggggcaggtctggg

SEQ ID NO: 701413 - DNA, 1076 bp, Homo sapiens
ttttattgtattaatttattttatattcttacatttcacaaagaaaacattcaaagtggccctggaacatagatccaaattttcattaaaatttctttgataacagttctctcatttaatattcagagaagagtataccattgggttgctgtagtgctagaatttattgttctacaagctagaaactacctgtgtctcagaggcctcaacgtcatgtcacagatgattaagattctgtttatggagatacataattcaacaatgttttcagttcattagtatatcatggtattgaaaaggccagagaaagaagggagaataagatgtaaaaacttagagactttaataggagataacatatgtaacagtcaatgtcctgacagaaaacagytggcacacccaaagggttcaatacagagttgttaatgaagggaatacatacaaagtgatgaaaggattaagggaacccgcaaggcttagtgaagcactcatcaattgtccatacaaaactgttaatatagtcaaattattaaatatttttcatctgtaaaaaaggtatggcagattttaccacgtagaaaggaagtttagagctatcaaatcaaaatattattttaaagtatactgttaaagtatttccaaagacatagcattctaaatcaattttaattactataacatcatttttcatgattaactgaaatctcttgatataaattccatctttgttcctaggtttactcttttgctctttttttttccttttcttttttttctgagacaaggtctcactgtcacccaagctgtagtgcagtggtacaatcagggctcactacagccttggcctccaggctcaagagatcctcccgcctcagcttcccaacactaagttaatgtttctatttggattgtcattttgatggtattttacttcaaaatatggttgttggtattaaagtaccacaggcacacaccaacatgcccagctaatttttaattttttgtagagatgggtctccctatgttgcccaagctgctctctaactactgggcccaagtgatctgcctgccttggc

SEQ ID NO: 701414 - DNA, 1864 bp, Homo sapiens
cattccctgtaacagaactttcacaggataaagacatgttcaggtacactgtctaaaatcttacaagtaataactactgatggcctattatacagcaggcaccctgttagttagaggtattatttttaatctttataaccattctataaaattgacattaattcaattttatagtggcagaatctaatgggtaggaggttttataacttgctaagtctattcagtaattgagaggtaaagttgaactttggactcattttagagttgaccacaaactcagatgtcccttctaatgctaaaatgtagaattctatcaataagataagtccagaaaagcagcaacaacaaccaagcaagttacaaacaacaacaacgacaaaagcaacatcatatgataaatatacacagtatgctataagggcacaaaagaaaaggaatgtaattctggttggaggcatatagaaaggtgtcttgaaaatacacttttaagaagttccttggaaaatatgctggtagcaattagaggaggataggagaattcaaaggtagaatcaattatggtctgaaataaaagggaagaagtgatctgaaatgaaggggaagaaaatgttgatgaagagaacacagtcttgtttttaaagcatgatagcagtcatcttattctcagtttatctttaataaaatcgtttaagcaaaaaatcatgattttattcactggtataaatatattgtagcgtacattaaattaaaggtaaaatactcagtttaggtccataacattttccctttgaaaatataaccctcttttgaaaaccatcaccttccgctagtttctttctaagaacttacatactcctacagcttatttggtattgttctaagccagtatcacataaggcacacaatttgctaaaagaaagaatgcagaaagggaactaaaatgattaattatctaatgcatggagaaagatctgcacattgcctcctgctctggtcatggaagacgtgtctgggtctcctttgccttctgccatgattaaacctatgtacaggagcaggactctgaagacacgctgtggcccagacagtggctgatgagcagatggagtctgcacccaygcaatttggtcaaagaagcccccatactctccatgaaaaagattttcagaagctattgtgtcaattaaaaaaaagaaacaaaccataaaaccaccgacactgaagatcatttctgagtctgatttgaaagctggaatcaaattctgcagaggcattgaagtggccagatgctaccctaatagccaaacctgcaggtcccctccatcatgccaaggaaaatgttccattcaccatcttcaccattcctcagcttctggctctggtttcagagttctctctgtattggaggagttttaaagctagagggaactttacccacttcctcttatgtacagatctgaatatggaggtcaagagggaaagtggcacgtcctaagtcagagtagagtcaacaaaaaaataagataaacaatgacccagtccctggtgtgtagtgagcattagctagatacaagggatatggagatgaagaaaacagagtcctttcttcaggcagctcaatctagcaaggtagacagactttttgcaagtaggaccaggcttccctgcagcagaaggaaacatgaaatcacggtcatgagcctcacctgggatgggccaccatgttgccttgagaggatcatgtgtggactcaggaccatggcgtggccctgctttgactctctagctctgctttagggcctggtaggatctggagtggcttgagctaggggctgccatgagctctttccacttccccaaggca

SEQ ID NO: 701415 - DNA, 1864 bp, Homo sapiens
cattccctgtaacagaactttcacaggataaagacatgttcaggtacactgtctaaaatcttacaagtaataactactgatggcctattatacagcaggcaccctgttagttagaggtattatttttaatctttataaccattctataaaattgacattaattcaattttatagtggcagaatctaatgggtaggaggttttataacttgctaagtctattcagtaattgagaggtaaagttgaactttggactcattttagagttgaccacaaactcagatgtcccttctaatgctaaaatgtagaattctatcaataagataagtccagaaaagcagcaacaacaaccaagcaagttacaaacaacaacaacgacaaaagcaacatcatatgataaatatacacagtatgctataagggcacaaaagaaaaggaatgtaattctggttggaggcatatagaaaggtgtcttgaaaatacacttttaagaagttccttggaaaatatgctggtagcaattagaggaggataggagaattcaaaggtagaatcaattatggtctgaaataaaagggaagaagtgatctgaaatgaaggggaagaaaatgttgatgaagagaacacagtcttgtttttaaagcatgatagcagtcatcttattctcagtttatctttaataaaatcgtttaagcaaaaaatcatgattttattcactggtataaatatattgtagcgtacattaaattaaaggtaaaatactcagtttaggtccataacattttccctttgaaaatataaccctcttttgaaaaccatcaccttccgctagtttctttctaagaacttacatactcctacagcttatttggtattgttctaagccagtatcacataaggcacacaatttgctaaaagaaagaatgcagaaagggaactaaaatgattaattatctaatgcatggagaaagatctgcacattgcctcctgctctggtcatggaagacgtgtctgggtctcctttgccttctgccatgattaaacctatgtacaggagcaggactctgaagacacgctgtggcccagacagtggctgatgagcagatggagtctgcacccatgcaatttggtcaaagaagcccccatactctccatgaaaaagattttcagaagctattgtgtcaattaaaaaaaagaaacaaaccataaaaccaccgacactgaagatcatttctgagtctgatttgaaagctggaatcaaattctgcagaggcattgaagtggccagatgctaccctaatagccaaacctgcaggtcccctccatcatgccaaggaaaatgttccattcaccatcttcaccattcctcagcttctggctctggtttcagagttctctctgtattggaggagttttaaagctagagggaactttacccacttcctcttatgtacagatctgaatatggaggtcaagagggaaagtggcacgtcctaagtcagagtagagtcaacaaaaaaataagataaacaatgacccagtccctggwgtgtagtgagcattagctagatacaagggatatggagatgaagaaaacagagtcctttcttcaggcagctcaatctagcaaggtagacagactttttgcaagtaggaccaggcttccctgcagcagaaggaaacatgaaatcacggtcatgagcctcacctgggatgggccaccatgttgccttgagaggatcatgtgtggactcaggaccatggcgtggccctgctttgactctctagctctgctttagggcctggtaggatctggagtggcttgagctaggggctgccatgagctctttccacttccccaaggca

SEQ ID NO: 701416 - DNA, 1864 bp, Homo sapiens
cattccctgtaacagaactttcacaggataaagacatgttcaggtacactgtctaaaatcttacaagtaataactactgatggcctattatacagcaggcaccctgttagttagaggtattatttttaatctttataaccattctataaaattgacattaattcaattttatagtggcagaatctaatgggtaggaggttttataacttgctaagtctattcagtaattgagaggtaaagttgaactttggactcattttagagttgaccacaaactcagatgtcccttctaatgctaaaatgtagaattctatcaataagataagtccagaaaagcagcaacaacaaccaagcaagttacaaacaacaacaacgacaaaagcaacatcatatgataaatatacacagtatgctataagggcacaaaagaaaaggaatgtaattctggttggaggcatatagaaaggtgtcttgaaaatacacttttaagaagttccttggaaaatatgctggtagcaattagaggaggataggagaattcaaaggtagaatcaattatggtctgaaataaaagggaagaagtgatctgaaatgaaggggaagaaaatgttgatgaagagaacacagtcttgtttttaaagcatgatagcagtcatcttattctcagtttatctttaataaaatcgtttaagcaaaaaatcatgattttattcactggtataaatatattgtagcgtacattaaattaaaggtaaaatactcagtttaggtccataacattttccctttgaaaatataaccctcttttgaaaaccatcaccttccgctagtttctttctaagaacttacatactcctacagcttatttggtattgttctaagccagtatcacataaggcacacaatttgctaaaagaaagaatgcagaaagggaactaaaatgattaattatctaatgcatggagaaagatctgcacattgcctcctgctctggtcatggaagacgtgtctgggtctcctttgccttctgccatgattaaacctatgtacaggagcaggactctgaagacacgctgtggcccagacagtggctgatgagcagatggagtctgcacccatgcaatttggtcaaagaagcccccatactctccatgaaaaagattttcagaagctattgtgtcaattaaaaaaaagaaacaaaccataaaaccaccgacactgaagatcatttctgagtctgatttgaaagctggaatcaaattctgcagaggcattgaagtggccagatgctaccctaatagccaaacctgcaggtcccctccatcatgccaaggaaaatgttccattcaccatcttcaccattcctcagcttctggctctggtttcagagttctctctgtattggaggagttttaaagctagagggaactttacccacttcctcttatgtacagatctgaatatggaggtcaagagggaaagtggcacgtcctaagtcagagtagagtcaacaaaaaaataagataaacaatgacccagtccctggtgtgtagtgagcattagctagatacawgggatatggagatgaagaaaacagagtcctttcttcaggcagctcaatctagcaaggtagacagactttttgcaagtaggaccaggcttccctgcagcagaaggaaacatgaaatcacggtcatgagcctcacctgggatgggccaccatgttgccttgagaggatcatgtgtggactcaggaccatggcgtggccctgctttgactctctagctctgctttagggcctggtaggatctggagtggcttgagctaggggctgccatgagctctttccacttccccaaggca

SEQ ID NO: 701417 - DNA, 1940 bp, Homo sapiens
gaaagctgaggaataggctctactgcagtcttgataatgaagaccaatgcatgcattctaaactgagttatctccaattctcacctcttcctctgtggctgcactggaggaggcacaggcactgctccctgggacggctggcctgctctcctatgccctagagagctcagtgcagcatcccacatgcctcgtctccacccagcagcctcactcatgacctgcatggggcagatgtcaccagtatctttcaacagcttcccctctgacaattgtcaaaggaaacagaaggcagcaaagatgcggaagcaatgactaggatttcagggtgtgaaacaagcctctctccttcgaaagcaaccgcaacaatcttcagcaggaaccagcaggcagaggcaccctcagcggccgacccttctgtcgggcgtgacctacagcatcctgtattttgatcacacaacaaccacttcagttctgtgtcactctcggtcctcataaatggggaaacagacatgcctatcctgagatcccttaaggggacatgtacctctctgaaccacgttcccgtgttcagcactacccttgagagggtgtgacatctgagccacctaggaggttcgtctgcttgttacaaatattttaggcagaataattcaagctaaagcgaacatccttggaactcctgaaggggaaaagaactcaaaatgaatggggcaatagagagctaaggagaggctytgtcttgtaaatgcgcgtgggctgaagcacacgtatgaatgacctgccccgtgtcttggtttcccaaggcagccagggcagagctctgcccacgttgtcttgagctggggcctgcaggggaactcagagcagccagcatcagcagtgagttagttccacagcttatctgggttcagtgacaaccaactcttctggtcttacagaggaccaagaattgttccaggacgggggagttaaggaacccttaggaagaaggtgtcttctcccctcagaacactgaccactacacctcctgtttgatgtcacatcatcccctccccatcccaccccatctcctccctacatctctcttcaccagtaggataaaacaacacaagcacttgtttatggccaatgcccagagctggccctctgggcaacaaagaccctgaacgaaataaaacacagaggagatggagaacaaaaacgggcagagcgcactgaagcttgcaggcctaactgcctcatttcctgtgggcacatgctgacatgtgagaggaccccttaaacaaccggagatacaagaaatggggacatatccaagtgttttccttacaaaacttagttacagggatgactcatctccttatctctaaatttacagatgttgtaagaaaaagcaggagccgtggtgacttttacattaatagacagcatagagatttcatcactgacagcaggaggctaggagctgttacataattccacaaatgagagggacactatttattccattccagggttcatgaaagacttcacctgagaggctgggtgcagtggctcacggctgtaatcccagcactttgggaggctgaggcgggtggatcacctgaggtcaggagttcaagaccagcatgaccaacatggtgaaaccctgtctctactaaatacaaaaaattagctgggcagggtggtgcatgcctgtagtcccagctacttgggagggtggggcaggagaattgcttgaacctgggaggcagaggttgaacctgggaggcagaggttgcagtgagccgagattgcaccattgcactccagcctgggcaacaagagtggaactctgtctcaaaaaaaaaaaaaaaaaaaaaaaaaagacttcccctgagaaattacacaggtgatgggtgaagaaggctcctttattgccacacatgaatggcacaggc

SEQ ID NO: 701418 - DNA, 667 bp, Homo sapiens
taacagagcctggtcagtgcttcccctactaatcagagcaatcactctccctccacgctgtcctggatcagagtccctcattccctggctctccagagtgcacccagtgctcagccagcagcctcctgcagacagatggagccctctcaggcccacagagcaccagggctctttctataaggttggtgcaaaagtaattgcggtttttgccattacgtttttttgttgttgttgttttgtttkgagatggagttttgttcttgtcacccaggctggagtgcagtggcacgatctcggctcaatgcaacctctgcctcccaggttcaagcaattctcctgcctcatcctcccgagttgctgggactacaggcacatgccaccacgcccggctaatttttgtatttttagtaaagacggggtttcaccatgttgaccaggctggtctcggactcctgaccatgtgatgtgcccgccttggcctcccaaagtgctgggattacaggcgtgagccacagtgcccggcctcaagttgtcttcatctctttgtctccctcctcagactgctggctcctttacagtggtctgcctcatccctaagttctgtgtatccaaaagaggaaaattgctttcctcacaaggttctcttttcatctcaaaaatttgattc

SEQ ID NO: 701419 - DNA, 640 bp, Homo sapiens
caagccacggaacgagcagtttctgcaacaaataaaaagaaagaggggaacctagaaattacaacagacttaggaaaaaaattagctatgccgattcagaggtaactcctaggaagtgaggtttgaaaataaagagagaaaagaattatgtattgaaacagtaacaataaccaacagagatatcaatggctacaaactacagggcagccagaattcacagaattagtccacacaggtagccaacaaacaaaacacaaagagcaaaacaaaataataactttactcacactagaaacaaaccaaatttccattagagtggattgagtttaaaaataaaaaaaataaaataaataaaaaggatgcgctttgggaagaaaaggagggaggattgcttaaggctaggagttctagaccagcctgggcaacagtacaagacactatctctacwaaacaaattttaaaattagctaggtttggccaggcacagtggctcacgcctgtaatcccagcactttgggaggccgaggcaggcggatcacgaggtcaggagatcgagaccatcctggctaacaaggtgaaaccccgtctctactaaaaatacaaaaattaagccaggcatggtggtgggcacctgtagtcc

SEQ ID NO: 701420 - DNA, 1076 bp, Homo sapiens
gaaaaggcaaaactatggaaacagtaaaaggatcagtagttgccaggggttgaagggagggaggaatgtataggtaaagcatagaggattttcagggcagtgaaactattatgtatgacactataatggtggatacatgtctttacaagcttgtacaatccctcaggatggacaacaccaagtgaacctcaatgtaaactatggtttttgggtaataatgatgtctcaaggtagattcatcacttgtagccaatggaccactctggtggggagtgttgattwtgggggagtctatgcatgtgtggagacaaggggcatatgggaaatctctttaccttctgctcaattttgctgtgaacttaaaacttctctaaaaatagagtctgttaaaaacatgtgtggtcaagattctctgatggaagtaaatttggttttactgattcttactaatctgtggaactggcacatagccctaattgttgtcagacctatttagaatgtgaagtatttgataccaatctgtcctcaactttggggtcaagtcattcatttttgagcaaaataaaagttttattcagttgtccggttccaagatggccaaataggaacagctccagtctacagttcccagcgtgagcaacgcagaagatgggtgatttctgcatttccaactgaggtactaggttcatcttactggggcttatcggacagtgggtgcagcccatggagtgtgagccaaagcagggcggggcatcgcctcacctgggaagtgcaaggggtcggggaattccctttcctagccaagggaagctgtgacagatggtacctggaaaatcgggacactcccaccctagtactgtgcttttccaacagtcttagcaaatggcccaccaggagattatatcctgcacctggctcagagggtcccatgcccatggagcctcactcactgctagcttcacagaggagaagctgagcagctgactgctgagattgaactgcaaagtggcagtgaggtctgagattgaactgcaaggtggcagcgagactgggggaagggtgtcccccattgctga

SEQ ID NO: 701421 - DNA, 1076 bp, Homo sapiens
gaaaaggcaaaactatggaaacagtaaaaggatcagtagttgccaggggttgaagggagggaggaatgtataggtaaagcatagaggattttcagggcagtgaaactattatgtatgacactataatggtggatacatgtctttacaagcttgtacaatccctcaggatggacaacaccaagtgaacctcaatgtaaactatggtttttgggtaataatgatgtctcaaggtagattcatcacttgtagccaatggaccactctggtggggagtgttgattttgggggagtctatgcatgtgtggagacaaggggcatatgggaaatctctttaccttctgctcaattttgctgtgaacttaaaacttctctaaaaatagagtctgttaaaaacatgtgtggtcaagattctctgatggaagtaartttggttttactgattcttactaatctgtggaactggcacatagccctaattgttgtcagacctatttagaatgtgaagtatttgataccaatctgtcctcaactttggggtcaagtcattcatttttgagcaaaataaaagttttattcagttgtccggttccaagatggccaaataggaacagctccagtctacagttcccagcgtgagcaacgcagaagatgggtgatttctgcatttccaactgaggtactaggttcatcttactggggcttatcggacagtgggtgcagcccatggagtgtgagccaaagcagggcggggcatcgcctcacctgggaagtgcaaggggtcggggaattccctttcctagccaagggaagctgtgacagatggtacctggaaaatcgggacactcccaccctagtactgtgcttttccaacagtcttagcaaatggcccaccaggagattatatcctgcacctggctcagagggtcccatgcccatggagcctcactcactgctagcttcacagaggagaagctgagcagctgactgctgagattgaactgcaaagtggcagtgaggtctgagattgaactgcaaggtggcagcgagactgggggaagggtgtcccccattgctga

SEQ ID NO: 701422 - DNA, 1076 bp, Homo sapiens
gaaaaggcaaaactatggaaacagtaaaaggatcagtagttgccaggggttgaagggagggaggaatgtataggtaaagcatagaggattttcagggcagtgaaactattatgtatgacactataatggtggatacatgtctttacaagcttgtacaatccctcaggatggacaacaccaagtgaacctcaatgtaaactatggtttttgggtaataatgatgtctcaaggtagattcatcacttgtagccaatggaccactctggtggggagtgttgattttgggggagtctatgcatgtgtggagacaaggggcatatgggaaatctctttaccttctgctcaattttgctgtgaacttaaaacttctctaaaaatagagtctgttaaaaacatgtgtggtcaagattctctgatggaagtaaatttggttttactgattcttactaatctgtggaactggcacatagccctaattgttgtcagacctatttagaatgtgaagtatttgataccaatctgtcctcaactttggggtcaagtcattcatttttgagcaaaataaaagttttattcagttgtccggttccaagatggccaaataggaacagctccagtctacagttcccagygtgagcaacgcagaagatgggtgatttctgcatttccaactgaggtactaggttcatcttactggggcttatcggacagtgggtgcagcccatggagtgtgagccaaagcagggcggggcatcgcctcacctgggaagtgcaaggggtcggggaattccctttcctagccaagggaagctgtgacagatggtacctggaaaatcgggacactcccaccctagtactgtgcttttccaacagtcttagcaaatggcccaccaggagattatatcctgcacctggctcagagggtcccatgcccatggagcctcactcactgctagcttcacagaggagaagctgagcagctgactgctgagattgaactgcaaagtggcagtgaggtctgagattgaactgcaaggtggcagcgagactgggggaagggtgtcccccattgctga

SEQ ID NO: 701423 - DNA, 1076 bp, Homo sapiens
gaaaaggcaaaactatggaaacagtaaaaggatcagtagttgccaggggttgaagggagggaggaatgtataggtaaagcatagaggattttcagggcagtgaaactattatgtatgacactataatggtggatacatgtctttacaagcttgtacaatccctcaggatggacaacaccaagtgaacctcaatgtaaactatggtttttgggtaataatgatgtctcaaggtagattcatcacttgtagccaatggaccactctggtggggagtgttgattttgggggagtctatgcatgtgtggagacaaggggcatatgggaaatctctttaccttctgctcaattttgctgtgaacttaaaacttctctaaaaatagagtctgttaaaaacatgtgtggtcaagattctctgatggaagtaaatttggttttactgattcttactaatctgtggaactggcacatagccctaattgttgtcagacctatttagaatgtgaagtatttgataccaatctgtcctcaactttggggtcaagtcattcatttttgagcaaaataaaagttttattcagttgtccggttccaagatggccaaataggaacagctccagtctacagttcccagcgtgagcaacgcagaagatgggtgatttctgcatttccaactgaggtactaggttcatcttactggggcttatcggacagtgggtgcagcccatggagtgtgagccaaagcagggcggggcatcgcctcacctgggaagtkcaaggggtcggggaattccctttcctagccaagggaagctgtgacagatggtacctggaaaatcgggacactcccaccctagtactgtgcttttccaacagtcttagcaaatggcccaccaggagattatatcctgcacctggctcagagggtcccatgcccatggagcctcactcactgctagcttcacagaggagaagctgagcagctgactgctgagattgaactgcaaagtggcagtgaggtctgagattgaactgcaaggtggcagcgagactgggggaagggtgtcccccattgctga

SEQ ID NO: 701424 - DNA, 1076 bp, Homo sapiens
gaaaaggcaaaactatggaaacagtaaaaggatcagtagttgccaggggttgaagggagggaggaatgtataggtaaagcatagaggattttcagggcagtgaaactattatgtatgacactataatggtggatacatgtctttacaagcttgtacaatccctcaggatggacaacaccaagtgaacctcaatgtaaactatggtttttgggtaataatgatgtctcaaggtagattcatcacttgtagccaatggaccactctggtggggagtgttgattttgggggagtctatgcatgtgtggagacaaggggcatatgggaaatctctttaccttctgctcaattttgctgtgaacttaaaacttctctaaaaatagagtctgttaaaaacatgtgtggtcaagattctctgatggaagtaaatttggttttactgattcttactaatctgtggaactggcacatagccctaattgttgtcagacctatttagaatgtgaagtatttgataccaatctgtcctcaactttggggtcaagtcattcatttttgagcaaaataaaagttttattcagttgtccggttccaagatggccaaataggaacagctccagtctacagttcccagcgtgagcaacgcagaagatgggtgatttctgcatttccaactgaggtactaggttcatcttactggggcttatcggacagtgggtgcagcccatggagtgtgagccaaagcagggcggggcatcgcctcacctgggaagtgcaaggggtcggggaattccctttcctagccaagggaagctgtgacagatggtacctggaaaatcgggacactcccaccctagtactgtgcttttccaacagtcttagcaaatggcccaccaggagattatatccygcacctggctcagagggtcccatgcccatggagcctcactcactgctagcttcacagaggagaagctgagcagctgactgctgagattgaactgcaaagtggcagtgaggtctgagattgaactgcaaggtggcagcgagactgggggaagggtgtcccccattgctga

SEQ ID NO: 701425 - DNA, 1206 bp, Homo sapiens
ccgggtgtggtggtgtgcacctgtagtcccagctactctggaggctgaggcagaagaatcgcttgattccaggaggcgaaggttgcagtgagccaagaacacgccattgcactccaacctgggcaacaagagtgaaactccatctcaaaaaaaaaaaaaaaaaaaaaaaagaaggatgagttcatgccctttgcagggacatggatgaagctggaaaccatcattctcagcaaactaacacagaaacagaaaaccaaacaccgcatgttcttgctcataagtgggagktgaacaatgagaacacatggacacagggaggggaatatcatacaccggagcctgtagggggttaggggagggatagcattaggagaaatacctcaggtagatgacaggttgatggatgcagcaaaccaccatggcacatgtatacctatgtaacaaacctgcacgttcttcttgcacatgtatcccagaacttaaagtacaattaaaatatatatgtatatggcactctaccttgaaaaagaaaattgcttatggaagtggttactgcaaggcctacagcctgtaagttatgaagcagcagaaggatgatctgaaataagacgtaacaatgtaacaccagatatgaatggatggagctcataatacactggtgaactaaggtggagggtagatgtttgaagtatgtatcctaatacacaaaattcactgatatgctcaaatcattccctaatacatcaattaaaacaaattttcattaagtgttacagcagaactgtgagcattttgcattctaccactacatcacttaagcatagctcttattaaaacagaaaggaagactaaagaaacttattattccaatatactagattcaagactctttaataaacagtttgtatttttaaaaagttaatttgacaaagttcacaggcaagataaagggaatgagaaaaacccaaacttggtaaatctgcttttaattaggacatagagttcagtataaataatactctataaacattcttctttatatcaaaggtttggccagactaaaaaaaaggaaaaaacaaaagcagctagtttacaattacacttgcattatgtgaaaaattcagagaaaaagatacccagttttatcaagagaaatgataagatgctctgacacaattatagtggaaaagaataataaatatccca

SEQ ID NO: 701426 - DNA, 650 bp, Homo sapiens
atgaagatatcatcttcatattcaagttaagatttttctggttttcttagagttcagattgtttatggttgaagggcaccggatgggaggcaataaagaattgtagaaatcattgcaaaatctctagccccagaagctttagaaagtgagagatgagtccaggtgcgatggctcacacctatagttccagcaatttgggaggccgaggcgggcggatcacctgaggtcgggagtttgataccagcctgaccaacatggagaaaccccgtctctactaaaagtataaaaagttagccgggtgtggcggcacatatctagctactggggagtctgaggcagaagaatcgcctgaacccgggaggcagaggttgtggtgagccgagatctcgtcactgcactccagcctgggtaacaagagcaaaactccgtctcaaaaaaaaaaaraaaagaaaagaaaaaagaaagaaagtgagagatgaagtaaaacatttgaggttcttctacctgctagcaacaccctttgaaacattcacatttcaaaggggcagttaccttgttctccctgtcattgttattattcacttaggaaatagacccattactggctcatgggtgactaaacacaaactttcaaaaccttctactgagag

SEQ ID NO: 701427 - DNA, 1962 bp, Homo sapiens
ttakacccaccagtcccacgtaaagaaatttgctctaaggtaatagtcatccaagtgcagagagatatatatacaagaatgttcactatgatattgtgtataaaataaaaaaattgtaatcctaattgcccaacaatagacaatggtgacatcaaacttcaaaaactttcaaaatatatggttgagtcaaacagaagatttattcatctgtttgtttaacataataccaagttataaaacatatttcctatttgtatatcaaatgggaaaaaattctggaggaaaataagcaataattctaaaacaattatatatgggtattttatataagttggatattttgttcatctttattttctcatttttcttcagtaattgtgtattgcttttctaacaaaataagattaaaagtatgtaaagaaaataactagataaaatatgaacttaggctattgagcagctagatctcactctgtatgtttccctgaaatcactagtagcttatccaaatgatcttagggcttcattggatttgtggacctggatggcaagggacaaggagcacttagacttttaacttaatagcagggaacctgaaccaatacatcaggtgaactacagcctttggcattcttgaaactctgtgagttccatgtgtaggtgatgcaaagattcgatgggaggtgtagggggatggtcaccaaataattttgataaaatctgaaaactgagaagaattttggaaggatggtagattaacaaaaagactttcagattggtgagaaaatggtaatctacagaagaaaaaacatgtaaggacctgggggtgctcattgtttgacatggactgttttcatttatttcttacccaaactgaatgaactagatactattatcccaatcttggaggtgagaaaactgactttgattatatcacgttcccaaggtcacccaacagtaggcattgacgtttgcgaaggatcctggcaagaagaaatgtcagagaaacagactgcagttctgtatagggaagaacaagtacgaaatgggtctctgctgtgcatagcgagctccacaccattggaggcaagcaagcacagcttaggtgcctagcagcagtgattcagaggagaccatgtcactgctggtggttgcatcatttgaacatacagtgccgtacaaccctaagaatcctatatagccttctagccaggaaataaaactaggtcttctcatcttaacattcaggcaaaaagaattcagaacctccctcaggggcctgagagtcttagaactgacaaaggaacattttccacaaatttcccctttatccccactactgtaatcttctttctctttctttttcttttcccttattgtcccttgtccaaattgctttatttcatatctgattatcttactctcctcccactgctgtgtctcttgttctgcaagagacatactctaagatgatttcatttttctcttctcactagtcttttgagatacttttaaccaatacatattagcaaggatacagaaaacagtatacaatggaagaaataatgtcataaaacactattagaatctgttcagagcttttttttttcataggactcaaagccgagttctgttattttctcccagccaacgtcctggaagccattttgcaacactatagcaggaatggtaatcagaggcctaatgtgatcttacagattaaaaaaaagactaatgggtaactgggacccatgaagaagtacagcaactcacaatcttctctcagatcttctccatagaaacaagagttcagggtggtcctactccatttgttcatttattcattaagcatcacatggccatctatcatgtatgtagcagattctctgccaaagaaacagagataagtaagacttggaagaacaaaactgaacagagaggttggagaagaatggcctccag

SEQ ID NO: 701428 - DNA, 1962 bp, Homo sapiens
ttagacccaccagtcccacgtaaagaaatttgctctaaggtaatagtcatccaagtgcagagagatatatatacaagaatgttcactatgatattgtgtataaaataaaaaaattgtaatcctaattgcccaacaatagacaatggtgacatcaaacttcaaaaactttcaaaatatatggttgagtcaaacagaagatttattcatctgtttgtttaacataataccaagttataaaacatatttcctatttgtatatcaaatgggaaaaaattctggaggaaaataagcaatarttctaaaacaattatatatgggtattttatataagttggatattttgttcatctttattttctcatttttcttcagtaattgtgtattgcttttctaacaaaataagattaaaagtatgtaaagaaaataactagataaaatatgaacttaggctattgagcagctagatctcactctgtatgtttccctgaaatcactagtagcttatccaaatgatcttagggcttcattggatttgtggacctggatggcaagggacaaggagcacttagacttttaacttaatagcagggaacctgaaccaatacatcaggtgaactacagcctttggcattcttgaaactctgtgagttccatgtgtaggtgatgcaaagattcgatgggaggtgtagggggatggtcaccaaataattttgataaaatctgaaaactgagaagaattttggaaggatggtagattaacaaaaagactttcagattggtgagaaaatggtaatctacagaagaaaaaacatgtaaggacctgggggtgctcattgtttgacatggactgttttcatttatttcttacccaaactgaatgaactagatactattatcccaatcttggaggtgagaaaactgactttgattatatcacgttcccaaggtcacccaacagtaggcattgacgtttgcgaaggatcctggcaagaagaaatgtcagagaaacagactgcagttctgtatagggaagaacaagtacgaaatgggtctctgctgtgcatagcgagctccacaccattggaggcaagcaagcacagcttaggtgcctagcagcagtgattcagaggagaccatgtcactgctggtggttgcatcatttgaacatacagtgccgtacaaccctaagaatcctatatagccttctagccaggaaataaaactaggtcttctcatcttaacattcaggcaaaaagaattcagaacctccctcaggggcctgagagtcttagaactgacaaaggaacattttccacaaatttcccctttatccccactactgtaatcttctttctctttctttttcttttcccttattgtcccttgtccaaattgctttatttcatatctgattatcttactctcctcccactgctgtgtctcttgttctgcaagagacatactctaagatgatttcatttttctcttctcactagtcttttgagatacttttaaccaatacatattagcaaggatacagaaaacagtatacaatggaagaaataatgtcataaaacactattagaatctgttcagagcttttttttttcataggactcaaagccgagttctgttattttctcccagccaacgtcctggaagccattttgcaacactatagcaggaatggtaatcagaggcctaatgtgatcttacagattaaaaaaaagactaatgggtaactgggacccatgaagaagtacagcaactcacaatcttctctcagatcttctccatagaaacaagagttcagggtggtcctactccatttgttcatttattcattaagcatcacatggccatctatcatgtatgtagcagattctctgccaaagaaacagagataagtaagacttggaagaacaaaactgaacagagaggttggagaagaatggcctccag

SEQ ID NO: 701429 - DNA, 1962 bp, Homo sapiens
ttagacccaccagtcccacgtaaagaaatttgctctaaggtaatagtcatccaagtgcagagagatatatatacaagaatgttcactatgatattgtgtataaaataaaaaaattgtaatcctaattgcccaacaatagacaatggtgacatcaaacttcaaaaactttcaaaatatatggttgagtcaaacagaagatttattcatctgtttgtttaacataataccaagttataaaacatatttcctatttgtatatcaaatgggaaaaaattctggaggaaaataagcaataattctaaaacaattatatatgggtattttatataagttggatattttgttcatctttattttctcatttttcttcagtaattgtgtattgcttttctaacaaaataagattaaaagtatgtaaagaaaataactagataaaatatgaacttaggctattgagcagctagatctcactctgtatgtttccctgaaatcactagtarcttatccaaatgatcttagggcttcattggatttgtggacctggatggcaagggacaaggagcacttagacttttaacttaatagcagggaacctgaaccaatacatcaggtgaactacagcctttggcattcttgaaactctgtgagttccatgtgtaggtgatgcaaagattcgatgggaggtgtagggggatggtcaccaaataattttgataaaatctgaaaactgagaagaattttggaaggatggtagattaacaaaaagactttcagattggtgagaaaatggtaatctacagaagaaaaaacatgtaaggacctgggggtgctcattgtttgacatggactgttttcatttatttcttacccaaactgaatgaactagatactattatcccaatcttggaggtgagaaaactgactttgattatatcacgttcccaaggtcacccaacagtaggcattgacgtttgcgaaggatcctggcaagaagaaatgtcagagaaacagactgcagttctgtatagggaagaacaagtacgaaatgggtctctgctgtgcatagcgagctccacaccattggaggcaagcaagcacagcttaggtgcctagcagcagtgattcagaggagaccatgtcactgctggtggttgcatcatttgaacatacagtgccgtacaaccctaagaatcctatatagccttctagccaggaaataaaactaggtcttctcatcttaacattcaggcaaaaagaattcagaacctccctcaggggcctgagagtcttagaactgacaaaggaacattttccacaaatttcccctttatccccactactgtaatcttctttctctttctttttcttttcccttattgtcccttgtccaaattgctttatttcatatctgattatcttactctcctcccactgctgtgtctcttgttctgcaagagacatactctaagatgatttcatttttctcttctcactagtcttttgagatacttttaaccaatacatattagcaaggatacagaaaacagtatacaatggaagaaataatgtcataaaacactattagaatctgttcagagcttttttttttcataggactcaaagccgagttctgttattttctcccagccaacgtcctggaagccattttgcaacactatagcaggaatggtaatcagaggcctaatgtgatcttacagattaaaaaaaagactaatgggtaactgggacccatgaagaagtacagcaactcacaatcttctctcagatcttctccatagaaacaagagttcagggtggtcctactccatttgttcatttattcattaagcatcacatggccatctatcatgtatgtagcagattctctgccaaagaaacagagataagtaagacttggaagaacaaaactgaacagagaggttggagaagaatggcctccag

SEQ ID NO: 701430 - DNA, 857 bp, Homo sapiens
gaagtgaagccaattctaaaaataaaaccagggtcactaggagaaacattctaaaagccatatatatgacacttccatgatcatcctaaagataattgatccaattctcccacattcctccaaagctgcagagttttgataattcagtttctaaagtaaaattgcaatatggcttatcctaaacaatatttttggctgcacacaggttttatattttatataaatggaatcatacagatatatttctgctactagttttcttacccaaaattatatttttgagattcaatcttgttgattcatataattgtagtttatatcactcgtgcctagttttcctttgtatgaattgactacaacttactagttattttcgttttggtggacatttatattatgtctagctttttattatttcaagctatactggtaaaatctttcctgtacatacaagtgttaaaattatttttaaacaagagaatgaaaaccacaaaattcagaatagtgttttctcttggaggtgaggaagggaaactggcatcagggagaaggatgcagacccattagaggtataatgacactactttcttaagacractgcgtaaatggggtttacttaatatgcatgtattgtgtgtatacatacagatatacataaatagacatgtatataacacatatatacttttatttggagataattcaaaataattcatatgcagttgtaaaaagtaatccagagattccttccccaattttcctccaatggtaacatcttatgtttctatgtagtacaataacacaaccaggaaattgatattgatataattaatacatctgattctgatttcaccagt

SEQ ID NO: 701431 - DNA, 601 bp, Homo sapiens
tcccatcatttgtattcattcattcatacaagaatttgtccattcattcatttggcaaacatgtctaaagtgccagctatttaccagcgtacgatctagttcttgccaccaggtagctaaggagctaataaaggagaaggactaaaacagtttcaattctcttaccaagccatatgctctttgccaataccagtatttctctctagtttacagatgagaaaaccaagtcacaaagaagggaagctattcatccagggtcacatagacggaaattataggtaacttaaattaccaatgcaatataatatttgcaatgataaccttttcatagaaaagtggttttagagaagtgttcctcagaccgaagcctcagaaacctttagacacttgttaaaatggaatttctggggaaagcygagacttttattttgtcatgctttttaggagattctcatgcacataagtttgggcactgcctctggagagtttctactgctattccgttgttggaaatgaatttcctttagcagtatatgagaacattagctctggttatgtttttatttaaaggaagaaatgaaaaagccaatgtgaacctaca

SEQ ID NO: 701432 - DNA, 904 bp, Homo sapiens
tgtggtggttttttttttttttttttttagatggagtctcgctctgttgctcaggctggagtgcagtggtacaatcttggctcactgtgcagcctccgcctcctgggtacaagcaattctcctgtcttagcctcccgagtagctgggactacagacacacaccaccacacccagctaatttttgtatttttagtagaggtggggtttcaccacattggtcaggctggtcttsaactcctgacctcaggtgatccacctgccttggcttcccaaagtgctgggattacaggcgtgagtcacggtgcccagccgatagtgacttctataagcagtatatgtgtttactaatgtttaatagcataatactggaagagtgtttccacctcttaatatgtctctgtatttcttcccgagatggatctgtagatcactagcaagacaaaatcctcaccagatgttttatgcctcccttgagtgcaaattctatgaaaaaactgaaatagtgtaaggcagtaaaaataattctttaaatataaatactgcatattcttttatctggatttctgctaatctatttacaggtgttttaaaaagccacattttttgtgacaactcagggagttttccaccattctactttttaaccaagtttggcactacagggcagcacaaataagaagcatttgtatttttctttatgactgcatagcactgtgggttttcaaacaggaagacaaatattgaatttgaaattcactccttaccagctttttaatttcatatggcattctaataaattttttttataacttaaattttaaaaccttatgatgagaaagcaagttttttattaaatttacaaagacttcaacatctaaataatgggaataatagctgtacttca

SEQ ID NO: 701433 - DNA, 1044 bp, Homo sapiens
ttttccttacctaagaagaagggcctgactaaggatcatctccttggttttttcttgctcttgtatgctctgacagcttgcttttttgtgttaactttttgtttgttgtataacttcccagatatcatccaatatgccattgactgtgggcatgttcttctgatcccatcatttagttatgtcgaatttgccagagctaagtatgaggcacaaaatcagaagacctgtctttaaagattatgtgggtctttttaaatacttcttgtattctatatccagtgtctggagctactaaaggactttccataccaaaacactacatcctctatcattatcgtcttcgagtaaaaccaccactcatgatgtaaatgaattcttttgctcataattgatatagcaacttgctgagttggtggctttaggtagaatagctcctatagtattttttaaattaatagactatttttagagcagctttagagttatagaaaattgctcagacagtacagtaagtttccatatattcccccactcagtttcccttactacaaacatcgtgcatcagtgcaatacatcagttataattggtgagccaatattgacacattattattaaccgaagtccatggttcactctttgtgttatatagttctgtgggttttgtcaatgcacagtgtcacatatccacattacagtatcatacaaaatggtctcttactgccctggctttaggtctgagatagttctgatagtatttttttttaycaccttttaacatcttacatgaggttatcttattaatgttcaaagacaaaaataatataatgtccaagtgccctccaaagatggtcacatgttttaatttagcacatggctaaatttcatctcagtttagaatatatatttttgtgggacttcgttgtcattttccatagaaatttatgacatttggaaattcctctggggtactcaatcccatcatcagtgtattatcccaaaagagcacatggtggcttagcgcaacattctgatgttacaacaag

SEQ ID NO: 701434 - DNA, 1271 bp, Homo sapiens
ggattaaacactgcaggcagcaggcatgtgctttttgccttttatagcagctgaactgctttttagaattttctttagtagatagtgatttcaggtgattctcttttcttttcccatgctgctaggtatgcttttatttttcatgaccacacacatccttttcaagaggaaaaccttcaacaatttcatcaacacttagatttttcactggctgcacaactttccctttgctttgatggtttttagcaaagtattttatgtaaaagggagtcttgctgaagtatttaaacatgaacgcctcttcgagagacagccctacgtcagtttcttaacctcagcacagtggaaatttggggctgtataatcatctgttgcagttgcgggggggttgtcttctgcactgcgagatttttagcagcataattgacctctacccactagatgccagtaacatcccccaaatcgtgacaaccaaaaacatctccagacgttgccaaactgtcgtgtgtatgtgtgtgcgtatgtgtgtgtgtaaaaccactgtgtgaatcatcagtggacacgaggtgtgcctaaggtttctgtcactttgggttcattggggtgtatgaagcatgtttttgagagacaggggacttgctgtgactgctaactctgccaggcctttgtgtggtttytgaatgatactaattcctcttctgtcattcgcacttaccctcacagggttgtgtgagaactagaagagaaagatcatattgagcatttactgtgttctaggcctgttctggatgctttaaataattgatttaatctttgtaacagcctcataccatcctctgtgaggtggtattacaatgatacccattttatagctgatggaattgaggtacaaagagtttgaataacttgcccaaggtcatagagctggtgagtagcggagttagaatataaacctaggctctgtggttctcaagtccctgtctctacctacttaccacactgaccctctaagttaagtgtatatgaacagtttagaaatgtcgcagcagaaaatccattgttaataagcttcctatgcatacccagaccatgctctctagggctcagacatcctacgcatctaacaaggagcctctctgtcatggtattcccatttgcatcgtttactttccatctctacagctttacattgtatacatctttgatgccagcctcaaatgcccacctcccaggagcccttcctcttaattcctcttaatttccacatcagg

SEQ ID NO: 701435 - DNA, 1100 bp, Homo sapiens
gccttccacagaataaattagaaaagctaaatttacttggattcctttagaaggtaattttttttttttttgccacgtaatgcatcagtaaattttgagtatgaatcaactcttctgatattgttaaatgtgtttgcacgaatacacccttagtgaaagagaggaaaagtggtgagagagagagagaggaaaaatacatttgtcacatcctgaagaagctgtattttaaattcatgtttaattcatatgggaaaaatgcatatttgcactttaaatatatatatcatgagttttatagcacagacataatttctatagagtaagatcccaggtaatgcagataatttcttcaattttaagtattttctgtgtcaaatatcaatacttgatcacatttttgtatggtggcatatagtttctgaattaatttcatgctaaatagcctaatttaaaactttacgcaccaagatcagttaaacacatatttttaccattacttacacacaaagcactgtgttgtaagcattatggggacagtaagtatacataaaatgcatttgaattatgtattaccgcatacgtggacttaataaactttgaatgtaaacacataaggaagttttttactaagtatactttgaagaacaattgttggcagatggcattcataatttgtgtttaagtatgtctttccaattagattatcgaaggtttgagacaaagattccattttattttacactggtgtatagtaaggtatcacaatcatggatttgagttgtaataattaattgagacagtaaatgactccacagtaggttaactgttcaggctatagaatgatctcttccatcccagatggatgattttaatagtgttcttattaaataaaaaaaatttagagtcagaagacttaagtgattgtgagagccaagttttgaatcagttctaygtgagtcgaaagactgggctcttagcctttatgctgagcaccactgccatgagaaggaaaaatcaaataaaatcagacaatatatattaatgtgcttagtctagtacaaaacttggtatgtagcaggggctcaacaggtacctaaata

SEQ ID NO: 701436 - DNA, 2475 bp, Homo sapiens
aggaaatgaacagaaacaacctagctctccaaagaggagtatttcattcaactccgaactgctcacacattatgcaactgtgaacaaggctcatttaaaaatccatgaagcttctaatgttttcaccacaaaatatattaagtattgaggtgctggatatgttgactagtttgatttaattattccacattatatgcataaatagtaacatcaccttgttccccataaaattatacaattataaattgtcaatttgcaattaaaacaataaaatccagccagacgttgtggctcacatttctaatcctagcattttgggaggccgaggtgggaggattgcttgagcccagacatttgagaccagcctggcaacacagcgagactccatctctacaaaaaaaaaaaaaaaattagccaggcctggtggcatgcacctgtagtcctagctactcgagaggctgaggtaggagaagcacatgagcttaggaggtcaaggctacagtgagctgagattgcgccactacactccagcctgggtgacagagcaagactctgtctcaaataaataagtagataatcaatcaatccatgaagccactatataaaaatgccaaggtgaaaatggaaaggcaactatgcatattgtagggtcatgaccccatgagatatgcgtgcatgtgtacaaatacataaaaggaaaaaattttaaagaccaatagttaaaaccatattaggggaaacttatttgaaggtcaccctcttccctttctccccatagacatctattytaaatttcccattaattcttaaaattgtttgcatagcaagtaatcattttaacaaatatttgattatttcagcattattttctttttttttttttgccagcattaccttttagaggctggtttccttcccccagaacacgctcatgtgtaaactggggatggtttggctcatctgatttttatttgaagttgccatagcctgttcactctgaaggttatatgcatgggagaaacttcataacaaaatggcagtcagcctactgcttcattttcttagccaagaaaggatctaaacccttcacacaacaggaaggggcatgccagcccaggtacttaaaccaatattagcattcaccaaaaagtactggggcaccgtagccccctttcatagtgctgtgagcttaggcttcctttgggatatagctagtgctctgtttcttactcagaccttcacattcggcagaccctgtaccccagttctgcccctggaatgggattcccaattgccttgtgcccagctgagttccagctagagagtcaagttccctagaccccatccctgtcttctggtgtccacgattctgacaagcaggcacatggccataggcggccttcaacacagcaccccctcccccagtgttcctaagttattgtcaccctaatttaccccacaatctgaccgttggagggatccctaacacctttaaggaaacctaaagaacttttaccagtgacctcaatattgtagatcaaggccagggcatacctccctttctcccgtctccctggagaaaacagtgcctagaaatacacgtgcaggggccccaggctgtgcacatcccccacagggcccgataccacctgtttggtgttcccaaaagctttttccagatggagccacgcaggcgtttctagtcccttaaatcctaaaccttaaacactaactttaattcaactgggtttatacatcatatcaattttactggagttgttgaacatttcattacatggaaaaaaccaccctgtgttggcctaatagactatccagactaatactggccctctgatacctgtcccagctctactcagcttaagattggtccttccccaaactcccgccaacactggttctgcctctgcacatgtctgcttcctgtgggtcacactctgagcgacagccctaagtctctgatttgtctctaattagccctgctgtctcccctttactaaactgaaagctccttctaggggggcctgggtcaaggaccagagaaactggcactggataggggcacatagcaggtgctcactagggacttgcggaatgaaactggaacagagacattaccaaacaccctgaaagccctgaatagtctaataggaatgtcatccctgacctcatatgtaacacccaattcaagtaatttgtcatatagtgtctcccagttattagcttctgcaatgtggctggtaggcatagtcccctttgccagatcatctatgcatatctgaagtatagtacaagtcccctaaccacagaggaatgttgaaagttgaaaatattatgtagcacatgttggctctgcctctgccctccctgccttctgggtacctacagctcctgggcacctactgccagttgagcccacataatcctggaggcacacacttcctgaaggccactctc

SEQ ID NO: 701437 - DNA, 2475 bp, Homo sapiens
aggaaatgaacagaaacaacctagctctccaaagaggagtatttcattcaactccgaactgctcacacattatgcaactgtgaacaaggctcatttaaaaatccatgaagcttctaatgttttcaccacaaaatatattaagtattgaggtgctggatatgttgactagtttgatttaattattccacattatatgcataaatagtaacatcaccttgttccccataaaattatacaattataaattgtcaatttgcaattaaaacaataaaatccagccagacgttgtggctcacatttctaatcctagcattttgggaggccgaggtgggaggattgcttgagcccagacatttgagaccagcctggcaacacagcgagactccatctctacaaaaaaaaaaaaaaaattagccaggcctggtggcatgcacctgtagtcctagctactcgagaggctgaggtaggagaagcacatgagcttaggaggtcaaggctacagtgagctgagattgcgccactacactccagcctgggtgacagagcaagactctgtctcaaataaataagtagataatcaatcaatccatgaagccactatataaaaatgccaaggtgaaaatggaaaggcaactatgcatattgtagggtcatgaccccatgagatatgcgtgcatgtgtacaaatacataaaaggaaaaaattttaaagaccaatagttaaaaccatattaggggaaacttatttgaaggtcaccctcttccctttctccccatagacatctattctaaatttcccattaattcttaaaattgtttgcatagcaagtaatcattttaacaaatatttgattatttcagcattattttctttttttttttttgccagcattaccttttagaggctggtttccttcccccagaacacgctcatgtgtaaactggggatggtttggctcatctgatttttatttgaagttgccatagcctgttcactctgaaggttayatgcatgggagaaacttcataacaaaatggcagtcagcctactgcttcattttcttagccaagaaaggatctaaacccttcacacaacaggaaggggcatgccagcccaggtacttaaaccaatattagcattcaccaaaaagtactggggcaccgtagccccctttcatagtgctgtgagcttaggcttcctttgggatatagctagtgctctgtttcttactcagaccttcacattcggcagaccctgtaccccagttctgcccctggaatgggattcccaattgccttgtgcccagctgagttccagctagagagtcaagttccctagaccccatccctgtcttctggtgtccacgattctgacaagcaggcacatggccataggcggccttcaacacagcaccccctcccccagtgttcctaagttattgtcaccctaatttaccccacaatctgaccgttggagggatccctaacacctttaaggaaacctaaagaacttttaccagtgacctcaatattgtagatcaaggccagggcatacctccctttctcccgtctccctggagaaaacagtgcctagaaatacacgtgcaggggccccaggctgtgcacatcccccacagggcccgataccacctgtttggtgttcccaaaagctttttccagatggagccacgcaggcgtttctagtcccttaaatcctaaaccttaaacactaactttaattcaactgggtttatacatcatatcaattttactggagttgttgaacatttcattacatggaaaaaaccaccctgtgttggcctaatagactatccagactaatactggccctctgatacctgtcccagctctactcagcttaagattggtccttccccaaactcccgccaacactggttctgcctctgcacatgtctgcttcctgtgggtcacactctgagcgacagccctaagtctctgatttgtctctaattagccctgctgtctcccctttactaaactgaaagctccttctaggggggcctgggtcaaggaccagagaaactggcactggataggggcacatagcaggtgctcactagggacttgcggaatgaaactggaacagagacattaccaaacaccctgaaagccctgaatagtctaataggaatgtcatccctgacctcatatgtaacacccaattcaagtaatttgtcatatagtgtctcccagttattagcttctgcaatgtggctggtaggcatagtcccctttgccagatcatctatgcatatctgaagtatagtacaagtcccctaaccacagaggaatgttgaaagttgaaaatattatgtagcacatgttggctctgcctctgccctccctgccttctgggtacctacagctcctgggcacctactgccagttgagcccacataatcctggaggcacacacttcctgaaggccactctc

SEQ ID NO: 701438 - DNA, 2475 bp, Homo sapiens
aggaaatgaacagaaacaacctagctctccaaagaggagtatttcattcaactccgaactgctcacacattatgcaactgtgaacaaggctcatttaaaaatccatgaagcttctaatgttttcaccacaaaatatattaagtattgaggtgctggatatgttgactagtttgatttaattattccacattatatgcataaatagtaacatcaccttgttccccataaaattatacaattataaattgtcaatttgcaattaaaacaataaaatccagccagacgttgtggctcacatttctaatcctagcattttgggaggccgaggtgggaggattgcttgagcccagacatttgagaccagcctggcaacacagcgagactccatctctacaaaaaaaaaaaaaaaattagccaggcctggtggcatgcacctgtagtcctagctactcgagaggctgaggtaggagaagcacatgagcttaggaggtcaaggctacagtgagctgagattgcgccactacactccagcctgggtgacagagcaagactctgtctcaaataaataagtagataatcaatcaatccatgaagccactatataaaaatgccaaggtgaaaatggaaaggcaactatgcatattgtagggtcatgaccccatgagatatgcgtgcatgtgtacaaatacataaaaggaaaaaattttaaagaccaatagttaaaaccatattaggggaaacttatttgaaggtcaccctcttccctttctccccatagacatctattctaaatttcccattaattcttaaaattgtttgcatagcaagtaatcattttaacaaatatttgattatttcagcattattttctttttttttttttgccagcattaccttttagaggctggtttccttcccccagaacacgctcatgtgtaaactggggatggtttggctcatctgatttttatttgaagttgccatagcctgttcactctgaaggttatatgcrtgggagaaacttcataacaaaatggcagtcagcctactgcttcattttcttagccaagaaaggatctaaacccttcacacaacaggaaggggcatgccagcccaggtacttaaaccaatattagcattcaccaaaaagtactggggcaccgtagccccctttcatagtgctgtgagcttaggcttcctttgggatatagctagtgctctgtttcttactcagaccttcacattcggcagaccctgtaccccagttctgcccctggaatgggattcccaattgccttgtgcccagctgagttccagctagagagtcaagttccctagaccccatccctgtcttctggtgtccacgattctgacaagcaggcacatggccataggcggccttcaacacagcaccccctcccccagtgttcctaagttattgtcaccctaatttaccccacaatctgaccgttggagggatccctaacacctttaaggaaacctaaagaacttttaccagtgacctcaatattgtagatcaaggccagggcatacctccctttctcccgtctccctggagaaaacagtgcctagaaatacacgtgcaggggccccaggctgtgcacatcccccacagggcccgataccacctgtttggtgttcccaaaagctttttccagatggagccacgcaggcgtttctagtcccttaaatcctaaaccttaaacactaactttaattcaactgggtttatacatcatatcaattttactggagttgttgaacatttcattacatggaaaaaaccaccctgtgttggcctaatagactatccagactaatactggccctctgatacctgtcccagctctactcagcttaagattggtccttccccaaactcccgccaacactggttctgcctctgcacatgtctgcttcctgtgggtcacactctgagcgacagccctaagtctctgatttgtctctaattagccctgctgtctcccctttactaaactgaaagctccttctaggggggcctgggtcaaggaccagagaaactggcactggataggggcacatagcaggtgctcactagggacttgcggaatgaaactggaacagagacattaccaaacaccctgaaagccctgaatagtctaataggaatgtcatccctgacctcatatgtaacacccaattcaagtaatttgtcatatagtgtctcccagttattagcttctgcaatgtggctggtaggcatagtcccctttgccagatcatctatgcatatctgaagtatagtacaagtcccctaaccacagaggaatgttgaaagttgaaaatattatgtagcacatgttggctctgcctctgccctccctgccttctgggtacctacagctcctgggcacctactgccagttgagcccacataatcctggaggcacacacttcctgaaggccactctc

SEQ ID NO: 701439 - DNA, 997 bp, Homo sapiens
ctttcactcctaacaactgagttctgctggcttggaagtgctagtccctaagcaggaaatatatctactagcatacacaacaatggttcaattgcattagaagatgagactgccacttggctacttgggactccttacaccactgaaccaacaggctgaacctactggttgggaaagattgagcccaattgtcaaggggaaacggttgctgctacacagtgaaagcaaggaggactatgtctgaaacccragggattatctaaggcacctcttaatacttccatgccaaaaataaagattaatggaaaactacagcaaccaaaaaaggactggactaatgagggaataaatgtttgagtcatttcaccaggtaaagaacctcaaccagctgaggttcgtgctgaaggcaagggaaacatgaaataggtaactgaagaaagaagcctagatatcaactgtggcctcattactaatcacagaaatgaggatgaactttctctttgttatatttggtatttgtttgtatattctaaccattttcttctttccttcttcccattattataagttggaattagttcagtttagttttgtttttttgagaccgagtctcactctgttgcccaggctggagtgcagtggtgcgatcttgactcactgcaacctccgcctcccagcttcaagtgattctcttgcctcagcctcctgagtagctgggattccaggggaaagacaccacacccggctaattttttttttttttttttttgagaccaagtctcactctgtcatcaggatggagtgcagcggcaagatctcggctcactgcaacctccgcctcccaggttcaagcaattctcctgcctcagcctcccaagtagctgggtctataggcgtgcaccaccacacctggctaatttttgtatttttagtagagacggggtttcaccatgtgggccaggatggtcttgatctcttgacctcgtgatccacccaa

SEQ ID NO: 701440 - DNA, 657 bp, Homo sapiens
gtagcagctggcccctcatctggtgttcatccagtggacctcgtcatgagtaagaaggaggagggtgggagggtcacactaataccatcctctgaatcagggatggactgactctactgcttgttactgctgtgtgagatgtactgcccattccagccaataaaagttaatcaacgttaactatcccaatggctggaaagtggcactccctgcatatttgcttgtcttcagatggcaagtgtcccagaacaaatggattgctgaaggcagtcaaaagtaaaggaagggtcctgggtcactcctggggtgatgaagcttcccatggagccagcagggcaactcaattgggctctgttttcatagacaattgaattgcactcccagttctgagcacccaatctwattgcctatgacatgtgactgtcttgaaagaagacctagggtctggtagggtgacctccctgcccctgctgcccctgctgagcctcaggacatccatcttagccttaatcatttagcctatgaatagtctcttggggaaaagtctgatgagagtctgggagatgaaagctgacttgtggctcaagccatgtgcctctgtacagattgtcctgtgctgaagccatcttggagcttaacccaggtgtatccagtgct

SEQ ID NO: 701441 - DNA, 776 bp, Homo sapiens
  misc_feature 554: n = A,T,C or G
tgactgtgtactagagcctagccaagctgacacataaaactaactggcacgccatctacctgataaatatttactaagtgcttatcacatgccaagttctgagataaatcacacgcaatccctgccctctaaaggaagggcataagtcatttaattaaagacattaaaaatgttattcgacaaatctataagagatagagaacaagagctatctttgcaggtttggaagaaggaatagtacttccaggtaaagaaggcggaaaagctgaaaacacaaaagacaattgaccttgtccttggagaacaggtaaaataagaacaagacaggaccgtggcattcctagtgagagaaatggcataagaaaaagtgtggagtcaggaaaatgtgtgatgtttatagaaacattgagtggttcagtttggctggaaatatacgagcattcatcaaaacctcttttatttagccagtgattactccatgcttgttcaagtactcattccaaagctgttagcacatttrcagatgaaacagagagatcgagaggttcctccanaatcacacagaaaacctccagggcatgacacatacaagtcaatcccattttcttttggaagctagatgctgctgactcttcaaaacaatttttgccatccttgagaaataagaatgcttttatctctgtttttcagtttaactgtctttgaaaaagccactatttcttcaataaatggaagaaatgtattaggccctaatttttagtgaacatacatgtagg

SEQ ID NO: 701442 - DNA, 1503 bp, Homo sapiens
  misc_feature 1186, 1201, 1208, 1209, 1210, 1211, 1212, 1213, 1214, 1215,1216, 1217, 1218, 1219, 1220, 1221, 1222, 1223, 1224, 1225,1226, 1227, 1228, 1229, 1230, 1231, 1232, 1233, 1234, 1235,1236, 1237, 1238, 1239, 1240, 1241, 1242, 1243, 1244: n = A,T,C or G
  misc_feature 1245, 1246, 1247, 1248, 1249, 1250, 1251, 1252, 1253, 1254,1255, 1256, 1257, 1258, 1259, 1260, 1261, 1262, 1263, 1264,1265, 1266, 1267, 1268, 1269, 1270, 1271, 1272, 1273, 1274,1275, 1276, 1277, 1278, 1279, 1280, 1281, 1282, 1283: n = A,T,C or G
  misc_feature 1284, 1285, 1286, 1287, 1288, 1289, 1290, 1291, 1292, 1293,1294, 1295, 1296, 1297, 1298, 1299, 1300, 1301, 1302, 1303,1304, 1305, 1306, 1307: n = A,T,C or G
tttaagtaaaatgatttttactttaaaacaattttaatggctgataaggggaccttgtagaatttctgaggttatcaatggcattggagttctttgtgtcaggaacttggggaacagattttgcaaaatgagacttaccagggtgacttttgaatgctgtggggacagccagattttctgggacagggttgccaccgtgcaggctgtttgggtagggtgagatggcagttggtatattctaaatcaagagtcgaagaattcagtctataatgattgttatatattatgccttagcagtttctactgctggtctacaatttgctggttgggaatttttagaagtacattctaaaacttggaggagaacttctatgtaacctattactggagggaaagaaaattgaagtttgaaaaggttgctgtttgacttcccacaataggaatagcagcaggctttgtggcatatttttctattttccagttgctacttctgatattaagacacagtagtacttgttcactgacacactgagtacaggcaggcagtatatcgcatacctagtagtgtatccattatgtaaccccccagttccttcctctacctctttgctcctgtgaaggtagtctaaatgggagccctttaaaaagtgataggtggccgggcatggtggctcacgcctgtaatcccagcactttgggaggctgaggcgggtggatcacaaggtcaggagatcgagaccatcctggctaacacggtgaaatggatcacaaggtcaggagattgagaccatcctggctaacacagtgaaaccctgtctctactaaaaatacaaaaaagtagctgggcatggtggcaggcgcctgtagtcgcagctactcgggagrctgaggcaggagaatcgcttgaacctgggaggtggaggttgcagtgagccgagattgcaccactgcactccagccgggacaacagagcgagactccgtctcaaaataaaataaaataaaataaaattggagtagagtagagtagaataaaataaaataaaatataaaatcgtgataggaaggcacctttgatcaccatgtttgggacattctcagtctactaaagaaaccaaatagtcattgttcatatatatatgaacaatatatatggactattttattaatttatttatgatgtaacntactaagagcggttncaacaannnnnnnnnnnnnnnnnnnnnnnnnnnnnnnnnnnnnnnnnnnnnnnnnnnnnnnnnnnnnnnnnnnnnnnnnnnnnnnnnnnnnnnnnnnnnnnnnnnntttttaaaaagcactgattggtaactcaccactaaggccaaagattcactcgcaagttttaaaaggctgggtacagtggctcatgcctgtagtcccagcgactcaggagcctgaggtgggaggatcacctgagcactggaagatgaggctgcagtgagccatgatagcatcattgcaccctagcctgggtaacaga

SEQ ID NO: 701443 - DNA, 1244 bp, Homo sapiens
ggatgctgtcagcaaaattcataatgttagaactctgcagaaaaaaaaaattgtttttcccccaacaaataaatctcataaaaaagaatatagattataaagaagcctaagagacatatcaacccttaataaaaggatcctgtttggctctgaacacactaatgaaattggaagaataattagatatttgatgctagtaagggaaattttattaatattacattaatattaagtaatattacattaatatcaagtaataaacattttagataacataatagtattgtggttattattaytatttttaaaatcatcattttttaaagagagggtctctgttgcccaggctggggtgcagtggtatgagcatggcttgctgggtacaagtgatcctctggcctcactgtcctgagtagctgggactacaggtacacaccaccatgcccagctaatttcatattattttttgtagagatgggggtcttgctatgttgcccaggctggtctcaaactgctggcatcaggtgattctcttgccttaaatcctcatcttcaagcctatttaaaactgaaaacccttatcctgaatttcttatcagtaaaataaggaagaggactaaatgtctttgctgctttctctgtgctctgctctagctgttatataatagccactccctcatgatttccttctcagaatcttattattataatgtataagcaataatgttgcttgtggataagactttatttaatgcgtctacctctgggggcaggaacttcagggctcacgctggatgacctgattgaccctaggaagttgctctgtaccctcttccagaccatttgtcccctcctgagcaggatctgaacataacagctctgggccttgagtcaggggtcatttagggtcttgataaccaagaatgtatagactgggatgagttagacttggtggagagccaaccctctgtgtggaagtcctaattcttcagtaggtgataactgattaatacccatgtggaaaccagaagcaataaccaccagagagtagtaatgatttggcacaccaccccctttttgcaagttattatttgtgttttaaaaatcattcagtctggccaggcacagtggtcatgcctgtaatcccagcacttgggaggccgaggcgggtggattacttgaggccaggagtttgagaccagcctggccaacatagtgaaaccccatctctactaaaaatacaa

SEQ ID NO: 701444 - DNA, 1244 bp, Homo sapiens
ggatgctgtcagcaaaattcataatgttagaactctgcagaaaaaaaaaattgtttttcccccaacaaataaatctcataaaaaagaatatagattataaagaagcctaagagacatatcaacccttaataaaaggatcctgtttggctctgaacacactaatgaaattggaagaataattagatatttgatgctagtaagggaaattttattaatattacattaatattaagtaatattacattaatatcaagtaataaacattttagataacataatagtattgtggttattattattatttttaaaatcatcattttttaaagagagggtctctgttgcccaggctggggtgcagtggtatgagcatggcttgytgggtacaagtgatcctctggcctcactgtcctgagtagctgggactacaggtacacaccaccatgcccagctaatttcatattattttttgtagagatgggggtcttgctatgttgcccaggctggtctcaaactgctggcatcaggtgattctcttgccttaaatcctcatcttcaagcctatttaaaactgaaaacccttatcctgaatttcttatcagtaaaataaggaagaggactaaatgtctttgctgctttctctgtgctctgctctagctgttatataatagccactccctcatgatttccttctcagaatcttattattataatgtataagcaataatgttgcttgtggataagactttatttaatgcgtctacctctgggggcaggaacttcagggctcacgctggatgacctgattgaccctaggaagttgctctgtaccctcttccagaccatttgtcccctcctgagcaggatctgaacataacagctctgggccttgagtcaggggtcatttagggtcttgataaccaagaatgtatagactgggatgagttagacttggtggagagccaaccctctgtgtggaagtcctaattcttcagtaggtgataactgattaatacccatgtggaaaccagaagcaataaccaccagagagtagtaatgatttggcacaccaccccctttttgcaagttattatttgtgttttaaaaatcattcagtctggccaggcacagtggtcatgcctgtaatcccagcacttgggaggccgaggcgggtggattacttgaggccaggagtttgagaccagcctggccaacatagtgaaaccccatctctactaaaaatacaa

SEQ ID NO: 701445 - DNA, 515 bp, Homo sapiens
tgacaaaagtccaggccattgtaaacattgctttctcctacatgcgtaacaggcatgcattttttgccaccagaatcactaatctactatagggtrataagactatatcaaaactagctgtctcttctgtttcctctccggtttaactgaattttgcagagctggttgaggtgaaagttacttttttaattgactgagaacttgcttaattaggttttggattaaatttggaagagactattcaattaaaatacatatatatttatcaggcacctttacaagtcactttatttatttttgagacaggttctcactctgtcacttaggctggagtgcggtggcacgatcatagctcactgcaacctccaactcctgggctcatgggatcctccctcctcagcctcccaaatagctgggattacaagcatatgccaccatgcccggctaatttaaaaaatcttttggtagagatggcttggggtgggggtgggggtggggggctccctatgttaccc

SEQ ID NO: 701446 - DNA, 654 bp, Homo sapiens
tctctaagaaaataaaaaaggaaacccatttgggatttcaacacactagagtattaatattacctgtaaaggaaatggactattttctactgttgcataatctctaagagatattattttttaaagtaaggtataggacaacatgtacaataatgctacctttagtaagggtagaaaaaaatgaaaatgtgcattcatttgcttatattaaaagaataacgaatagaaagcaaacttaaaaactgattgaagagaacagatggaggagagaacgatagaagctagactttcctgaatgtaccttgctttgtggcttactttggaactattaaatgtgatatataattatgaaataacattttaaaaagttgagggaggaactyatcctttaaaagttgaaagtaatggccaggtgtggtggctcacgcctataatcccagcactttgcgaggcttgaggcaccccccccctccaccaaaaaaaaggaaagtaacaatgaacaaatgaacttaacagtgttttgtttgtttgtttgttttgttttgagacggggtctcgctctgtcgcccaggctggagtgcagtggcacaatctcggctcactgcaagctctgcctgccaggttcacgccactctcctgcctcagcctcctgag

SEQ ID NO: 701447 - DNA, 1479 bp, Homo sapiens
tttttattaaatcacctgtcttttctccacagatacaaatgctatgtctaaattttatcacagtcttgggtctgttgttgggctgtcttttgctccattgatgtgtcttttggcaactgtggcatattgtttcactgtatctttatatgtcataatattgaggcagattctttgtaattcttgtttttagaattttcatagctattcattctcatgcttctcagtgtattctgaagtcattcatcattttctagaaaatttatgattggcattttgattggaatcccttggaattcatcagttagagttgactactgtaggctattaaaacgtcttcctataagaatgtagatatcagactggtgaaaatttaaggagctgaagtaattttaaattttaattgtaagattttcgtggaggtgatttttcaaaaaggtttagttactgatgttggttcctgtgttatttctggtagatgaatcaattatattaggtaaaagtattatcattggcatgattaaaaagatgttttagcttaaaacctaaatgatgggttgataggtacagcaagccaccacagcatgtgtatacaacctgcatgttctgcacatgtatgtaacaaacctgcatgttctgcacgtgtgtttaacaaacctgcatgttctgcacatgtatcccaggacttaaagtaaaaaaaaacaaaaaaacaaaaacacaactttttttttttttttttttgagatggagtctcactctgtccctcaggctggagtgcagtggcgtgatcttggcccctctgcctcccgggttcaagcgtttctcctgcctcagcctcctgagtagctggcactacaggcacccaccaccacgcccggctactttttgtattttgtattttttatttatttatttattttcagtagagatgtggtttcaccatattgtccaggctggtctcaaactcctgaccttgtgttccccyccacccccactacccacccccaccttcagcctcccaaagtgctaggattacaggcctgagccatggcgcccagcaaaaagaaaaaagatactttatattctatgacatattttttttgttttgctagttattaagtttggatgggtaactgccccttatagtaacattctagcaattacagagctgtttttattatttgttacttttatcataatttctagctcctcacctcctcaatatgctccttttagttttagtacctactacaagtggtaagtttggggatatcctttaaaaagctctatttttaatacacaccagtagctcacttgtttaaatgtttaatcatgataggtatttaatcttttatttgcccagaaaaaaacattaaattcatgtggaactggtccaggactaggatatatttgcaaaggaaacagatgtgtattgagtacgcagctctaatcattcaaactaaattgaagtctgaacgtgaa

SEQ ID NO: 701448 - DNA, 1479 bp, Homo sapiens
tttttattaaatcacctgtcttttctccacagatacaaatgctatgtctaaattttatcacagtcttgggtctgttgttgggctgtcttttgctccattgatgtgtcttttggcaactgtggcatattgtttcactgtatctttatatgtcataatattgaggcagattctttgtaattcttgtttttagaattttcatagctattcattctcatgcttctcagtgtattctgaagtcattcatcattttctagaaaatttatgattggcattttgattggaatcccttggaattcatcagttagagttgactactgtaggctattaaaacgtcttcctataagaatgtagatatcagactggtgaaaatttaaggagctgaagtaattttaaattttaattgtaagattttcgtggaggtgatttttcaaaaaggtttagttactgatgttggttcctgtgttatttctggtagatgaatcaattatattaggtaaaagtattatcattggcatgattaaaaagatgttttagcttaaaacctaaatgatgggttgataggtacagcaagccaccacagcatgtgtatacaacctgcatgttctgcacatgtatgtaacaaacctgcatgttctgcacgtgtgtttaacaaacctgcatgttctgcacatgtatcccaggacttaaagtaaaaaaaaacaaaaaaacaaaaacacaactttttttttttttttttttgagatggagtctcactctgtccctcaggctggagtgcagtggcgtgatcttggcccctctgcctcccgggttcaagcgtttctcctgcctcagcctcctgagtagctggcactacaggcacccaccaccacgcccggctactttttgtattttgtattttttatttatttatttattttcagtagagatgtggtttcaccatattgtccaggctggtctcaaactcctgaccttgtgttcccctccacccccactacccacccccaccttcagcctcccaaagtgctaggattacaggcstgagccatggcgcccagcaaaaagaaaaaagatactttatattctatgacatattttttttgttttgctagttattaagtttggatgggtaactgccccttatagtaacattctagcaattacagagctgtttttattatttgttacttttatcataatttctagctcctcacctcctcaatatgctccttttagttttagtacctactacaagtggtaagtttggggatatcctttaaaaagctctatttttaatacacaccagtagctcacttgtttaaatgtttaatcatgataggtatttaatcttttatttgcccagaaaaaaacattaaattcatgtggaactggtccaggactaggatatatttgcaaaggaaacagatgtgtattgagtacgcagctctaatcattcaaactaaattgaagtctgaacgtgaa

SEQ ID NO: 701449 - DNA, 1479 bp, Homo sapiens
tttttattaaatcacctgtcttttctccacagatacaaatgctatgtctaaattttatcacagtcttgggtctgttgttgggctgtcttttgctccattgatgtgtcttttggcaactgtggcatattgtttcactgtatctttatatgtcataatattgaggcagattctttgtaattcttgtttttagaattttcatagctattcattctcatgcttctcagtgtattctgaagtcattcatcattttctagaaaatttatgattggcattttgattggaatcccttggaattcatcagttagagttgactactgtaggctattaaaacgtcttcctataagaatgtagatatcagactggtgaaaatttaaggagctgaagtaattttaaattttaattgtaagattttcgtggaggtgatttttcaaaaaggtttagttactgatgttggttcctgtgttatttctggtagatgaatcaattatattaggtaaaagtattatcattggcatgattaaaaagatgttttagcttaaaacctaaatgatgggttgataggtacagcaagccaccacagcatgtgtatacaacctgcatgttctgcacatgtatgtaacaaacctgcatgttctgcacgtgtgtttaacaaacctgcatgttctgcacatgtatcccaggacttaaagtaaaaaaaaacaaaaaaacaaaaacacaactttttttttttttttttttgagatggagtctcactctgtccctcaggctggagtgcagtggcgtgatcttggcccctctgcctcccgggttcaagcgtttctcctgcctcagcctcctgagtagctggcactacaggcacccaccaccacgcccggctactttttgtattttgtattttttatttatttatttattttcagtagagatgtggtttcaccatattgtccaggctggtctcaaactcctgaccttgtgttcccctccacccccactacccacccccaccttcagcctcccaaagtgctaggattacaggcctgagccatggcgcccagcaaaaagaaaaaagatactttatattctatgacatattttttttgttttgytagttattaagtttggatgggtaactgccccttatagtaacattctagcaattacagagctgtttttattatttgttacttttatcataatttctagctcctcacctcctcaatatgctccttttagttttagtacctactacaagtggtaagtttggggatatcctttaaaaagctctatttttaatacacaccagtagctcacttgtttaaatgtttaatcatgataggtatttaatcttttatttgcccagaaaaaaacattaaattcatgtggaactggtccaggactaggatatatttgcaaaggaaacagatgtgtattgagtacgcagctctaatcattcaaactaaattgaagtctgaacgtgaa

SEQ ID NO: 701450 - DNA, 1215 bp, Homo sapiens
taaatctcaaaataattcaaggtcaatcagactcaaatgtgacaaaaatgtgtatttttgaaaaaaatttaaattgggatcaaaaagaatttctaaaactaggcataaaccagttttcataatcgaggagactgataattttgactactagaaaattaaaaccattgttttcagaaaattccacaaacaaacagggcaaaaaaacaaagtataaagtcagagaatatgaatttcctacttattggtaaagcacaaaatatctctaaaaaatataaatttgtaatcaaaatggcaaataaacaattaaaattatagttgactccaatagtaatagatgaaaagtaaatttaaggcacaattattaataaaactatyacacaacaaaacagaaagtcaaatactttaaaaaaaaactttccaaatgataactttcatatagtgataggaggtatatatattgttagaatcacattgggaaagattttgatatcatctagagaatttaaaagtgcacaaatactttaacagagcaattttacatctaggtacataacctagagaaaattcttcacttatatcttccagaagacatatttagtcataactgtagcataatataatggtatgtcatataacagttcatataaataaatcaaagctacacacacacacacacacacacacacaagtcatacaacaaacataattttaagaaaaaaaaagtcacaaaagatcaaaaacagcctgaactaaaatatatcatttagaagttcgtatatcagtagtagaactattaaaaaaaaaaatcaacaatgccaacgcagtagattcattggcagaggaaggaagaggatgtgattaggcagagaacatagggagttacaaatgtccttttcatgtcctggtttttgctttatgaacatataggctttatatactctattgcatgtatacaaaaataaatccttctatttttaaaatttcctgctctataagataaactacacactcctaaacttgtcaaatgaggcccttcaaaatctaaccttatgccaccttttaaatctcatctctcaactttctgttaaaagatttctgtttctaacatataagataatccaaaaactttctcacttttctgactttgaccttcacccttattctgactaccatttccccctttagtttttcattaaatgaacaaaaccttcatgg

SEQ ID NO: 701451 - DNA, 1596 bp, Homo sapiens
cttgcatttctctgtgctctgaagtcagcaatttgagcagcaaatgggaaattacgttttgtatagacttctgaaattgtctatgctgaataatacttctattagtttgcaggggctgccacagcaaaataccacagtctgggtggcttaaaaaacattagtttattttctcacagttcttggggctagaagtctgagatcagggtgtcagcaggtgtgacttctcctgaagcctctctctttagcttgcacatggctgccttcttgctgtgttctcccatggctttttctcgtgtgcgtttctctgtggttcctctctctgccctaatttccttttcttatacagacactagttagactggattaggacccacactaacggcttaatttttactttatctcctcttttaagggtctgtctccaaatacagtcacatacattctgaggaactgagggtagggcttcaacatatgaattttggggtaaggaggttgtacataaacatataaatataaacatttgagtaaaatagacacagttgcctttaaactagattttatttcagtatgcgaaatgtaaatataagtatgtttttaagattattctaaaatttcctatagtcctaaatatatatatatatgtatgtatatatatatacacacacacacatatataaactcatgtactacagagcaattatggaccgcatgtacaacagtggcttaaactgtactttttctatgtttggatatgtttagatacacaaacgttgtactatatttgccgtttcattgtattacaattgcttacagtattcagcattcagcaacaggtttgtagcctaggagccataggctataccatatagcttcagtgtgtagtaggctataccatgtaggtttgtgtcagtacattctatgatgtttgcacaagatgaaattgcataacaatgcatttctgagaacatatcccatccttaagcaatgcatgattgtatatacatacatakgtatatatgtacgattaatagcatatgcaatcactagtgattatttacaaattgaacattttcttgaatttaaaaatcaaatgtttaactatataattataatttataattaatcctttttcatccttttcagtaattaacaaggcagaaaaagaataagataattattataataacatctatgtctgcttttaaagcatgttgaattctatttaaatatatttctaaaactgatatgtcatagtgtcatccaccttagaatgatatatttctaagattccctaaaataatttctactaatgtctcttcaatgtataagaaaaagataaaatttctttcaaaaactgtgtctgaacagtaaatgtacttctagaattcataagaaattttgactcatttcaatccatacaaattgattgaatatgaagttaatgggcaccaagaaatgacaagtcagtataactttacagtagatggaaaagtttcttacctctgctcctagatgcagaaacttttttttttctctatctctcatctgcttctcttccccactccatcttcctctccctttctctgtctttctgca

SEQ ID NO: 701452 - DNA, 652 bp, Homo sapiens
cttataacaacctttggtgtattcaatatcctccttatttttctgaagatatttattatgcttatttctttaattattgtcatcccgttatatcagttttcttttacttttatttgtatattattcaattttttatttgtttcataatgattttgttcttccaataactcctattatttctgtgtaaacttacattttcatctctaatgaaagtcagttctttttattattaatgattacctggagtttggccaactgccttggccttagcttacacatttaaagatgagttgatgggcagaggcagagtccctgttgttgcaatttgggtatgttcttttctctctgccactcttcctatgttctttgattaaagaggccattgctttatcttgtgtccattattttccaattgaaattgcakagcccacagcaggggtgagtggattacttagggcctttcaggcagcctgcatatttctacatgatctcataacaaccaggtgaaaagcatcccaaaactgccactgaaaaactgcatgtcttgtttgtgttgcctttgtagctcctgggtatatactcatccagattttgtctggaaagctttttatctcttttcatttgttcactcttgtatttctttcagatttca

SEQ ID NO: 701453 - DNA, 733 bp, Homo sapiens
caaacatgaaattacttagttctgcataaatttgtttataaagttttgttttttattttatagttatcacatkgctatatcattaaataatacatgtattcatttttgccagtttaaaaagttgaatcatgatatacctctatgtactagttgtattcctaagcttccagtattacaaaagtttgtgtgtgagcgacatttcagaatgacctaccttccagttttttctaaaatataatatatattaagtaatgtagaatataattgctgctaagtattatgaatggttaagaatacattaataacagcagttacagagaaatacaaatattattttggtttttcttttatgaaataaataagatagtaatttcatcctgaaaaaaagtgctaatcagatccagaatataaaagaacacagtgaaaaacaaattttgtggtagtgtagcaaactgtagaacatttaagggaaaggaattttatcgcttttgtatataacacctaaattttaaaagacatttttaatatattaaaattttggcaaagttttcttactcacaagctatttattttaatgaaattaattcatcaaagttattctgccaaatattatattaatgaaaaacttggagttggctttttgtctgttaatataataaattggtttcagagttatcactttacaaagagtaataaaaggttattttttcccatccatgtaaactctagtgtt

SEQ ID NO: 701454 - DNA, 617 bp, Homo sapiens
catgtctccctcaaaccacatcacatcactctgacattgctgcctcttctgtctctctcttcacttttgaagacccttgtgactggctacattgacccaactgataatccaggatacttctcctgtcttaaggcttaattaattcccctttgctatgtaactgaacatactcaaggatttcagagattaggacacggacttttggggtgccttctgcagcaccccaaccctgaataaagaatgtactcatcatccccctttcactgcataacccctgcccccagagggcttggcctgcagctttatgcctgttgtcctggcataatcattagcagcrcctcacttctccaaaatgtctataaactgtatagtccaccctttttgagtactagaagttctcaatatagccaatgattccttaatgacatcaatatccagttaatgctgcattcctctgatggttccaagtgatttttttaattttcaaatcaggacccaaataagctttcatcccaatttgttgatatgtttctacagtctcttaatctgtaatcaataatccctttcaatatgttgtgaacaaaagttctctgaaaaagaatttggaggaaagagac

SEQ ID NO: 701455 - DNA, 597 bp, Homo sapiens
ttgcaaaagaaaaataagtgatttaaatgctgcagactatttcataaatctcccaagacttggtactgtttgtagaagttattcttttatattcattttattttacttgtaaatgcttatccaaggagacatgtacctgtagttatgttcctcattttaagatctgctcaatttttttttctagcactacggtgagttctaatatctttgtttaaaaagttttttttttgagacagagtctggctctgtcgcccaggctggagtgcagtggcacgatctcagctcactgcaagctccgcctcccaggttcgcgccattctcctgcctcagcctcctgagtagctgggactacaggcmtccgccaccacacccggctaatttttttgcatttttagtagagatgaggtttcactgtgttagccagtatggtcttgatctcctgacctcgtgatacacccaccttagccctccaaagtgctgggattacaggcctgagccaccgtgcccagccccaaaaagtttttttaaagtaggataggccaggtgtagtggctcctgcctgtaattgcagcactttgggaggctgaggtgggatga

SEQ ID NO: 701456 - DNA, 597 bp, Homo sapiens
ttgcaaaagaaaaataagtgatttaaatgctgcagactatttcataaatctcccaagacttggtactgtttgtagaagttattcttttatattcattttattttacttgtaaatgcttatccaaggagacatgtacctgtagttatgttcctcattttaagatctgctcaatttttttttctagcactacggtgagttctaatatctttgtttaaaaagttttttttttgagacagagtctggctctgtcgcccaggctggagtgcagtggcacgatctcagctcactgcaagctccgcctcccaggttcgcgccattctcctgcctcagcctcctgagtagctgggactacaggcctccgccaccacacccggctaatttttttgcatttttagtagagatgrggtttcactgtgttagccagtatggtcttgatctcctgacctcgtgatacacccaccttagccctccaaagtgctgggattacaggcctgagccaccgtgcccagccccaaaaagtttttttaaagtaggataggccaggtgtagtggctcctgcctgtaattgcagcactttgggaggctgaggtgggatga

SEQ ID NO: 701457 - DNA, 646 bp, Homo sapiens
acaaataatttagttgggatgggaagtttatacatacacatctctctcagatatcaataatcaaaaccacaatgaaggatataaggattggtataacacaacttaagcttattctgacgggkatataaggaacttgtacccaagagaaaatatacatactttcaacccaaatgaaaaagctgtgaaaattgactatgttttaagtcagggatcagcaaactcttgaagtaaagacatattttaagctgtgtgggccacagggtctctattacaacagtcagctctacaatcatagctggaaaggggtcatagacaatatgtaaataaatggatgtggctatattccaataaaacgtgatttacaaatgtaggccccaggccaacctggcctacaagctatagtttgtggacccctgttctaggtaacagaggaaatattttaaaaatccgtaaggctgataccacacaggccacaatcagttaccataatgtagtgttaaaaattaacatactagtccctccctcaagtctaaacaactggaaatttcaaaattttaaatttttaaatgcacttctaaataacccttgggttgaagagaaaataaaaatggaaagtacaaattatttacaagtaaacaaacaaaaa

SEQ ID NO: 701458 - DNA, 1444 bp, Homo sapiens
  misc_feature 1441: n = A,T,C or G
gaggcctctgtatcatctccaacaaaggaggctcagaggtttctggaaaatctggagactcaagactttcaaagccattccccagctgtcctcatcctacatatcagcgactggtgtggcagacctgccttggttgggactagaagaatgaaggattatctgagataacacatgtggaatgctcagacagtgcctggttcatgtggcagtcatgtgtatgtgaagaagcctgtgaagagagagaaaatgaagatgtaggggagagaggatggttgcagatgcaaataaaatgttaggtttagtggcagagaaggagggattttttggctgatggcttataaatctttgaaggaaaggaatgttctctcaagtatacacagcacaaatgttccttcatgtgcagacaagtacaaaggcagcttgcacgtagccctgaaatcccacaaagtggtccacaatgggaaccactgttgggtgaaataatgcatggcttcctgaatgagaactcagatgaccagtggtgggaagagagagagacaatgagaatgtctgggttagtaggggaaaagacagagtttcattgcctcatggcgacataaccagttgatttcaatcaacattcattcgtaaacatgcttgactccttttcagttataatgaatgagacacaatcccggcccctgagttcccgaaaaagactgaaccaaaattacacatgaagaatcactaggtatccatcacaatgtagtcctctgacttttttctacattgacctttcttccctaagggaggtggtgggggcagcaaggggacctttgctaggaaccacagtctcagccattgtcaggatgccgatgagcattaactgaccagcacctgtgcttagagttctaagggacatttgccaggaggagtacctgaatggagagccacatttcccaccagtccaccctcctccttacctcagctctggtcttcctgagatcaaaaatgaagtagatggttgcaggagagcctgcaaaaggcaggcagggatcttgttggtaaactttcatgcagattcattcctytgtaaatcaaccctttttctggaagagcttccttatcagtacgctgggccctggccctcagccagtacagaaagtcatttgtcaaggccttcagttggcagacgtgctccctggactacgtgctttctcgggtgtcccagaaaccctggaatggagtgaaatgcagggctacgtgggagagcagggaggcaagaattaagtcggccccacctttgcccaactcagtgggtctccttgagagaggtctgcagtttcaaggagacttttcagccaatctgctgcgagatcctgtgaaggggtgtgaaggtcttcctctgtgactatagattggccagtctctccttgtgtgtcccaccgttttcattatcctntat

SEQ ID NO: 701459 - DNA, 1128 bp, Homo sapiens
tgtgagaccttttattcatatatcatatgatacatatggttgtgtgtgtgtgtattttgtatattgaatcaaaatatatgtgaattgtagtcagaatttagaaggccatagcattgtggaattgtacactatggaatatgcaaattggaaaagatataataatacttccctgaaaaatcattttccctatgaacttatacccaacttgttttcaaaaatctctcacaattcatttttaaatggaaatgcctmttatgtactacatattaatgatggtgatgaagatgataataactcacttttatttatattatacccttcaagggatttcagctctgttatttaattttattacatttacttctcagcaacactgcaaaaccagctggagaggtagctgtagttctgtttgcattgaggcacagaaggaccaagtgatttgccttaagtaactcaggagctacatgcataaacgtggtcatttaactttcaatgatgctttttttccttaggattgtgttgtttcatgccatacaactgcaattagtttgccatttttatctcttgtgtgggtctttgtcatttgttttgcacttaaaacactatctacaaaaaagttcaaaatatttgggaaaaggcaagaaggagtaaaataaaaatgagttgctgatttagggatttgtaaaattcccaactgttttcacctaagactgaggctttaactgcatcaacctagcagccaatctgctatgtagatatctcttttattcccaaaactatcataggaccttgaatgtaataggctactcaataagtattgttgagttgaagtaaaaattgcaactgtcagatcatattaataggggaattcatggtgatatgagatcaattagaaattaaaggtgaggtggaggggagagaggacatagggtagctttagagcaagcttccaatacagccacatacagtgagctagggagcctcccggccttttctagtacgtggaaaattcatagaaggtggaaattatctgacctagctattcctctaaaattctcatcgtatgataccttcttgatggaaggtttaaaaactactggtttgattacttcaattgatttatagata

SEQ ID NO: 701460 - DNA, 1128 bp, Homo sapiens
tgtgagaccttttattcatatatcatatgatacatatggttgtgtgtgtgtgtattttgtatattgaatcaaaatatatgtgaattgtagtcagaatttagaaggccatagcattgtggaattgtacactatggaatatgcaaattggaaaagatataataatacttccctgaaaaatcattttccctatgaacttatacccaacttgttttcaaaaatctctcacaattcatttttaaatggaaatgcctcttatgtactacatattaatgatggtgatgaagatgataataactcacttttatttatattatacccttcaagggatttcagctctgttatttaattttattacatttacttctcagcaacactgcaaaaccagctggagaggtagctgtagttctgtttgcattgaggcacagaaggaccaagtgatttgccttaagtaactcaggagctacatgcataaacgtggtcatttaactttcaatgatgctttttttcctyaggattgtgttgtttcatgccatacaactgcaattagtttgccatttttatctcttgtgtgggtctttgtcatttgttttgcacttaaaacactatctacaaaaaagttcaaaatatttgggaaaaggcaagaaggagtaaaataaaaatgagttgctgatttagggatttgtaaaattcccaactgttttcacctaagactgaggctttaactgcatcaacctagcagccaatctgctatgtagatatctcttttattcccaaaactatcataggaccttgaatgtaataggctactcaataagtattgttgagttgaagtaaaaattgcaactgtcagatcatattaataggggaattcatggtgatatgagatcaattagaaattaaaggtgaggtggaggggagagaggacatagggtagctttagagcaagcttccaatacagccacatacagtgagctagggagcctcccggccttttctagtacgtggaaaattcatagaaggtggaaattatctgacctagctattcctctaaaattctcatcgtatgataccttcttgatggaaggtttaaaaactactggtttgattacttcaattgatttatagata

SEQ ID NO: 701461 - DNA, 1128 bp, Homo sapiens
tgtgagaccttttattcatatatcatatgatacatatggttgtgtgtgtgtgtattttgtatattgaatcaaaatatatgtgaattgtagtcagaatttagaaggccatagcattgtggaattgtacactatggaatatgcaaattggaaaagatataataatacttccctgaaaaatcattttccctatgaacttatacccaacttgttttcaaaaatctctcacaattcatttttaaatggaaatgcctcttatgtactacatattaatgatggtgatgaagatgataataactcacttttatttatattatacccttcaagggatttcagctctgttatttaattttattacatttacttctcagcaacactgcaaaaccagctggagaggtagctgtagttctgtttgcattgaggcacagaaggaccaagtgatttgccttaagtaactcaggagctacatgcataaacgtggtcatttaactttcaatgatgctttttttccttaggattgtgttgtttcatgccatacaactgcaattagtttgccatttttatctcttgtgtgggtctttgtcatttgttttgcacttaaaacactatctacaaaaaagttcaaaatatttgggaaaaggcaagaaggagtaaaataaaaatgagttgctgatttagggatttgtaaaattcccaactgttttcacctaagactgaggctttaactgcatcaacctagcagccaatctgctatgtagatatctcttttattcccaaaactatcataggaccttgaatgtaataggctactcaataagtattgttgagttgaagtaaaaattgcaactgtcagatcatattaataggggaattcatggtgatatgagatcaattagaaattaaaggtgaggtggaggggagagaggacatagggtagctttagagcaagcttccaatwcagccacatacagtgagctagggagcctcccggccttttctagtacgtggaaaattcatagaaggtggaaattatctgacctagctattcctctaaaattctcatcgtatgataccttcttgatggaaggtttaaaaactactggtttgattacttcaattgatttatagata

SEQ ID NO: 701462 - DNA, 1019 bp, Homo sapiens
ttgtttaactactaacagcacaatggagatagaatttcacatggtgaagacaggaggataagatacaaagcactgtcaaccttttagatatgattggcttcaccagtaaattatcagcgaaggatggatttttcccccaagtacccactagacaatacatcttcccatgtgaacttaaaattacataaactcatggttagtctaaatatataatgaacggagatcacacaaccaaaacaaaaatcaaaatggaaaagattataaaatacgtagcaataaacctaatgagaaatgtgcagaccatataacaaggcttgaggaaaagaaaaattaagtacgtggttggagaaaattcaatattatacaaatgtttatttaccccaaattaatgacatttttggctgtcacaactgatagagcattaccggcatctaattagtagaggccagggatgctgctaaggatccctgctacaaagtacagggcagtccagtgtaaaatatcaatagcggagaggttgtgccctgaactgtctttaacagagaaaatcatgaatatagactctcttatgggtcaagtataatttgaaaacaaaggttcttggcccaaaggtttagattttcagtcaagatcttaaatttatttttactttcctataacattaaaggacagtttgagatttttgtgtttatcaaagaggaatgatagattagaaagtctgtgaaacattaggtggtgattaaagaattatggtgcttaaacctgggtagatgttaatggttcaataacatttttaagaaataagataattaagagagaagatttggcaaatgtgactgtatttacaaaagatccttgtagcttttggctacgtaacacaagcattcctttgttttattcattgtttgttccagatggatttactaaaytgttcagagaaggggacccttattatttacctgtcttatagttgcatacagtaggaacataggaaaggaaccaatttagtaatgcatttg

SEQ ID NO: 701463 - DNA, 512 bp, Homo sapiens
aaccaaaatcagggaaaattttcaagcaaacttacagaaaatagcaaatgcagatttattaagtgaaatataataatgagtttgtaaggcataaagaatctgtagaagcccartgtttccaaatcttgccagactatgcaagacagacttctctctcctccctggctcagctcctaaacagagctattatctgcagagataattccagatgctctgaccccttccaaattcttatttgatgatcagtcatctggagtggaactcttactccccattgaggtttcagagtgatgcaccaaactttgctctcctaattaacactgtgggtcatccccatgcacccagtagttcttagagactggactgtcaggctctcatatctatgacattgcctctagggaggagaaggatgggtggaccccttgagtggccttcaaatgcctcagcattaaaatagaaagctctcatgagtgcctgaaaaatctcagctgttatttctccagcttaaaaat

SEQ ID NO: 701464 - DNA, 2705 bp, Homo sapiens
actttactctctgagcacatttctaggcataatagaaagatcagttcttcacactggagacagaaatatgtcttactctcatccttttgctctcaaccttcaaattcttcacctacaccatatagaaggctggaaaacctcttagtatgttcatcatctgcctaatttaggacaagatgtttaccatcacttcaagaatgactgcgccctctaagacactagctattccatgtaagaagttgcaactagggcttcaactctgtttcacaaataccaaggttcaccctcaccctaagtttcttccataataggtaactcaggtattttcaaaacacattgtattagttcaccataaagaacagttaaaaggaaacggagatgagaaatataactttgccttgcccagcgttcttaacgtgaggtgctgctttattgcactgatgatttgtttaccatcctcatattcgctttcacaatttaaacccatttgatatcttccttgggtttaatctagtgaagtaaaacttttagtctaattttagcatactttaatagattccatttamaaatttttcttgatgctttgtgtttcaccttaaattattaggcactaccaattaaagctagatgtggaattattcactgattttattttatgtttggaaacacagagatagatattgaggaaggaacaatcttttccataatttttcatcttaattatgtcaatacattttgttagtaaaagtgttctgtcacttcatttgaccttttgtgtgtgtgtaaattactgcttatagatactactgcttgagcaaaacctaatttctccatgttaaatgataatataatttttttgagtaatttaattactttgtaattatttcttggagttttaagatttcattttgcttacaaaaaattagccaggcgtggtggcgggctcctgcagtcccagctactcgggagggtgaggcaggagaatggcgtgaacctgggaggcagagcttgcagtgagccaagatggagccactgcactccagcctgggcgagagttcgagactctgtctcaaaaacaaaaaacaaacaaaaaaaagattttattctgctatcatttttctatttcattaactcccttcctgtttgttccaagaatactccccagcagcacttgcagttgcagcttctaccccaagttaaatttgccatgaaatatctcacttttattatgactttcgcattgctctagtatgccaaatttggaaacaaaagacattattctatttaacattctatttttagtagtggtatttccatttacaaaatatagtaactctagattgctgaaaatgtcaaatcctaaaaaacacagcattcttatgcatgttaaacatcatcactcttgaacaggtgttgactgaagattcatttgaggaatctgatttttcccaaacagacaattctgatgttagttctgtttagaaataactccaagaacagtttttatattgtattttcgcattgaatatcagtcatatttgctttagccttaaagagcatgtttatgtaaaattaaatgagtgctttcagtgagctgcactttttttttttcctaaacgagaaaaggggaattctatgattttttttgtttcaagttgttgaatagcttttatagttaaataattttgtgtttttgtttttgtactggataatactcataccacagatgagtaccctgtaaaatgaatttgaaaatctctcagctacgtcacatcataactatgcccagtggatccaaggggataaaaagaattcagctgcatctcaatagcttgtagaataattaggaacatgtaggttttggaatttcactggatcaatttcattgacaactcagaatttaaaaaaaatttttgtaacttctctaacattgtgatacatggtaaaaagtatgacaaataattaagacaacccactattttggaaaatatgtcaattgagtacccactgtggacatgatacacaaagtattttcttttgattattaaccacttctctcttcaaagtttcttcaaccattcctatttagaaatatgcctaagtaacccatctctatctcctaacctcaatctatccaattgacaccaaggtagaatggcgagactgatagcagcaaattgagaacttactgtctctttccagctgctcggctttttgtttattttgcttgttttttagacatttattcctaaaaagggttcatgctgtggaagaaggatatgacaattttctgttttcatggaactatttgttttgttgggaattcaaaaaacagagacaagatttatacagttgaaataaggaactaagtgtgaatcaggtttcagtctaatgttagtaacccagcaaggatgtaagctccatagcagcaggatccttgacagactgtcttattcagctccatcttcagggcttaggacagtgggtggaacacagtagcaacaatagcaacaaactctgttgctactgaacagtcgctgaccatatcctggactgtgaatgtggcagcaagccaaagagggagagttaatttgatccagtgagcttggaaagacttcttggagcaattgggattcgaatagtcaagtacattattgatacttacagaattgctgagaagcaatgaacatttttagtgcttgata

SEQ ID NO: 701465 - DNA, 1388 bp, Homo sapiens
taaaatgcagttacattttactttgttttatccataaaaaacacatatttcaaatcctgtgcttttaaataaactcattacagaaatcatgcagaactgtattcatacagtatcccatatagctctgaatcaaattacattggtcatctatctatggaagttataaatctgagaattgttatgttagagaaagtgagaattgagaactaagtgtgtaaacacagtggcccctattaccctaggcatgagaatgtggcctgacaacaactggagaaataaaatcctctgtcagatcctgcttctgtgatgtcaagtcttcaacctgaaggttgggtccagaggaaaatgagaaattaaaatgtttgcaaagaatggagaggaacatagataaatttgaactgccatgcatcagtcctctgtgaccacgctgtagtcgtacttcaaaaaataaggttctgtttattctatgtaatttccatttaacttgttattagaaatgaatcattacaatcctgtctgctaatttgaaatgactattaaattatttttatgttattcttggcttgtattttgcatgttgtttttaatgttcctgctaaaggtaatgatgmaattataatgtactgaatatttgtctcacaaacaaagaaaggaacaaataaatattaccaaaaaaagttaaccaagatgtccacaaaaaaaaattggaaagagctcttcaaatctatctttcatctcatacctaaggccatgccgttgaataaaatcatactttttcaatttattcagattcctagttcatgattgtatttatttgtgccccttctccccaagggcaaatgggcttgtttttctttagagagctacaaaggacctctcttagccagggactaaacatcactcatatttaaagcaacttgaagtatcctagataatgtactttactttttactttgtaaaaaaatcaatcctctcctgactaaaaaaagcaacctccctctctgcttatataaacactgctactttccactgcctgtactttttcacttcagaaagtacacttaagtgaagaaatttcaagtgatatttgagaagaaatctctcattaactaactttcttccagagaattaaattctacttaaaataagaacaatgacaataattcagagactatacataaataaaagagaataaaaatcgaatcacatcaaatacaggcttgctgggaatatgcaaattatcattgtagaaatgcattctgtatgtaatctgtctcctactgtgtgtgtgtgtgtgtgtctgtgtgtgtgtgtctgtgagtgtgttctcttctgtttgttatatagttgaatcaccataaataatttagaagatgatcaagtgtttt

SEQ ID NO: 701466 - DNA, 1666 bp, Homo sapiens
tataaataaattctaataaaattgtgtgttttttaccaatagaaataatgtggacagcattgctttaggtgatattatttatcaaaatgatgaaaaacaacagaattttaaacaaaattatacagaaattttctttgaagtagatggtaattatacttacagaaaatcaaataataaagtaatccctcartatacttggtgaattggttccaggaccccccacatataccaaactccatgcttactcaaatcccacagtctgacctgctaaatctgtgtatacaaaaagctgatcgtccatacatgaagatttcacatcctgtgtataatatattttcagttacctttggatgaaaaaaatcggcatataagtaagtccagtccattcaaacgcatgttgttcaagggttaactgcatatttaacgtgcaaaagtactgtatatacatatacaggttttaaaaaatctttacgcatgtccagtaggtattcttttgcaactcatagagaacgtagaaaaaatatttttgttttatgggagaggcctttgtattgtatttattgcatcatttcatccctccatatgccaaatttcattagtacacttcagttatttgcaattttatttttgcctcctccaggccataaaaatttatagacagtggaaatattataatcttttcctacccttttctagcctcctgactgtattcatgttctcctgtctgaggagctcatgattaagtgaacctgttgattgttaggttgtctaagttatctagaacaattaaggattgaacacattcctgaactctgaataaaatttctgtttgcattttttgagctttagaaaaataattatagcagtcaacctggctctagagaagggtacaaattcatcctccctggacctgaactgtatatttgtaattgtataaggatgctctatttgctattaataaaatcttgaggataagataaattcttgagagatgaagaaaagtgccataaagaataggagtgtaaactgcttgtgaagataaagagcaaatagaaaagagtttcttttaaaaaatttagaataaaatagacagatttttagagagattattttgaactcaccatcagctgactgttattgttgaatgtttttcattatttttctagagtcccttgtattcattttggaaaaccagatattctcccaatttagaccttgttactataaatatatatttttaaattttttcatttgcttatcatggctctgcttctatctttttcccttggacagctaatatgttgaaaaaaaatacagaacaacctagggcaaaacaaaaaatacccacatcattattttttatatttagatgaaagaaagtgaaagcaaaacaaatagttaaaaaaaaaagcagcaaactacttaacagatgatgtacccccaaaccaaaacttctaattatttatataaaaatctgggtctaataaaatatttatcataagtaatattttggaagtatacctccaaatcaaaaggtgtaattactttaaatatgaacctattaggttacaaacactaggataacataattagcaacaagaactcaattaaactagccagatctcaaatcattattgaggcagacacaggagaaagcaggtctgaa

SEQ ID NO: 701467 - DNA, 1666 bp, Homo sapiens
tataaataaattctaataaaattgtgtgttttttaccaatagaaataatgtggacagcattgctttaggtgatattatttatcaaaatgatgaaaaacaacagaattttaaacaaaattatacagaaattttctttgaagtagatggtaattatacttacagaaaatcaaataataaagtaatccctcagtatacttggtgaattggttccaggaccmcccacatataccaaactccatgcttactcaaatcccacagtctgacctgctaaatctgtgtatacaaaaagctgatcgtccatacatgaagatttcacatcctgtgtataatatattttcagttacctttggatgaaaaaaatcggcatataagtaagtccagtccattcaaacgcatgttgttcaagggttaactgcatatttaacgtgcaaaagtactgtatatacatatacaggttttaaaaaatctttacgcatgtccagtaggtattcttttgcaactcatagagaacgtagaaaaaatatttttgttttatgggagaggcctttgtattgtatttattgcatcatttcatccctccatatgccaaatttcattagtacacttcagttatttgcaattttatttttgcctcctccaggccataaaaatttatagacagtggaaatattataatcttttcctacccttttctagcctcctgactgtattcatgttctcctgtctgaggagctcatgattaagtgaacctgttgattgttaggttgtctaagttatctagaacaattaaggattgaacacattcctgaactctgaataaaatttctgtttgcattttttgagctttagaaaaataattatagcagtcaacctggctctagagaagggtacaaattcatcctccctggacctgaactgtatatttgtaattgtataaggatgctctatttgctattaataaaatcttgaggataagataaattcttgagagatgaagaaaagtgccataaagaataggagtgtaaactgcttgtgaagataaagagcaaatagaaaagagtttcttttaaaaaatttagaataaaatagacagatttttagagagattattttgaactcaccatcagctgactgttattgttgaatgtttttcattatttttctagagtcccttgtattcattttggaaaaccagatattctcccaatttagaccttgttactataaatatatatttttaaattttttcatttgcttatcatggctctgcttctatctttttcccttggacagctaatatgttgaaaaaaaatacagaacaacctagggcaaaacaaaaaatacccacatcattattttttatatttagatgaaagaaagtgaaagcaaaacaaatagttaaaaaaaaaagcagcaaactacttaacagatgatgtacccccaaaccaaaacttctaattatttatataaaaatctgggtctaataaaatatttatcataagtaatattttggaagtatacctccaaatcaaaaggtgtaattactttaaatatgaacctattaggttacaaacactaggataacataattagcaacaagaactcaattaaactagccagatctcaaatcattattgaggcagacacaggagaaagcaggtctgaa

SEQ ID NO: 701468 - DNA, 1666 bp, Homo sapiens
tataaataaattctaataaaattgtgtgttttttaccaatagaaataatgtggacagcattgctttaggtgatattatttatcaaaatgatgaaaaacaacagaattttaaacaaaattatacagaaattttctttgaagtagatggtaattatacttacagaaaatcaaataataaagtaatccctcagtatacttggtgaattggttccaggaccccccacatataccaaactccatgcttactcaaatcccacagtctgacctgctaaatctgtgtatacaaaaagctgatcgtccatacatgaagatttcacatcctgtgtataatatattttcagttacctttggatgaaaaaaatcggcatataagtaagtccagtccattcaaacgcatgttgttcaagggttaactgcatatttaacgtgcaaaagtactgtatatacatatacaggttttwaaaaatctttacgcatgtccagtaggtattcttttgcaactcatagagaacgtagaaaaaatatttttgttttatgggagaggcctttgtattgtatttattgcatcatttcatccctccatatgccaaatttcattagtacacttcagttatttgcaattttatttttgcctcctccaggccataaaaatttatagacagtggaaatattataatcttttcctacccttttctagcctcctgactgtattcatgttctcctgtctgaggagctcatgattaagtgaacctgttgattgttaggttgtctaagttatctagaacaattaaggattgaacacattcctgaactctgaataaaatttctgtttgcattttttgagctttagaaaaataattatagcagtcaacctggctctagagaagggtacaaattcatcctccctggacctgaactgtatatttgtaattgtataaggatgctctatttgctattaataaaatcttgaggataagataaattcttgagagatgaagaaaagtgccataaagaataggagtgtaaactgcttgtgaagataaagagcaaatagaaaagagtttcttttaaaaaatttagaataaaatagacagatttttagagagattattttgaactcaccatcagctgactgttattgttgaatgtttttcattatttttctagagtcccttgtattcattttggaaaaccagatattctcccaatttagaccttgttactataaatatatatttttaaattttttcatttgcttatcatggctctgcttctatctttttcccttggacagctaatatgttgaaaaaaaatacagaacaacctagggcaaaacaaaaaatacccacatcattattttttatatttagatgaaagaaagtgaaagcaaaacaaatagttaaaaaaaaaagcagcaaactacttaacagatgatgtacccccaaaccaaaacttctaattatttatataaaaatctgggtctaataaaatatttatcataagtaatattttggaagtatacctccaaatcaaaaggtgtaattactttaaatatgaacctattaggttacaaacactaggataacataattagcaacaagaactcaattaaactagccagatctcaaatcattattgaggcagacacaggagaaagcaggtctgaa

SEQ ID NO: 701469 - DNA, 1666 bp, Homo sapiens
tataaataaattctaataaaattgtgtgttttttaccaatagaaataatgtggacagcattgctttaggtgatattatttatcaaaatgatgaaaaacaacagaattttaaacaaaattatacagaaattttctttgaagtagatggtaattatacttacagaaaatcaaataataaagtaatccctcagtatacttggtgaattggttccaggaccccccacatataccaaactccatgcttactcaaatcccacagtctgacctgctaaatctgtgtatacaaaaagctgatcgtccatacatgaagatttcacatcctgtgtataatatattttcagttacctttggatgaaaaaaatcggcatataagtaagtccagtccattcaaacgcatgttgttcaagggttaactgcatatttaacgtgcaaaagtactgtatatacatatacaggttttaaaaaatctttacgcatgtccagtaggtattcttttgcaactcatagagaacgtagaaaaaatatttttgttttatgggagaggcctttgtattgtatttattgcatcatttcatccctccatatgccaaatttcattagtacacttcagttatttgcaattttatttttgcctcctccaggccataaaaatttatagacagtggaaatattataatcttttcctacccttttctagcctcctgactgtattcatgttctcctgtctgaggagctcatgattaagtgaacctgttgattgttaggttgtctaagttatctagaacaattaaggattgaacacattcctgaactctgaatmaaatttctgtttgcattttttgagctttagaaaaataattatagcagtcaacctggctctagagaagggtacaaattcatcctccctggacctgaactgtatatttgtaattgtataaggatgctctatttgctattaataaaatcttgaggataagataaattcttgagagatgaagaaaagtgccataaagaataggagtgtaaactgcttgtgaagataaagagcaaatagaaaagagtttcttttaaaaaatttagaataaaatagacagatttttagagagattattttgaactcaccatcagctgactgttattgttgaatgtttttcattatttttctagagtcccttgtattcattttggaaaaccagatattctcccaatttagaccttgttactataaatatatatttttaaattttttcatttgcttatcatggctctgcttctatctttttcccttggacagctaatatgttgaaaaaaaatacagaacaacctagggcaaaacaaaaaatacccacatcattattttttatatttagatgaaagaaagtgaaagcaaaacaaatagttaaaaaaaaaagcagcaaactacttaacagatgatgtacccccaaaccaaaacttctaattatttatataaaaatctgggtctaataaaatatttatcataagtaatattttggaagtatacctccaaatcaaaaggtgtaattactttaaatatgaacctattaggttacaaacactaggataacataattagcaacaagaactcaattaaactagccagatctcaaatcattattgaggcagacacaggagaaagcaggtctgaa

SEQ ID NO: 701470 - DNA, 1666 bp, Homo sapiens
tataaataaattctaataaaattgtgtgttttttaccaatagaaataatgtggacagcattgctttaggtgatattatttatcaaaatgatgaaaaacaacagaattttaaacaaaattatacagaaattttctttgaagtagatggtaattatacttacagaaaatcaaataataaagtaatccctcagtatacttggtgaattggttccaggaccccccacatataccaaactccatgcttactcaaatcccacagtctgacctgctaaatctgtgtatacaaaaagctgatcgtccatacatgaagatttcacatcctgtgtataatatattttcagttacctttggatgaaaaaaatcggcatataagtaagtccagtccattcaaacgcatgttgttcaagggttaactgcatatttaacgtgcaaaagtactgtatatacatatacaggttttaaaaaatctttacgcatgtccagtaggtattcttttgcaactcatagagaacgtagaaaaaatatttttgttttatgggagaggcctttgtattgtatttattgcatcatttcatccctccatatgccaaatttcattagtacacttcagttatttgcaattttatttttgcctcctccaggccataaaaatttatagacagtggaaatattataatcttttcctacccttttctagcctcctgactgtattcatgttctcctgtctgaggagctcatgattaagtgaacctgttgattgttaggttgtctaagttatctagaacaattaaggattgaacacattcctgaactctgaataaaatttctgtttgcattttttgagctttagaaaaataattatagcagtcaacctggctctagagaarggtacaaattcatcctccctggacctgaactgtatatttgtaattgtataaggatgctctatttgctattaataaaatcttgaggataagataaattcttgagagatgaagaaaagtgccataaagaataggagtgtaaactgcttgtgaagataaagagcaaatagaaaagagtttcttttaaaaaatttagaataaaatagacagatttttagagagattattttgaactcaccatcagctgactgttattgttgaatgtttttcattatttttctagagtcccttgtattcattttggaaaaccagatattctcccaatttagaccttgttactataaatatatatttttaaattttttcatttgcttatcatggctctgcttctatctttttcccttggacagctaatatgttgaaaaaaaatacagaacaacctagggcaaaacaaaaaatacccacatcattattttttatatttagatgaaagaaagtgaaagcaaaacaaatagttaaaaaaaaaagcagcaaactacttaacagatgatgtacccccaaaccaaaacttctaattatttatataaaaatctgggtctaataaaatatttatcataagtaatattttggaagtatacctccaaatcaaaaggtgtaattactttaaatatgaacctattaggttacaaacactaggataacataattagcaacaagaactcaattaaactagccagatctcaaatcattattgaggcagacacaggagaaagcaggtctgaa

SEQ ID NO: 701471 - DNA, 627 bp, Homo sapiens
ttcttggcccacctgtagcaagaatctcccacccttgatgaagtcttctcttggtcacttcccatcccgagactcctttgcggttggctgcaaatcacagctgtctttgcctgttgggagctgaaccaaacctctcctctattgagatagccttgattggagtctccctgttttaacaatgccgcagaagctttttctttatcagtggtgaaaggttgcagacattttgttttaaaaacaaaacctcttcccaaccaagaaaacttaacaatataggaagagaaataaaataattttattatgaaggagcacttagctaggatgggacacatcataggcacagattgtgaagatgaaagaagtcttactcttttatataaccaagtaggtaaaacccattgtattcatgttttcaagataaaattgctaaatttatsctatctttacagggaggcaggatttgcaacttggagtcaggtgacagctgaagttaggctcgtctcctctgggaaatgtcctcttttgtttcaggtagttgtgagactgataggaggctaatttagcattcgactttaaaggagtcataattctcaaaccccggtgaattcttacttgtttacaagacca

SEQ ID NO: 701472 - DNA, 580 bp, Homo sapiens
ttatttgtaatccgcaaatcagtactcacagtgccttcaaagtcgtccacaacttgcagagcagcaaacactcatcatcacccagcgagctccttcccagctgaggcatgtgtctttcctgcagtctattgagaactaccttttttttacatgtttgtgcttgcgtatgatttcactgtttttcacagcccccaagtatagtgctaaagcactggctagtgttcccaagcacaagaaagctgtggcactccctacggagggagcacctgtgttagagatggctcaggcatgagttacagggctggtggctgagagttcggtgtgaatgaatcaacagcaggtattaaagcaggcatctttaaacaaatacatgtaaaacaaggtcacacattgttgatgaaaagttgttattcagaggctcgcgggaaccctagccttgtgtttcccttaacagcaataatttagtatttgctaattgactgtggcaactttgtacaacrtaactactgtgaataatgagattaaactgtattttatattcgatgatcttagagaagttaaataactcgtgtaaagttac

SEQ ID NO: 701473 - DNA, 1030 bp, Homo sapiens
tatcattctactttctgtctctacgagtttgactactcatgtaagtgccttatgtaagtgggtgcctcatgtaagtggagatatatatttgtccttttgtagctagcttatttcactttgcataatgtcttcagggttcatccatgctgaatatgtgtgagaatttccctcctttttagggctgaataatattctattgcatgtatagatcacacgttgtttgtctgttcgtctatcagtggacatttgggttatgaaactagatctttttttaaagtgttgcttaactgtatcaatccatagttttatttttatttattccagttcttgatgaccaccacaatcctcgcttaatcaaagatcttctgcaagacctaagctctaccctctgcattcttattagaggagtagggaagtctgtattagtgggaaacatcaatatttggatttgccgattagaaactattctcgcctggcaacaacagctacaggatcttcagatgactaaggtataaatatctcggcataagagttattacactctgtttttatattacagaagttatcttttctaagcatacatgaaagactgctatagctttttgaaagattttctaatgctttcataagtattcattaaattgttttaaaatagaaaaggaccaaagaccccaatggcttatagttgctattggaaagacagtgggaatagcartcatcaaaccaggctgatcctatgggtgattagatgtaaataaatttaccttcatgggaaactgaatatttcagttattagaataacattcagtaaattaaggctaaattgtgttgccagtaattctctatttatttagttgttgcttctcccaagttagtaactttttgtcttcttccttgctgtcttttttggggatgtgtttatagttcttagcaacagtgaacaaggccaaaagaaggtgcaaatcatgtcagtttttttgatattttttctttattctggtaactagtttcaacaagaataatgttaaca

SEQ ID NO: 701474 - DNA, 2476 bp, Homo sapiens
agccaagaagaaaaactgaaaaggaagagccaaaaaggtagagggagaagtaggaagtcaggagaaaaatgtatttcaggaaagaaatggtcgacagagacgaaaatgttataaaaatgccaagcatggcaagagttgaaaatatacgttgaatttagctacagaaaggtagctgaattactcaagcaaaagtggtttctgtaatgtattactttaatttcacgtcccgaacagacttgagtattttataatatagaatatttatatcgtagagaaaaatgtagaatatttacatcatggagaataaatgagagatgaacatctccaaacaccacctcccaactatatttagtataattaacaaaaaacaagctattaaatgggcacttatacaatcctagaagatacagaaaaaaaaggaaggaaattacatagacttcaacaatattcctggatcaaccacaaatgcttaattcttgactggtgtaggaaatgatgaagtaattattctttacacgaagaaaatctcaaaccttgctaaactgacttatagtcagaacatgtctttttcagtcacataatgattaatttaaattcttgctttagaaaatactttattccttaaatttcagcacaattttgataaactttgtctcacagaactgcttcacaactactgaacatcctaaaatgcaaaactcaatgcccatgttcagtcgacctaaagttatctaaaactgtctctaatagcatacagctgattttatgattttcaagaacattcccaccaaaggcagcaaagaccatgaagtagcagatgactgaagtggcaccttgagtctcataaaacacattcaacagaaaatggctgctaggaacatctctgataattatcaaattatctctcaatatcaacttgaaactgtggattcagaaatctatattaaaaaaaaaaatcaagtggataatcctgaaaaatattgctaacagaccaaatacaggattacttcaacgacaaacatttgagcaccaactacatgttattatgctagatgttcctgccctcaaaagtgtgcaatttagctaaggaactaaaaaagaacaatagcaaaacacacacaaattccatacaagtgtaatataataaagtgtgtttacatgtagatatgtgagtgtgcatgtatacatacatacagatatgtccacaatcttgtaacttgtggtaaagagagaataaagttaatttgagcagaaagcaaatcagctgggaaagctctgactagaaactaggactcgatcttcgccctgaagcatggttagatcttaaatgaatggagaggcaaggcaaaaaatatcaatcatgggaatggtgggtgaataagtataaagggcaaaatgtgtgccacagtttgagaaaaataagcagaaaagatgggataaaatggagaaagtttatcagaggactggtacataagcgactagaagccaggtcatagaagaatatcaaaggtgtttagactttattctgtcagtaattaaacgtttttcagcaacagatcagcgtgagcagtgttgttttgagaataataattttctagggcttgtaggatagatcaaatgaaaaacatggagacagaaaaaaacaactaggcaacaaatatcttgccaacagaaccttatctggatgactgtcctatgtacatcccggtatcctcagctgaaaaaatattttaaaacktgatgacacacaaatattgtacttacctatttagacactatgcccactcatcatttaatacacttatcttctagtttcacaatctttataacatttacataaagagcctgcctactgtttccattaatataaccaattcttttacaactacctaaactctacagataattcattttggcaactcagtgaaaaatgaatagtttggtctgaatttctcagctgataagtttgattttttaagggttgaaaggagtgaaatgcagccatggaaataaaaaaatagtccatgcccaaaggcttattttcaacacagaggaaaagatttgtttctctgaagatgtgtgtgcttcacagatttgttatggtatgctctatggatcacaatgaagtttttcttaaagcataatctatacagctcatgaactaaagcacaaactctggatgcagattaaaaacaacaccaccaacaaaaaaagacaagttgcaatttaaaacgtctggggtctggatctcaagttttcaaaaatactcccaaactgaggcttctgagtttgcaaatcagaaaacaatgctactaaagttttatagaatgatgatgacccacggctttcaatgggaatgtatttgttcagctaaaaaatgtgaattgctagagctttatacgcttattttaattaaaattacctttattttgggaatttacaaacacaaaaaaactagaaattactcctgaaaatt

SEQ ID NO: 701475 - DNA, 2476 bp, Homo sapiens
agccaagaagaaaaactgaaaaggaagagccaaaaaggtagagggagaagtaggaagtcaggagaaaaatgtatttcaggaaagaaatggtcgacagagacgaaaatgttataaaaatgccaagcatggcaagagttgaaaatatacgttgaatttagctacagaaaggtagctgaattactcaagcaaaagtggtttctgtaatgtattactttaatttcacgtcccgaacagacttgagtattttataatatagaatatttatatcgtagagaaaaatgtagaatatttacatcatggagaataaatgagagatgaacatctccaaacaccacctcccaactatatttagtataattaacaaaaaacaagctattaaatgggcacttatacaatcctagaagatacagaaaaaaaaggaaggaaattacatagacttcaacaatattcctggatcaaccacaaatgcttaattcttgactggtgtaggaaatgatgaagtaattattctttacacgaagaaaatctcaaaccttgctaaactgacttatagtcagaacatgtctttttcagtcacataatgattaatttaaattcttgctttagaaaatactttattccttaaatttcagcacaattttgataaactttgtctcacagaactgcttcacaactactgaacatcctaaaatgcaaaactcaatgcccatgttcagtcgacctaaagttatctaaaactgtctctaatagcatacagctgattttatgattttcaagaacattcccaccaaaggcagcaaagaccatgaagtagcagatgactgaagtggcaccttgagtctcataaaacacattcaacagaaaatggctgctaggaacatctctgataattatcaaattatctctcaatatcaacttgaaactgtggattcagaaatctatattaaaaaaaaaaatcaagtggataatcctgaaaaatattgctaacagaccaaatacaggattacttcaacgacaaacatttgagcaccaactacatgttattatgctagatgttcctgccctcaaaagtgtgcaatttagctaaggaactaaaaaagaacaatagcaaaacacacacaaattccatacaagtgtaatataataaagtgtgtttacatgtagatatgtgagtgtgcatgtatacatacatacagatatgtccacaatcttgtaacttgtggtaaagagagaataaagttaatttgagcagaaagcaaatcagctgggaaagctctgactagaaactaggactcgatcttcgccctgaagcatggttagatcttaaatgaatggagaggcaaggcaaaaaatatcaatcatgggaatggtgggtgaataagtataaagggcaaaatgtgtgccacagtttgagaaaaataagcagaaaagatgggataaaatggagaaagtttatcagaggactggtacataagcgactagaagccaggtcatagaagaatatcaaaggtgtttagactttattctgtcagtaattaaacgtttttcagcaacagatcagcgtgagcagtgttgttttgagaataataattttctagggcttgtaggatagatcaaatgaaaaacatggagacagaaaaaaacaactaggcaacaaatatcttgccaacagaaccttatctggatgactgtcctatgtacatcccggtatcctcagctgaaaaaatattttaaaacttgatgacacacaaatattgtacttacctatttagacactatgcccactcatcatttaatacacttatcttctagtttcacaatctttataacatttacataaagagcctgcctactgtttccattaatataaccaattcttttacaactacctaaactctacagwtaattcattttggcaactcagtgaaaaatgaatagtttggtctgaatttctcagctgataagtttgattttttaagggttgaaaggagtgaaatgcagccatggaaataaaaaaatagtccatgcccaaaggcttattttcaacacagaggaaaagatttgtttctctgaagatgtgtgtgcttcacagatttgttatggtatgctctatggatcacaatgaagtttttcttaaagcataatctatacagctcatgaactaaagcacaaactctggatgcagattaaaaacaacaccaccaacaaaaaaagacaagttgcaatttaaaacgtctggggtctggatctcaagttttcaaaaatactcccaaactgaggcttctgagtttgcaaatcagaaaacaatgctactaaagttttatagaatgatgatgacccacggctttcaatgggaatgtatttgttcagctaaaaaatgtgaattgctagagctttatacgcttattttaattaaaattacctttattttgggaatttacaaacacaaaaaaactagaaattactcctgaaaatt

SEQ ID NO: 701476 - DNA, 2476 bp, Homo sapiens
agccaagaagaaaaactgaaaaggaagagccaaaaaggtagagggagaagtaggaagtcaggagaaaaatgtatttcaggaaagaaatggtcgacagagacgaaaatgttataaaaatgccaagcatggcaagagttgaaaatatacgttgaatttagctacagaaaggtagctgaattactcaagcaaaagtggtttctgtaatgtattactttaatttcacgtcccgaacagacttgagtattttataatatagaatatttatatcgtagagaaaaatgtagaatatttacatcatggagaataaatgagagatgaacatctccaaacaccacctcccaactatatttagtataattaacaaaaaacaagctattaaatgggcacttatacaatcctagaagatacagaaaaaaaaggaaggaaattacatagacttcaacaatattcctggatcaaccacaaatgcttaattcttgactggtgtaggaaatgatgaagtaattattctttacacgaagaaaatctcaaaccttgctaaactgacttatagtcagaacatgtctttttcagtcacataatgattaatttaaattcttgctttagaaaatactttattccttaaatttcagcacaattttgataaactttgtctcacagaactgcttcacaactactgaacatcctaaaatgcaaaactcaatgcccatgttcagtcgacctaaagttatctaaaactgtctctaatagcatacagctgattttatgattttcaagaacattcccaccaaaggcagcaaagaccatgaagtagcagatgactgaagtggcaccttgagtctcataaaacacattcaacagaaaatggctgctaggaacatctctgataattatcaaattatctctcaatatcaacttgaaactgtggattcagaaatctatattaaaaaaaaaaatcaagtggataatcctgaaaaatattgctaacagaccaaatacaggattacttcaacgacaaacatttgagcaccaactacatgttattatgctagatgttcctgccctcaaaagtgtgcaatttagctaaggaactaaaaaagaacaatagcaaaacacacacaaattccatacaagtgtaatataataaagtgtgtttacatgtagatatgtgagtgtgcatgtatacatacatacagatatgtccacaatcttgtaacttgtggtaaagagagaataaagttaatttgagcagaaagcaaatcagctgggaaagctctgactagaaactaggactcgatcttcgccctgaagcatggttagatcttaaatgaatggagaggcaaggcaaaaaatatcaatcatgggaatggtgggtgaataagtataaagggcaaaatgtgtgccacagtttgagaaaaataagcagaaaagatgggataaaatggagaaagtttatcagaggactggtacataagcgactagaagccaggtcatagaagaatatcaaaggtgtttagactttattctgtcagtaattaaacgtttttcagcaacagatcagcgtgagcagtgttgttttgagaataataattttctagggcttgtaggatagatcaaatgaaaaacatggagacagaaaaaaacaactaggcaacaaatatcttgccaacagaaccttatctggatgactgtcctatgtacatcccggtatcctcagctgaaaaaatattttaaaacttgatgacacacaaatattgtacttacctatttagacactatgcccactcatcatttaatacacttatcttctagtttcacaatctttataacatttacataaagagcctgcctactgtttccattaatataaccaattcttttacaactacctaaactctacagataattcattttggcaactcagtgaraaatgaatagtttggtctgaatttctcagctgataagtttgattttttaagggttgaaaggagtgaaatgcagccatggaaataaaaaaatagtccatgcccaaaggcttattttcaacacagaggaaaagatttgtttctctgaagatgtgtgtgcttcacagatttgttatggtatgctctatggatcacaatgaagtttttcttaaagcataatctatacagctcatgaactaaagcacaaactctggatgcagattaaaaacaacaccaccaacaaaaaaagacaagttgcaatttaaaacgtctggggtctggatctcaagttttcaaaaatactcccaaactgaggcttctgagtttgcaaatcagaaaacaatgctactaaagttttatagaatgatgatgacccacggctttcaatgggaatgtatttgttcagctaaaaaatgtgaattgctagagctttatacgcttattttaattaaaattacctttattttgggaatttacaaacacaaaaaaactagaaattactcctgaaaatt

SEQ ID NO: 701477 - DNA, 2476 bp, Homo sapiens
agccaagaagaaaaactgaaaaggaagagccaaaaaggtagagggagaagtaggaagtcaggagaaaaatgtatttcaggaaagaaatggtcgacagagacgaaaatgttataaaaatgccaagcatggcaagagttgaaaatatacgttgaatttagctacagaaaggtagctgaattactcaagcaaaagtggtttctgtaatgtattactttaatttcacgtcccgaacagacttgagtattttataatatagaatatttatatcgtagagaaaaatgtagaatatttacatcatggagaataaatgagagatgaacatctccaaacaccacctcccaactatatttagtataattaacaaaaaacaagctattaaatgggcacttatacaatcctagaagatacagaaaaaaaaggaaggaaattacatagacttcaacaatattcctggatcaaccacaaatgcttaattcttgactggtgtaggaaatgatgaagtaattattctttacacgaagaaaatctcaaaccttgctaaactgacttatagtcagaacatgtctttttcagtcacataatgattaatttaaattcttgctttagaaaatactttattccttaaatttcagcacaattttgataaactttgtctcacagaactgcttcacaactactgaacatcctaaaatgcaaaactcaatgcccatgttcagtcgacctaaagttatctaaaactgtctctaatagcatacagctgattttatgattttcaagaacattcccaccaaaggcagcaaagaccatgaagtagcagatgactgaagtggcaccttgagtctcataaaacacattcaacagaaaatggctgctaggaacatctctgataattatcaaattatctctcaatatcaacttgaaactgtggattcagaaatctatattaaaaaaaaaaatcaagtggataatcctgaaaaatattgctaacagaccaaatacaggattacttcaacgacaaacatttgagcaccaactacatgttattatgctagatgttcctgccctcaaaagtgtgcaatttagctaaggaactaaaaaagaacaatagcaaaacacacacaaattccatacaagtgtaatataataaagtgtgtttacatgtagatatgtgagtgtgcatgtatacatacatacagatatgtccacaatcttgtaacttgtggtaaagagagaataaagttaatttgagcagaaagcaaatcagctgggaaagctctgactagaaactaggactcgatcttcgccctgaagcatggttagatcttaaatgaatggagaggcaaggcaaaaaatatcaatcatgggaatggtgggtgaataagtataaagggcaaaatgtgtgccacagtttgagaaaaataagcagaaaagatgggataaaatggagaaagtttatcagaggactggtacataagcgactagaagccaggtcatagaagaatatcaaaggtgtttagactttattctgtcagtaattaaacgtttttcagcaacagatcagcgtgagcagtgttgttttgagaataataattttctagggcttgtaggatagatcaaatgaaaaacatggagacagaaaaaaacaactaggcaacaaatatcttgccaacagaaccttatctggatgactgtcctatgtacatcccggtatcctcagctgaaaaaatattttaaaacttgatgacacacaaatattgtacttacctatttagacactatgcccactcatcatttaatacacttatcttctagtttcacaatctttataacatttacataaagagcctgcctactgtttccattaatataaccaattcttttacaactacctaaactctacagataattcattttggcaactcagtgaaaaatgaatagtttggtctgaatttctcagctgmtaagtttgattttttaagggttgaaaggagtgaaatgcagccatggaaataaaaaaatagtccatgcccaaaggcttattttcaacacagaggaaaagatttgtttctctgaagatgtgtgtgcttcacagatttgttatggtatgctctatggatcacaatgaagtttttcttaaagcataatctatacagctcatgaactaaagcacaaactctggatgcagattaaaaacaacaccaccaacaaaaaaagacaagttgcaatttaaaacgtctggggtctggatctcaagttttcaaaaatactcccaaactgaggcttctgagtttgcaaatcagaaaacaatgctactaaagttttatagaatgatgatgacccacggctttcaatgggaatgtatttgttcagctaaaaaatgtgaattgctagagctttatacgcttattttaattaaaattacctttattttgggaatttacaaacacaaaaaaactagaaattactcctgaaaatt

SEQ ID NO: 701478 - DNA, 2476 bp, Homo sapiens
agccaagaagaaaaactgaaaaggaagagccaaaaaggtagagggagaagtaggaagtcaggagaaaaatgtatttcaggaaagaaatggtcgacagagacgaaaatgttataaaaatgccaagcatggcaagagttgaaaatatacgttgaatttagctacagaaaggtagctgaattactcaagcaaaagtggtttctgtaatgtattactttaatttcacgtcccgaacagacttgagtattttataatatagaatatttatatcgtagagaaaaatgtagaatatttacatcatggagaataaatgagagatgaacatctccaaacaccacctcccaactatatttagtataattaacaaaaaacaagctattaaatgggcacttatacaatcctagaagatacagaaaaaaaaggaaggaaattacatagacttcaacaatattcctggatcaaccacaaatgcttaattcttgactggtgtaggaaatgatgaagtaattattctttacacgaagaaaatctcaaaccttgctaaactgacttatagtcagaacatgtctttttcagtcacataatgattaatttaaattcttgctttagaaaatactttattccttaaatttcagcacaattttgataaactttgtctcacagaactgcttcacaactactgaacatcctaaaatgcaaaactcaatgcccatgttcagtcgacctaaagttatctaaaactgtctctaatagcatacagctgattttatgattttcaagaacattcccaccaaaggcagcaaagaccatgaagtagcagatgactgaagtggcaccttgagtctcataaaacacattcaacagaaaatggctgctaggaacatctctgataattatcaaattatctctcaatatcaacttgaaactgtggattcagaaatctatattaaaaaaaaaaatcaagtggataatcctgaaaaatattgctaacagaccaaatacaggattacttcaacgacaaacatttgagcaccaactacatgttattatgctagatgttcctgccctcaaaagtgtgcaatttagctaaggaactaaaaaagaacaatagcaaaacacacacaaattccatacaagtgtaatataataaagtgtgtttacatgtagatatgtgagtgtgcatgtatacatacatacagatatgtccacaatcttgtaacttgtggtaaagagagaataaagttaatttgagcagaaagcaaatcagctgggaaagctctgactagaaactaggactcgatcttcgccctgaagcatggttagatcttaaatgaatggagaggcaaggcaaaaaatatcaatcatgggaatggtgggtgaataagtataaagggcaaaatgtgtgccacagtttgagaaaaataagcagaaaagatgggataaaatggagaaagtttatcagaggactggtacataagcgactagaagccaggtcatagaagaatatcaaaggtgtttagactttattctgtcagtaattaaacgtttttcagcaacagatcagcgtgagcagtgttgttttgagaataataattttctagggcttgtaggatagatcaaatgaaaaacatggagacagaaaaaaacaactaggcaacaaatatcttgccaacagaaccttatctggatgactgtcctatgtacatcccggtatcctcagctgaaaaaatattttaaaacttgatgacacacaaatattgtacttacctatttagacactatgcccactcatcatttaatacacttatcttctagtttcacaatctttataacatttacataaagagcctgcctactgtttccattaatataaccaattcttttacaactacctaaactctacagataattcattttggcaactcagtgaaaaatgaatagtttggtctgaatttctcagctgataagtttgattttttaagggttgaaaggagtgaaatgcagccatggaaataaaaaaatagtccatgcccaaaggcttattttcaacacagaggaaaagatttgtttctctgaagatgtgtgtgcttcacagatttgttatggtatgctctwtggatcacaatgaagtttttcttaaagcataatctatacagctcatgaactaaagcacaaactctggatgcagattaaaaacaacaccaccaacaaaaaaagacaagttgcaatttaaaacgtctggggtctggatctcaagttttcaaaaatactcccaaactgaggcttctgagtttgcaaatcagaaaacaatgctactaaagttttatagaatgatgatgacccacggctttcaatgggaatgtatttgttcagctaaaaaatgtgaattgctagagctttatacgcttattttaattaaaattacctttattttgggaatttacaaacacaaaaaaactagaaattactcctgaaaatt

SEQ ID NO: 701479 - DNA, 1568 bp, Homo sapiens
cacataggtaagtcctggccaatggaatgtgaatggaagtaatatgcaaaacttctgagttgtacctttaaaaggaaagggtgtgcttcccactttcttttgtccccttcttgccagctgaagtgtgacaagaacttgaaatggaagccacaatgtaaggatgacaggacaacctgccagaagactgtgcagctccctcatcagcctgtatgcctagactgtgacatgagggagaaacagacttttgtgtttctaagccagtgytgtctttatctcagcagccaaattggtaacaaaactaatatttaatccagaaatttcctgcactctagcattcacaactcttttttttcaagacaaggtctgtctctgttgtccaggctacagtgcagtggctccatcacagctcacttgcagcctcaacttcccaggatcaagcaatcctcttgcctccatctcctgagtagctggtattacaggcatgtgccaccatgcctagctatttttttatttttttattttttgtagaaacagggtctggttgtgttgcccaggctggtcttgaactcccgggctcgaagatcttcctgccttggcctcccgaagtgctgggattacaggcatgagccaccacatctggccctgcattcacacctttgggttaagaaggtttcaatatcctaaaagacttatgtataaatgtcctaataccctgaacaaatcataatggacaggtaaaaaactgattttgaattaacattatagtttttcttttaagctgaatactggggataaatacatagaagcacacagaaaccagtaaataatccttttattttgttcccacaactaaagtggtatgtgaaaaactgaagaggatgtagaaaagtgcatgcatacaaacaggtgcatgatggcaaaggactggcttattcagttgtaaatctagcggtcaacttaatatccctgtttcagacaaaggatggcaatgaactgagccttctacaatggaaagaagaccattttaaactgcagcaagaaagccttaacgatttggagaaatgtattctcttagcgtgcagttaatcattttagttactgagggaggttttgaaatctctttccctgcagatatttttttaattggatagattttaattttctagaatgtcatgttagaattctgccctacgagggcaagaaggagggagtgaggatggagattatctcaacaaggtccctcatccagggaccagggcttccaatctttccttctccccccagtcaatttcccttctttctcctttttcttctctctctttctctcatgacattaagttggtttgtgcttacatgagaagcaataaactttgtttctctttgctttatttctcatgaccacatgctttcacctatgtccattctataatgtgccacagattgcaaaatttaatggtaggaacagtgtgtatgtgtatgtaggtgtgtgtatctgtgtagggatgtgtgtgtgggggggtggggtggggaatagtggggtggagctagaaagggagtttcacaatgga

SEQ ID NO: 701480 - DNA, 656 bp, Homo sapiens
tttcccatgcccccagcctgactgtcctcgtggggcctccctgccattgaccactttcctgcctgacccagagacacccaggcacagtgctcccaaattaccccatctgcaagctcctctgttgcctgcaaggccctgcctgttgcagtgtgaaacacacaacctaaagggcgccctgtgctgggacagaccctgggaggcagccctgctgacagcaggccctctgacacaagtgagacaaggcggagggcaagggccttctgggggcattttggggaaaggaaggtcatttacactattccaatatcccagctctgtggggaagctgtggggcccggagcgagggtcttctcttccagcagggtgactgctcagaacgcagtagttaaacaaaacatcgtggagacttcttctgtgaagcacscattcatttgaggtctcctcccatccaccattttgctgccccctccgaccccacagaccaacattagggagtgagtgtacgatccccgggagcccgtttccaacaggctgtccagttctgtgggacccccgagccaagcttgtctcaggatcgtggtgtgcagagaaagctaatggacgacctgaactgtgccactgtcagccagcagcctgtgctgggaatcgctgagatg

SEQ ID NO: 701481 - DNA, 1871 bp, Homo sapiens
ttcaaagactacctattcctgaaaatattgcctgattgtctcagaacatacagtcaaattattttgtagagattgctctcagagcagttcacatatcatgggggttcagtacttaaatgatagtcttctgaggtggtagcccctggcatccactggcgagggaacaggaggtcaacagagagcaaaggactggagccggaggccagtcatcactctagcatcttgtccaatttgagaggtcataaccagaatggcagaaatattgatcatccagaccctgtgcttgaagctcgacctttgaagaacgccagagagatgaagacattttttttgcaataataacaacaagcatttactgaaggtgtgttatatagcaggcactctactaaaaatatgatcttattgaggaatgtccatctcttacctaataaaagacagagctagtgtgcaagcatcaatctgacagattgcaaagcttgtgcttttaaacaacatgctgtaytgtctcttgtaaaacagcatttatataagaaagggccaagccagcattaaacccaaatacacacacacacacacacacacacacacacacacacacagacaccacagactcacctactcactggataaatacatgacagatagatcatcctaacctatgctttaggcttcactgaatccttgccaactattaacccttccagttgggcttcaattttggaaattcatattaaaatattagttataaaggtgggcccttctagaagcatttgctattcaacatctgataaaacctactggtagggccataggcctaatggttgactgtcagggagggctggaagatgcacccatttttggacagcacacttagctacagaagcatgcaaaaacatcaggatcctaaaataaagagcaacattgcaaatctttttcctagtttatatgattcatctacactgtgctttgaactcctctatcatcaaagttttccaatacacaaggaactctctctagaactgaatttcacagaaaaaaggctatcaatggaaagctctctgttttacgttttgaaaatgccgtttgtcactgtactgaaacaatattttttgctctaaaatattttaaaaattgtccatttgattacaaaaaagtaattctctctttacaaataacaaccaagccatgaatcagatcagtgttgcattttccccttccattcttgctttgtcttcattaaaggaaacacactgtcaaatgtataattttccctctttgctccttacgcttaattgatttccagcataaaaaaaagagtattagccagaaaaaagggaaaccaagtgatgccctcgaatctcatgagctcctcttaataactgtttaatctaaaactgtgttcacaaatgctaattataaacatccttaattgtgcatgtcacccaccacggttgagtgcaattcaatttcttggactttgacatgatgttctactactacatcaccagccaaggaactgtcgggagctgagcctttttactttccactcagggaagcaaaataggtcagcagtcccagcatggtaaatctgtattcaacgaggaatgtgtcttgggatgtaagagcccttaccagagcataggatatgacctcttgcagcaacagctccatatggattaataaatcaattgaattaactcatttaattaccctgtgccggcaactgcttgtggttctggagctttggagatgagttaacaatagacagagagacattttccagtttactgctatgcaagctactccaagagttgtgatactggctcttgcaagagtggtaaacagcagagaattttacaggtggaaaaggg

SEQ ID NO: 701482 - DNA, 611 bp, Homo sapiens
aaggcccatttgtctgcacacagaaagcaggaggggtctgctggcgtcaagatgtgaactccggccatcgccagggatccaggcctgagtgcaaaggtggggcaggaagcactttaggaccwgcctgcattgtagccacgaccccgtttccacttacagctgggacttcttgagaaaaaagagcatataaaatatgctgctgtaagcaaatgctcatgaactacagaaagaacagtgagcccaaccaagctgagcccctgggaccagggttctcccacccccaccctggccactgtgtgtggtcaaggcccagctctggctgtgggtgatggagcagtgagacaaacactgggccaggacccagggcctgagtttgtagcactggttgtagccttgtcctggtaaagtcaccttgctggtctgtgaccttatctggtgaatcagaatgacacgctcctgcttgtaggcttatttgaaggactaatgagatgtgcgtgaaagtagaaggtctttaacattgtcacactcactttcttcatgaaggaaccaagttcaagggaactgggtgaactatctgcccacttgcaaatgtctgagtccttgagaagctg

SEQ ID NO: 701483 - DNA, 611 bp, Homo sapiens
aaggcccatttgtctgcacacagaaagcaggaggggtctgctggcgtcaagatgtgaactccggccatcgccagggatccaggcctgagtgcaaaggtggggcaggaagcactttaggaccagcctgcattgtagccacgaccccgtttccacttacagctgggacttcttgagaaaaaagagcatataaaatatgctgctgtaagcaaatgctcatgaactacagaaagaayagtgagcccaaccaagctgagcccctgggaccagggttctcccacccccaccctggccactgtgtgtggtcaaggcccagctctggctgtgggtgatggagcagtgagacaaacactgggccaggacccagggcctgagtttgtagcactggttgtagccttgtcctggtaaagtcaccttgctggtctgtgaccttatctggtgaatcagaatgacacgctcctgcttgtaggcttatttgaaggactaatgagatgtgcgtgaaagtagaaggtctttaacattgtcacactcactttcttcatgaaggaaccaagttcaagggaactgggtgaactatctgcccacttgcaaatgtctgagtccttgagaagctg

SEQ ID NO: 701484 - DNA, 1589 bp, Homo sapiens
agaagaaaaacctctagtaactccaatcctctgtgcaacatcggacccgtgctgccttgttctacaatgagttccttccaacctgggggatgctggcctcggctggatgttcacttttgcaaggctgtgaacagaaatactctttgttcactgagaggctggaccagatgagctggtggacgtttagaaccccttggtagcattttaaagcatmcagatttccaggcccctctatcagagcttctgattctggggtgggccctgggaatgtgcatttatttttgaattccccaggtacttcctactgatgagtggggtttgggaaccagcagattaggcagctgctggggtgccttctaacatgaacatttggtgattctactgcatttttctctgataatttcatgtgttggtaaatctaactaaagagtcatttcttggaccagtggcttttagtcttctatcccagcacactgatggacaaagtgcacccccatcaaaaccatggcttcctacaagaggtatctcatggagttcccagggccatgtctcctgtatctgaccatgtctctacaatgcctaacaccatactgggcttatgtgagccactccaggaatgcctagcatttaaagcatttactgtttagttgatactatgctgtgttgggttttcataactgtagggtcatatgaaatcaaattgaggacctgaaggtcccgaccgtgtttagatagctgtggtttcactccataattgcatttcttgtcccacttggctgacttttagtcttatagacatgttgttggattcatatgcatggctgcccagaaccaagtaaaccatttcatgatggcaagaaagcgtggttgacatctccactctgctaaatcccctttcatgttctgactgctttaataaagccgaaattaaaatgtgctaatccgggggaaactggaaacttggaaataatacactaacgtaaacatacaactcaatcccatggattctgaacacttgatcacattgttttaaatcttaagtggcacagctggtggctgaaggcacgctgaagaggatttccataccacttcactaatactttcatttgatgacagataaagcgtgaaagggttttttaaattattaaattctttgatctccatatttccattcagatttactctgaacactgagcagtgtggtgagataaacttataaatatttgctataatagcgcggggtcttctgtgaagaattgttgaaccattgttgtgctgtcggaggaaggtgctgaattcccgcgtgtgtttaaaatacacgagcgcagactccagtctacaccctgtagtccgcattaagcaggcataggtagctgtaggagtggaacaaaagcagcctgtgtttaatctgttcacaaatcttttgttcctaaatacttggaaaggtggttagaccaagtaagggagagattcaggactgggtggaagctttgatttagactgatggctgacaatgcagataggaggctggtctctctaaacacataaattcgttatctaaacagagtgggtaatgtcacaaatgcctg

SEQ ID NO: 701485 - DNA, 633 bp, Homo sapiens
tgcattgtaaaatgtcttctgacacactggattggggtaaagtcaacaattagttactctataaaccaaataaaatgtgattatggggtgctgaggagctgcttgttactcaatggagaaaattattggctgggcacagtggctcacgcctgtaatcccagcactttgggaggccgaggcaggcagatcacttgagttcaggagttccagatcctggacaacatggtgaaaccccatctctaccaaaaaaaatagccaagtgtggtggcacgtgcctgttgtcccagctactcgggaggttgaggtgggagaatcatttgaaccttggaagcaaaggttgcagtgagtccagattgcaccactgcattccagcctgggcgacagagtaagaccctgtctcaaaaaaaaaaaaaaaaagaaaagaaaattattttatttctatctgagctttagttttctcatttataaaagayagtatataacaaaatcatctcttagtacatttcagtctttaagtttctatcatttggttattcagtaatatgataaaccaaaatataaaataattcctatctaattgttagtatgtaatgacataatgagacaaaattattaacaggggttttcagagta

SEQ ID NO: 701486 - DNA, 609 bp, Homo sapiens
caagaccagtctgggcaacatagcaagaccacatctccacaataaattagccaagcatggtaatacgctcctgtagtcccagatactggagaggacgaagtgggaggatctcttgagcacaggaggttgaggttgcagtgagatattattacaccactgcactccagcctaagcaacagagcagtctctaaaaaaaaattttaaayagggccgggtgcagtggctcatgtctataatcccagcactttgggaggccaaggtggtggatcacctgaggtcaggagatcgagaccagtctggccaacatggtgaaaccctgtctctaccaaaaatacaaaattagctgggcgtgctggcacgcgcctgtaatgccagcttcttgggaggctgaggctggagaatcacttgaaccccgaaggtggaggctgcagtgagctgagatagtgccattgcactccagcctgagcaaaaaaagagtgaaactccatctcaaaaaaaaattttttttttaatttacattttaaaaagaaaagaaaattgagctcagcttactgactggtcacctcattaagtggcaatgccaggatgtgaatccaagcttgtagggga

SEQ ID NO: 701487 - DNA, 689 bp, Homo sapiens
atatggcgatagtgttgtatatgtgtctagcagaatctcgctgtgtcgcacagggtggaatacagtggtgcgatctcatattactgcaatctcccacctccggggttcaataggtttttcctgcatcagcctcgcaagtaactgggaccacaggtgcatgccagcacgcccggctaattttttgtatttttagtagagacgggttcatcatattagcaagaatggtctcgatcttctgaccttgtgatctgcctgcctcggcctcccaaagtggtgggattacaggcgtgagccaccgggcctgtcctctacattcctttatccccctttcttgcccttttacttggttatttaaacatcttttgttattctatttctccctttatcagattagttatgcatcctattatttatcttttgatggttattctaggagttacaacatgcaccttgagttttaagacattaccataactttttaaaatcatttatcacttcccagataatatgagaatgttgaaatttaactccatgcacccctttcctaacttttgtactgttrttaattctttttattctatgtatgttttaaatcccgtaagatgttactgtcattgttagaaacagttaatattcacttagttttatctatatatttacttttttggacactatttcttttagcatta

SEQ ID NO: 701488 - DNA, 629 bp, Homo sapiens
accctgtctctactaaaaatacaaaaaattagcccggcgtggtggtgggcgactgtagtcccagctacttgggaggctgaggcaggagaatggcgtgagcccgggaagcagagcttgcagtgagccaagatcacgccactgcaatccagcctgggygacagagagagactccgtctcaaaaacacaagaacaaaaaaaagaatttcattcaattcctgcactgtaatcccagctactcgggaggctaccctttgaggcatttgcttattttaaataggtgtgaacaactttaccggcttaagatacaaataacatcgattttaaatattaaaattactcttactggagcctcccagatcagcaggaaggccaccctatctctctctgtctttctctttctctgtttctctctctcttcccttccttcctgccttcctctctctctcactttccctccttcttgcctcctgtttagagagaggagaagctcagagcggcctttttgtgggcctgggtttcgcctgccaatgctctgccacacacctaccatatggtcgggtgccacccttgctcagaggtgtgatcctgcacatctggcccggcagcagcttcttgtgaatgcggttggg

SEQ ID NO: 701489 - DNA, 3028 bp, Homo sapiens
cgcttccttacattttcagatttcctgagcttttacattgatatctatgcatccggtggaacagtttcgtgcagtagctttcatagggaatttttttttcctgtggatgtatccaataatgtcacttaggtagaatgctttggctttggtcctgggttgttgcagtggtgtagtctccatatgatttctttgggtgtcatcaatgtcagaggtatctcagtaacctaggctgtgttgttgttgttgttgttgagcctgtggcacaactttgctggggatgcagacactaagcaggccagtcattgctctagtagtgcacacacaggtgcatagcagctttactgttagaagtgatgggattgctggtggcagcatccaccccacacaggtggctctcaggctcttttgggtaggtacattggttagctctgttttgggggcaaccttcccactgtgcgggaccacctgctccccacagtgtaaggattttcaaaggcttgggtcactaggttcccctaatgttgtgacgttgaagttcttggttggatgtgatgggatgtcagcatggcctcaggggtgtggagatgcaggaatactgggtcccaggaacatccaccaggatgcactctaatgggagttctgctcacatagcactctcaaaattctctgtgcaatatgagatatgacccaatgtgagttccctctctctggagtaaagtactcacatggactccaggcagctccctatactgggatcagggcttatgaggctttggggttctcctatagttagaattgcagctgcccatggtagaaatgtggactgctggacatctcctgcttaccttttcctcaccatggcaagtccctcttgcctctgagcaatcatagttgggtgtgttacctctttctctgcactgccatcctgagtttctgtgcatcaaagggtcttcatcacttccttgctgaattccagtttctctcttagatacattatttgtcatgtagttattatctatttgttgtttcagttgtacatcgtggaagaggctagttttgaatgcctctagtcagacatcttgatctaaaggaaataattaacaaaatataagttgccactgcatgtcattttcattatgactttgtactttgcagaaagttagtagaaacattaatattgataacagagtaagtcataaaacaattgctttgtaagcagagttattaatatacaaatatgtttataaattttggatacttaccggtcctcaattttgagctactttgtttcccaatacctgaacctatgttttaataaaacggtcagttttttaaaagtctatttgttattaggattatgttctgaaattaatttctaagagatgttttgtaatcaatagatattcaattcagtattctaaatctgatgaattaycatatttaagtttacaaactgaaactgtagagtcaatgtgataatgaccttgaagtataatagtactctcttaaataatttaataataattctgattcttttaccaaagaaacatcatagttttctttgccatgttgccttttctttagatgattgttcagcaccatctagagcaatttattatattaatacaaagtataatagaaaagaaagattttgcctgatattaagcagtaattaaaacactagaattagaatcaattttttaatataactgagaattcaataataaaccctctgtgacaccaattacttatcttggagagaggcacaggggacttgaaaattattaataatttgaatatgcatttaataaaattatgaactgattgacatgggactaggaaaaaagggtgaatttacagtatatccttacaaatgtgttaaatacactatttgaattaagactcgaattcatttttattatggtgtgtttatatattcaattccaaatttaattttcactatttctgccaatattttattttctattctttttaaaattttttaatttcatggatatagtaggtgtatacatgagacatgcattttgattcaggaacacaatgtatgataattacatcagggtaaatggaatctccatcacctcaagcatttatcacttctttgtgttaccaacacttcagttatactcttttatttattgctaaaggtacaaaaaattattgttgactatagtcactctgttgtgctataatttctattctcgaaccaagaatattaatttttttgtaagagaaggaagaatgcataccaattttcaaatgcatgactaattacaggttcatctctcttcaaaaaaggaaatactcatacaagatcacacaccatgggggataattactttataaaaggatacaatgtgacaactgttttctttgatggacttatgacctgagagctttacatagtttcttttcatttcacagctttaccaaatgttattccaatgtcacttcagttacccatgttatgtctgtgtatactgaaaactgattaagtaaacaagaactaacatacaggacaattgtatgtcaatattcttttatttttgatttttttgtgtgtgaaattttggagaaaaacaatagcaacctttagttattttctaagatgtttgttatgtggactcctgtaaagtgagtacttagactatgataatagctttatgttttacttctagattcctttccactgattcttcatatacttacaaatagggacagctaaggaggtagcctatggagtcttaacaatctatttttaaagaaatacaggcaaaaatattaaaaataatgactacagcagtagatgtgacatctaattcaattaagtacaaactataacacgaacagttatgaatgctttacatgaattgactcatgtaaaattcacattaatcctctgacttaggaaaataaggcaaaaaaaaaggttaatctgcccaaggttacaaggctaataagtggtaggatgggcatttgaactgggattcactacagggtctcaacc

SEQ ID NO: 701490 - DNA, 1459 bp, Homo sapiens
tttttaaaaatctgcaaaccagtactagttaaaacagctgcttacatttcagcatctactcaatgtctcttgctaaattaagattctttgtttgaaagagaaataattattctatctttgggctttctgtaatctaagtttactgtgaaaaaagagaattactccattttggtctgtgattcaattgctcaaaagttaaggattggaaagtgaaggagtgaatttcagcaaatggactttctctgggaagaaatctttggtccatttaccataggtaggcaaccgctactggccattatttctaaagtagccctgctcagggctcagagactgcagtggtaaagctctgagagcttactctgtcactgaggcaatctgatcgaagactctctgccacctcagaggagagaaatccagtgctcatgcgaccttgggacagggataattttaagtatggaagtaaaatatggaattttctgaggtttgtttgagcgttcactttcccatttgccagggattattttgtgtgtttatttttaccatagttacatgtccatgactgtggtcctatggaggagctggggcacatacctcctctaaagggtaatgatgtttttttttttttggttttttttttttctgaatacttgagttttcatggtccttaatgagtatgggttacaacttcccttgaatgtctcttgatcctcataacaaccttctgggtcatgctgtttttattcccattttacagatgaggcaactgaagcacatggtgttaattattagtaatgattaattattaataactttcccatggcctcacaaatgatggtgataggttagcaaatctaggctgtcaaactccagaccctgtacacttaaaaactaagggtaattctacacatagagtggaccattcttctctcatcccagaatattcagaatatcaaccctcttcccagtacaggccagaatagccaaagcagaaaactgaggactcttctcaggaaaacctgaactctcccagataaaagtcccttataaatggcaaattgaggaataatcctataaccagttagctctgcccaagtgcacagaactgcaagtcaggtttgtaactctgacacttaaatatacacarataaccaaagatcactgattttttaaggaaatacacaaatgtgaaagataaagcccagaaaaagcaaagctaacatcttaagttgaagaaaacttcagaaatataattcatcttcttagagtgataacagaagacatttcattcataaagtcaaaacaaagtgctatgaaaaaggaactatcacaccaaacaatataaaaaaatatggacatcacaatagaagagaaggcaaagactataaatcagcaaacaaaaaaagagaaaaatataaatggcaaacgtcgccattagtgagagaaaagagaattaaaacca

SEQ ID NO: 701491 - DNA, 660 bp, Homo sapiens
agaccagcctggccaacatggtgaagccccatctctactaaaaattacaaaaattagctgcrcatggtggggagtgcctgtagtcccagttgctcaggaggccaaggcaggagaattgattgaacctgggaggcagaggttgcagtgagccgagatcatgccactgccctccagcttgggcgacagagcaagactccatctccaaaaaaaaaaaaaaaaagaaagaaagaaaaaaaagaaaaagtatattgggaaatagatattcaatatctttcatgggtcaagaaagtggtgtcattttaggcatgctccagcactcctaaataatagggattatttggtaagagacatcagagactcataaagttatttagactgttacatagaagagaacaatgaaaagaaaatttttatccctgccattgaggaagggaagcctaattatagcctaattatagaaggtgatttaaagatagacacacttaatatcttttttatcctctacagaaagatcagagatgaattattgactggggactgatttggttttgaaggaatgagaaatcattaaatcatgttgatttaaataccttattttttccagttattctgtaagaagaaggaacacacttcttacagaatatctggaaaacaaggcct

SEQ ID NO: 701492 - DNA, 660 bp, Homo sapiens
agaccagcctggccaacatggtgaagccccatctctactaaaaattacaaaaattagctgcgcatggtggggagtgcctgtagtcccagttgctcaggaggccaaggcaggagaattgattgaacctgggaggcagaggttgcagtgagccgagatcatgccactgccctccagcttgggcgacagagcaagactccatctccaaaaaaaaaaaaaaaaagaaagaragaaaaaaaagaaaaagtatattgggaaatagatattcaatatctttcatgggtcaagaaagtggtgtcattttaggcatgctccagcactcctaaataatagggattatttggtaagagacatcagagactcataaagttatttagactgttacatagaagagaacaatgaaaagaaaatttttatccctgccattgaggaagggaagcctaattatagcctaattatagaaggtgatttaaagatagacacacttaatatcttttttatcctctacagaaagatcagagatgaattattgactggggactgatttggttttgaaggaatgagaaatcattaaatcatgttgatttaaataccttattttttccagttattctgtaagaagaaggaacacacttcttacagaatatctggaaaacaaggcct

SEQ ID NO: 701493 - DNA, 634 bp, Homo sapiens
tgaaaaaattaattcaaaatcaattcgtacatgtattcaaacctaaagacattaatattagtggcctgattctctgtgggggatgcctaggcagggtgaggtggctcgtgcctgtaatcccagcactttaggaggctgaggtgggaggacagcttgagcccaggagtttgagatcagcctgggaaaatatcaaggccccatctctacaaaaagttttaaaaaaattagccaagcgtgatggtttgtgcctgtagtcctagctactcgggaggctgaaatgggaggatcgcttgagcccaagagattgaggctgcagtgagccatctttgtgccactgcactttagtctgggtgacagagtaagacactgtcccccmaaaaaagaacaaattatagcctagctggcacatatacacattagcaggaaattcaacacccagttctccctctcggctcctggggtaagtgctctaattcaccacatgcagtcatcccagggcctgcttgctctctttgtacccagtgcttccaccatctgacttggtcatgtctctttctactctcaagatgagtagaactttctactctttctactttctactctcaagatgaggccactgatcgcagccacatct

SEQ ID NO: 701494 - DNA, 602 bp, Homo sapiens
ctttgtagtacaagtttcaayttggattttaaaaagcttgaggccatcaattttcacatctttcctcactcccatttcagaaatcagggacccaagtttaggaaaatactggcaagttatatggaggcttaacatgttcaagaatgaatctgactgccattagggcaattccgttaaaataaagaacatttaatccaccaacaattgtcatgttttctgtctttaatgtaagaaccatttgtttaaagtcaaacaaagtaaatagtcatgttttttattaactactgattagattttaagaactcttaaatttgaaacaaaatcattaaaatgtttttgtcacttttaactacttcataaaatagcccgcaaggccctgcgttatcatctcacacacagcctcccatcactagcgggcgagtccactccaccattttgaactaagcctcttccagcctctcttgatcattggccatattgagatagccaggagggaaggggtgcccagagaaactccaaccagtctgggccccgggagaggtatgctctgtggcatgtttggctgggaagttagtgttgtttgcagtggggaggagcccggc

SEQ ID NO: 701495 - DNA, 1777 bp, Homo sapiens
tttttattgggctaacacacatcatgtcaggaggtcttaataatgctggcaagcaagaaagctgatggaaagtttctctggctaacaaaaatccttttttaagaacacatggaagatatccatttcagagaatttagaaatccatggggaaaaagaaattccgaaagacattatttttgttctggctctcgtgttttctctttctcccctttgcctctacttacagaaagaaaatcaaggatttcttacttcataggtcaatgaatcaagatactgaatctctgcacactcacaactgtatgcactgcccatgtggcctcaggcaaaagtagctggccttcacattcaaattgtacaaataataaatggccatagattagtactttaagatttggaaactgaaaataaacatttggtgagttttcagtgaaaacattaaaatatgttttccaggtgttattttatagggatatcatttataaggtgggatattatcatttgtaaggtttctttgaacatatgtgaatttttgcatatgacaagctaaattagaaaatgtgtattctcagttgtttcttcccaacttgatttataacaatccaacaacaatcatttaatattttcttcttccttttgaaccaacctactatgtgcactttacaaagttatagattagctggacagcctaaggcctgtcaaacatatacccagtcaactaaaccttggtgctatggtttgaatgtatcctctaaaatgcatgctgaagtttaattgtccttgtgatggtattaagtggtgggacctttatgaggtgattattattaatgccattatctagagagtagattagttatctcaggagtgggtcctatacaaggataagtttgctcccattttctctgtgtctcacatgctcactctccatgtaatgccttctgccatagactgaccctcagcagatgctggtgccatgcttttgaacttcccagcctccagaaccatatgccaaataaatttctactatttataaattacccagtctgtagyatttcattgcatcagcaggaaatggacaaagacacttggcctccttagaaatatgcatgttttatctgaatgtaattaaaacttatttgcacacaccttcatctgagttctgtcatttaataaaacaattgttattacaaaaatgatcattaaaaaagaatctaagaaagtctgactagctatcacacctataaactgcctccatataaagtttttcattttgtatcaattaatttgctttgtcccatgtgagctacagcttgatccatgactcatttgagctccagatcctagagtactcatttattgactagacacaaggaaaaccggtggcctataagatggcatcatgctctgtattgggaataggaaatgttctatcaatatttgaatgacagattcactactctgattctctttcttaggaagttagatatcagatatgtagcaagtcctatcagttcctctttcacaatatttcctttaccaatgctctccttccacccaactgccaccatcctatccaaactaccatcatctctctattggactgagaccatagcctacttacccagtctctccatcaccactgttgccctgtcaaaatccactttccttatagcagccagagtgttcttttattttaaaagattttttaaagtcatttcaatttttattttagattcaagggggtacatgtagagatttgttacatgggtgtactgcatga

SEQ ID NO: 701496 - DNA, 1280 bp, Homo sapiens
ggtgtggcttctgggtgcctgggagtatcacgagctagactgtacagctagcccctaagttaggatcctggtagagggccacaaaagcctgcatgtagggaacttcttcccgttttctttcctttttacaaaacaagtctaattgtaccatatcattataatgtaaagaatcatgtttaggccaaatctgttggtttgccaatttgtattgaactcaaacattattgaaatagtaaatgagattttcttttctttttccacttgtctaataatttgaacttattccaattatctaaaagtcacccccatggtgagtcttttgggatgcttgctgtggtcctcatttctaataaggatctctacaggggatttcagttagcctaagcttagctaactaagctaactaagtgcctaggcacttttcgcttttaattttccactatctacaaaatatagagagcaaggtgttaccaaagcagattatgagctacaaatgggcagttggatgttgagcctaaatttcacagaaagtgagggttggacagagagatggactaaacgaatactgactgcggaagggaggaagagaagggttaaagagcattgcccaaagggagacctcagaggccctgacctgttggagaacctacccggtagtggaaacatcgaaaaaaatatttgggtggccacttgtctactgccatgggggggctgtccatcaggccgggggcctgggaactcccagttattttggccaagaggggcttgtgaaaggcagttgtaagacagcacacaggaaggggctaacaactggctactatgaaaatataggttagtacaaaaataattgcagtttttgccattgaaagtaatggcaaaacccgcaattacttttgcaccaacctaatactatttctaaccttagggcagaaaaaggaaagaccctaaagggagggtctcacccataatcctagagggattgtcaatgctaaagaccccagagcatccaggggtggccagaataccaatgctgaaaacttggaatgtttgagtttcagccaaygagggtcccctcaccaaggctgaaaatcctggggcacccaggaggcagctagcagtgaacccaagaccacgttggggtcacataacaacatgactctggtgccccagagtcaacacaacaggggacctctcacaaccatgtggcctgccttaaacaactgcccacacacaattagcagaaaattaaaagcaaacataatattgcacatgtttaagga

SEQ ID NO: 701497 - DNA, 642 bp, Homo sapiens
tgagtttgcatttaatcaaatgtactttatgtaccacacatcctgtctatgcatattacattcttgctagctgttctgctgtagggatggctttcagaaatgtgtctactgcctacaatgcagacacaagtgtctcccagaagtcacatggtacaataagaacatgtctcaygtggcccagtattggggatatgtgaagagtggaagaaatttgaaactagtctgtggaaagttctaccaagtatcatagaccttgaaagaaactcaaagtttttcaagaccaacatcctaagaatttctataacgttaccaatcatgatttgggaagctgaaagaaactgtcttgagctatcaatttaaaaaaatcagtcaactatgccagagtttataccgaattatctttctattctttctataggaaatggtaacataaaattctttgcatctgaagatgtgataaaaagtatatagctaagaatataggaaaatattacagaagtgcattggggagatatttaataacaatattattttcctggagtttctgatgtttgtgggtatattttagcctttaaaaaattattacttgtgatttctcattttaattaaatactcacatccatacctaattttatatttgta

SEQ ID NO: 701498 - DNA, 595 bp, Homo sapiens
atgtctgtagtccctaggctggggctggggtgggggtgctcaagtgggaggatcacctgagtccagggaggttgatgccgtagtgagccgtgatcacaccactgcactccagcctgggtggcagagtgagacactgtctcaaataaagcaaattagaagtatttatgaaagaacagataaatgacttaaaagacaattattataatgtccaccgtgttttaagatcatggaaccatacattaaagggaataatcataaccataatacttaaaatggccccaagacccatggaaaaaaagagccctgctttctctgtgtgtttcgttttaaggtgactgagcaggtgatccaggttgcagcttctctggtggccattcataaaggggaaaattctctttgaacccacagctctttggattaatttttcttcagctcctgaatggacaacaaccacaacaacagtgctgatakctgccattggctcatggcttactgtattgggtaactcacgtgtattacatctgatctgaagccactctgcaagttagatactggtacccccatttcacagatggggcagtgaagcccagagaca

SEQ ID NO: 701499 - DNA, 1364 bp, Homo sapiens
acactcgggccagtttttgtttttggttattgttcaaaaattaatttttcatcaattataactaatcaaatggttattgtttctttgtctttgtctcttatttccatactttgtatttaattatccacctgtgtcagcacaatcatcactgtatgtagtaaactctttgatttttaaatttttattcattttttaaaatatttttttgagatggaatcgtgctctgtcaccaggcaggagtgcattggcgtgatctctgctcactgcaacctctgcctcctgggttcaagcgattcttctgcctcagccttccaagtagctgggattacaggtgcctgccaccatgctcagctaatttttgtatttttagtatagatggggtttcaccatgttggccaggctggtctcaaactcctgacctcaagtgatttgcccacctcggcttcccaaagtgctgggattacaggtgtgagccaccatacccggcctgtctcctgttaacattttacaacttctccagcaactctgctacaatagagcattattttaataaaaacctggcattactgctcattagcaatgaaatctgctactccatttcatttgccctaaaatctttccttatttctaatttcatgacattttatccacattttctcttatttatttatttatttatatttatttttttatttatttattttttttgagacggagtctcactctgttgcccaggctggagtgcagtggctcaatcttggctcattgcagcatccacctcctgggttcaagcgattctcctgcctcagcctcccaagtagctgagattacaggtgtgcaccaccatgcccagctaatttttgtatttttagtagagctggcgtttcaccatgttggccatgctggtctcgaactcctgacctcaagtgatttgccgcctcagcctcctaaastgctgggattataggtgcaagccactgcattctgccaaaattttctttcaattaatcctgttgtcttttcacttgagcctggtgaatcttggctttcttacactttagaacttaacatttgtctcgcattctttgtgaatagcaaacatttccaaattattggtctgattaatgtggactactatttccagatgtatgctggaggaaaacagaatatgtcatccccaaatgcctcttcaacataagcttattttaagctgaagacaatcaagaaggagcaaatgcaggaaaaggtctctctaactttttctgcttaaacacaggataaaaattctcctttactggagacaattctagagtattatcagtccagacttagcaccagacggatgtgcaaacaaaccttactcc

SEQ ID NO: 701500 - DNA, 1237 bp, Homo sapiens
gacattacatatgattaaactaaaataaaaccttttatttcatcttctccacttctccgtaagcagcttatgtctgaatgggaatattttcctagacttctaaaacccatatgagcttttttttatttacacataataacaagctattatgtgaagagatttattccagtgattttattctttccttatcttaatgggatattcctcagaattttattttccctttacctatcaagaaaagattatttttaaagttatattagctcaacttcacaacttagatgtacgaaagtggtttgtgagtatattttgaggcgttgyaaattaaatgcataattttagattgctcaaactaaaaatttcaaaatactctaaacctgacactaagatatcattatatctaaattttaaattttacaccaaattaggttttgtggagtaaatgaaggcaagataacttaatgttctactaatggccacagaataaaatttctcttcattatagaagtccttgtggttggaaaataagtttcatttgagtttgagttttacttgtatatatatttttatttttatttacttttattttttgagacagggtctcactccagttgctcgggctggaaggcagtggtgcgatctcggctcactgcagcctcaggtgattctcccacgtcagcctcccaagtagttgggactacaggcatgcaccaccaaaccctgctaattttttttttctgtatttttattagagatggggttttgtcaccttttccaggctggtctggaacttctgtaatcaagtaatctgcccgccttgtcatatatatttttaatgaagtatattgcatattgaggaagtggtttgctaatattctactactagatgttctttgtaaatcaactttgattcccacaactattctttaatgtagacaccatattaccgataaggaaacagttatcagagagattaaatagctggttatctatatcatagaacctctttattctaaattgtcttacatttctactcactttatacatttttaatcaaaaatagtttaaacatctatttccccaataaaaatagttaattaagtaaatggaaatatataacattcaatttgttatggataatatcactataacaattagaagccagaacctactatacagttggccctccaaatatgtgagttccatatccaaggattcaaccaaccatggatcaaaa

SEQ ID NO: 701501 - DNA, 1237 bp, Homo sapiens
gacattacatatgattaaactaaaataaaaccttttatttcatcttctccacttctccgtaagcagcttatgtctgaatgggaatattttcctagacttctaaaacccatatgagcttttttttatttacacataataacaagctattatgtgaagagatttattccagtgattttattctttccttatcttaatgggatattcctcagaattttattttccctttacctatcaagaaaagattatttttaaagttatattagctcaacttcacaacttagatgtacgaaagtggtttgtgagtatattttgaggcgttgcaaattaaatgcataattttagattgctcaaactaaaaatttcaaaatactctaaacctgacactaagatatcattatatctaaattttaaattttacaccaaattaggttttgtggagtaaatgaaggcaagataacttaatgttctactaatggccacagaataaaatttctcttcattatagaagtccttgtggttggaaaataagtttcatttgagtttgagttttacttgtatatatatttttatttttatttacttttattttttgagacagggtctcactccagttgctcgggctggaaggcagtggtgcgatctcggctcactgcagcctcaggtgattctcccacgtcagcctcccaagtagttgggactacaggcatgcaccaccaaaccctgctaattttttttttctgtatttttattagagatggggttttgtcaccttttccaggctggtctggaacttctgtaatcaagtaatctgcccgccttgtcatatatatttttaatgaagtatattgcatattgaggaagtggtttgctaatattctactactagatgttctttgtaaatcaactttgattcccacaactattctttaatgtagacaccatattaccgataaggaaacagttatcagagagattaaatagctggttatctatatcatagaacctctttattctaaattgtcttacatttctactcactttatacatttttaatcaaaaatagtttaaacatctatttccccaataaaaatagttaattaagtaaatggaaatatataacattcmatttgttatggataatatcactataacaattagaagccagaacctactatacagttggccctccaaatatgtgagttccatatccaaggattcaaccaaccatggatcaaaa

SEQ ID NO: 701502 - DNA, 1024 bp, Homo sapiens
agcttgtccaaatttacaaagcctactggaaagtgaccttctcttcccacaaatctcaggaaaagaccttctgctcacctaaaatgggtaatatgccattcctcaagaggagagggctaactgatgtaacccaggcattctcatccctggcatgacaggatgctcaattccaatttaaatacttggaatgaaacttggggcaagagattcctaaaaggggaatacaaaatttgggaattagacagtgctcaaggcaaacaacagctattcaattaattaactgtttaggaagaattttgattgtcatatttctgttcgtattatctaatttgacacttttctatttgtatattcaggaattattgtggttgcatacatctttcctccaatttgtgaagtaaaatcggaagttaattttgtaggaaattctatttaacttttttcgaattatgcttaaagagttgccctagacttgtcacattttatcatttcttaatagtctggtttcaataactaatcaatacaaatcctcattctatatgcgctcatgtaaaggtcttacatgcacagaaraattgactctttttttcatttaagtttccaataaaaaatttatcacacaggaaggggaacatcacattctggggactgttgtggggtggggggaggggggagggatagctttaggagatatacctaatgctaaatgacgagttaatgggtgcagcacaccagcatggcacatgtatacatatgtaactaacctgcacattgtgcacatgtaccctaaaacttaaagtataataataacaaaataaaataaaccaaaaatttatcccataaaatacttacaggatttccctgttattcaagtcaatttaagtacacaagttaagaaataatgcatggaaatattagaaaatattcaaagataactattttgtatatgcaattaattctgaatatatgtgtttaaaagcaaagccaggcaactggaacttttaaaaataaacacaaatagctg

SEQ ID NO: 701503 - DNA, 1024 bp, Homo sapiens
agcttgtccaaatttacaaagcctactggaaagtgaccttctcttcccacaaatctcaggaaaagaccttctgctcacctaaaatgggtaatatgccattcctcaagaggagagggctaactgatgtaacccaggcattctcatccctggcatgacaggatgctcaattccaatttaaatacttggaatgaaacttggggcaagagattcctaaaaggggaatacaaaatttgggaattagacagtgctcaaggcaaacaacagctattcaattaattaactgtttaggaagaattttgattgtcatatttctgttcgtattatctaatttgacacttttctatttgtatattcaggaattattgtggttgcatacatctttcctccaatttgtgaagtaaaatcggaagttaattttgtaggaaattctatttaacttttttcgaattatgcttaaagagttgccctagacttgtcacattttatcatttcttaatagtctggtttcaataactaatcaatacaaatcctcattctatatgcgctcatgtaaaggtcttacatgcacagaagaattgactctttttttcatttaagtttccaataaaaaatttatcacacaggaaggggaacatcacattctggggactgttgtggggtggggggaggggggagggatagctttaggagatatacctaatgctaaatgacgagttaatgggtgcagcacaccagcatggcacatgtatacatatgtaactaacctgcacattgtgcacatgtaccctaaaacttaaagtataataataacaaaataaaataaaccamaaatttatcccataaaatacttacaggatttccctgttattcaagtcaatttaagtacacaagttaagaaataatgcatggaaatattagaaaatattcaaagataactattttgtatatgcaattaattctgaatatatgtgtttaaaagcaaagccaggcaactggaacttttaaaaataaacacaaatagctg

SEQ ID NO: 701504 - DNA, 1024 bp, Homo sapiens
agcttgtccaaatttacaaagcctactggaaagtgaccttctcttcccacaaatctcaggaaaagaccttctgctcacctaaaatgggtaatatgccattcctcaagaggagagggctaactgatgtaacccaggcattctcatccctggcatgacaggatgctcaattccaatttaaatacttggaatgaaacttggggcaagagattcctaaaaggggaatacaaaatttgggaattagacagtgctcaaggcaaacaacagctattcaattaattaactgtttaggaagaattttgattgtcatatttctgttcgtattatctaatttgacacttttctatttgtatattcaggaattattgtggttgcatacatctttcctccaatttgtgaagtaaaatcggaagttaattttgtaggaaattctatttaacttttttcgaattatgcttaaagagttgccctagacttgtcacattttatcatttcttaatagtctggtttcaataactaatcaatacaaatcctcattctatatgcgctcatgtaaaggtcttacatgcacagaagaattgactctttttttcatttaagtttccaataaaaaatttatcacacaggaaggggaacatcacattctggggactgttgtggggtggggggaggggggagggatagctttaggagatatacctaatgctaaatgacgagttaatgggtgcagcacaccagcatggcacatgtatacatatgtaactaacctgcacattgtgcacatgtaccctaaaacttaaagtataataataacaaaataaaataaaccaaaaatttatcccataaaatacttacaggatttccctgttattcaagtcaatttaagtacacaagttaagaaataatgcatggaaatattagaaaatattcaaagataactattttgtataygcaattaattctgaatatatgtgtttaaaagcaaagccaggcaactggaacttttaaaaataaacacaaatagctg

SEQ ID NO: 701505 - DNA, 1478 bp, Homo sapiens
ctcagtatgcagcaccatgactatgtaagaattcatttgttagtagagcccggctttagaacagagatggaacctggcaccgaataataaagcatggggaggccgggcgcagtggctcatgcctgtaatcccagcactttgggaggccgaggtgggcagatcacctgaggtcaggaattcaacaccagcctggccaacgtggagaaaccccgtctctactaaaaatactagctgggtgtggtggcgcatgcctgtaatcccagggctgaggcaggagaatcgcttgatcccggaaggaaggtggaggttgcggtgagccaagattgcgcctttgctctccagcctgagcaacaagagcaaaactccatagatagatagatagatagatagatagatagatagatagatagatagatagatatagatagatatagatatatagatatctatagatatctatatatatatatatatatatatcaggaggaatagtagtaatattgtcatcacttctcaccctgtctttgataaattgccagttgaagtgtctgcttcatcactgagaaaagagtgtgttctttcctctctgaatccccaggaccagacatatagcaggtgtccaatgaacagctcagctgttgaatgaacaaatagattctgttaggccctacaaggcataaaagtaaattcagtctgggcacagtggctcatgcctgtaatcccagcactttgggaggccaaggcgggcagatcatctgaggtcaggagtttgagactagcctggccaacatggtgaaaccccatctctactaaaaatacaaatattagccaggcatggtggcgggcacctgtagtcccagctacctgggaggctgaagcaggagactcacttgaacctgggaggcagagggtgtagtgagctgagaccacaccactgcactccagcctgagtgacagtgagactccgactcaaaaaaaaaaaagtaaattcaaaagccattcacctgtkcagaaggcagggccaggctaatctgaaggctctaagagaagtatccacccacttcttctgtaaaaggccagatggtaaatattttagattctttgggctctctcttcctctgtggcaaccactgaattcaaccctgttgcagacatagacaatagataaatgaatgggcccggctgtttgtaggtaggtgaaaaatggcttcccttcacctttataggttctttggctgggctacgaattaaattgacatgtaaacagacagggcaaaagccatatttaattatgtacctatgcaggggagtcccacaaaatacaagactccaaaaaggatcagagaggctgggcccagtggctcatgcctgtaatccaggcactttggaaggccaaggcaggcagatcacctgaggttgggacttccagaccagtctggccaacatggtgaaaccccatctctactaaaaatacaaaa

SEQ ID NO: 701506 - DNA, 1478 bp, Homo sapiens
ctcagtatgcagcaccatgactatgtaagaattcatttgttagtagagcccggctttagaacagagatggaacctggcaccgaataataaagcatggggaggccgggcgcagtggctcatgcctgtaatcccagcactttgggaggccgaggtgggcagatcacctgaggtcaggaattcaacaccagcctggccaacgtggagaaaccccgtctctactaaaaatactagctgggtgtggtggcgcatgcctgtaatcccagggctgaggcaggagaatcgcttgatcccggaaggaaggtggaggttgcggtgagccaagattgcgcctttgctctccagcctgagcaacaagagcaaaactccatagatagatagatagatagatagatagatagatagatagatagatagatagatatagatagatatagatatatagatatctatagatatctatatatatatatatatatatatcaggaggaatagtagtaatattgtcatcacttctcaccctgtctttgataaattgccagttgaagtgtctgcttcatcactgagaaaagagtgtgttctttcctctctgaatccccaggaccagacatatagcaggtgtccaatgaacagctcagctgttgaatgaacaaatagattctgttaggccctacaaggcataaaagtaaattcagtctgggcacagtggctcatgcctgtaatcccagcactttgggaggccaaggcgggcagatcatctgaggtcaggagtttgagactagcctggccaacatggtgaaaccccatctctactaaaaatacaaatattagccaggcatggtggcgggcacctgtagtcccagctacctgggaggctgaagcaggagactcacttgaacctgggaggcagagggtgtagtgagctgagaccacaccactgcactccagcctgagtgacagtgagactccgactcaaaaaaaaaaaagtaaattcaaaagccattcacctgtgcagaaggcagggccaggctaatctgaaggctctaagagaagtatccacccacttcttctgtaaaaggccagatggtaaatattttagattctttgggctctctcttcctctgtggcaaccactgaattcaaccctgttrcagacatagacaatagataaatgaatgggcccggctgtttgtaggtaggtgaaaaatggcttcccttcacctttataggttctttggctgggctacgaattaaattgacatgtaaacagacagggcaaaagccatatttaattatgtacctatgcaggggagtcccacaaaatacaagactccaaaaaggatcagagaggctgggcccagtggctcatgcctgtaatccaggcactttggaaggccaaggcaggcagatcacctgaggttgggacttccagaccagtctggccaacatggtgaaaccccatctctactaaaaatacaaaa

SEQ ID NO: 701507 - DNA, 575 bp, Homo sapiens
aaatattgttaattattccayatttgctaaagtgtttatatttcatggtctctctgctctaacacatctgccttccctgcaactagatgtcatcattagattggagagccgccaaacacctaaactatatgaagctaaagtctgtttaagaaagagcccatccaggctgggtgtggtggctcatgcctgtaatcccagaactttggggggccaaggtgggtggatcatgaggtcaggagatcgagaccatcctggctaacatggtgaaaccccgtctctactaaaaatacgaaaaaataattagccgggcgtggtggcgggttcctgtagtcccagctactcaggaggctgaggcaggagaatggcatgaacccaggaggtggagcttgcagtgagccgcgattgcaccactgcactccagcctgggcgacagagcaagactctgcctcaaaaaaaaaaagaaaagaaaagaaaagaaagaaagaacccatcccagcactttgggaggccgaggcgggtggattacctgaggtcagggattcaagaccagcctggtcaacctggtgaaaccctgt

SEQ ID NO: 701508 - DNA, 1393 bp, Homo sapiens
cctgctgggatttgtggtaaaattaaaaaagaatagaaatgttaaaaattgaaaatatggaagaaaatcttatagttgaagaaagtaccaattttgagtttttcctgctaaactaytgttaattgatttgagtagctctgaatacaccagtcttcgggcatatcgtctgagactcactaatccaacctctattttgttgccagagggatttttctaaacttctaacttgatcaagtgactttcctccttaaaaacatatgtctctacctccctgaacttgcagttccctaaatatccttaccttattccagccgctttgctttagtacacatcatcccctttttggaaatgcccaccacgtcctctgaggaaatctcctctcatccttcaagcccccgcacaaacctccaccttaatacaactccccaccccgtccccttgaggtgggtgttcctgctagagtgttcatggttctcttgtaaatgacttcagtatagcatcagtttacatttgtggtgggataacctctctgaatattaactgaactctaacctcatccccaaataggcacatgtgtgttggctgaaaggtaatcccattcaggcagcagctgggcctgtttctcttcactgacccagggaaatgatatgaaatatcaattttccaacttgtactttaaaccatctttaattaccttgaagctacaattaattattagagatgtggtaccaactccatataatatggcattcactgtagtaaaagcatgattttgaatatagaacattgtttttaccatgaattattaggggaaattacaaaagagtgaactcttaaatcagcaaacctgggactataactttggcagatggttgggggaatgaagtggaggatcacatgttatttgtaagcaagagaaagccagcaagtattttggttatataagctccttgttgccattttttattcatccgttttttattcatccattgcaagattgttcttgatattgtctttgtaaagcaccaccattaaatattcattgagacagctggggggaggcggataaagaagggaaatgagaaatagaaaagggggagaacaatcagtttctaggctttctgaggcatagaaaacctggatgtagtttcagcaggggtgccatatgaaaggaatggaagtgttagcttacctggagggacgtcatgacaaccaacacagaagaaaacaaatgcagtaagaaaagaaagaaagcaataagctaaagtgactggaaatctgaagataggtattatatttgatctgatcaatgccaaatgtccaatagtcaagtgttatgatacctggaatcaacatagtgactatatataccttgggctacagtaaaaataga

SEQ ID NO: 701509 - DNA, 1393 bp, Homo sapiens
cctgctgggatttgtggtaaaattaaaaaagaatagaaatgttaaaaattgaaaatatggaagaaaatcttatagttgaagaaagtaccaattttgagtttttcctgctaaactattgttaattgatttgagtagctctgaatacaccagtcttcgggcatatcgtctgagactcactaatccaacctctattttgttgccagagggatttttctaaacttctaacttgatcaagtgactttcctccttaaaaacatatgtctctacctccctgaacttgcagttccctaaatatccttaccttattccagccgctttgctttagtacacatcatcccctttttggaaatgcccaccacgtcctctgaggaaatctcctctcatccttcaagcccccgcacaaacctccaccttaatacaactccccaccccgtccccttgaggtgggtgttcctgctagagtgttcatggttctcttgtaaatgacttcagtatagcatcagtttacatytgtggtgggataacctctctgaatattaactgaactctaacctcatccccaaataggcacatgtgtgttggctgaaaggtaatcccattcaggcagcagctgggcctgtttctcttcactgacccagggaaatgatatgaaatatcaattttccaacttgtactttaaaccatctttaattaccttgaagctacaattaattattagagatgtggtaccaactccatataatatggcattcactgtagtaaaagcatgattttgaatatagaacattgtttttaccatgaattattaggggaaattacaaaagagtgaactcttaaatcagcaaacctgggactataactttggcagatggttgggggaatgaagtggaggatcacatgttatttgtaagcaagagaaagccagcaagtattttggttatataagctccttgttgccattttttattcatccgttttttattcatccattgcaagattgttcttgatattgtctttgtaaagcaccaccattaaatattcattgagacagctggggggaggcggataaagaagggaaatgagaaatagaaaagggggagaacaatcagtttctaggctttctgaggcatagaaaacctggatgtagtttcagcaggggtgccatatgaaaggaatggaagtgttagcttacctggagggacgtcatgacaaccaacacagaagaaaacaaatgcagtaagaaaagaaagaaagcaataagctaaagtgactggaaatctgaagataggtattatatttgatctgatcaatgccaaatgtccaatagtcaagtgttatgatacctggaatcaacatagtgactatatataccttgggctacagtaaaaataga

SEQ ID NO: 701510 - DNA, 1393 bp, Homo sapiens
cctgctgggatttgtggtaaaattaaaaaagaatagaaatgttaaaaattgaaaatatggaagaaaatcttatagttgaagaaagtaccaattttgagtttttcctgctaaactattgttaattgatttgagtagctctgaatacaccagtcttcgggcatatcgtctgagactcactaatccaacctctattttgttgccagagggatttttctaaacttctaacttgatcaagtgactttcctccttaaaaacatatgtctctacctccctgaacttgcagttccctaaatatccttaccttattccagccgctttgctttagtacacatcatcccctttttggaaatgcccaccacgtcctctgaggaaatctcctctcatccttcaagcccccgcacaaacctccaccttaatacaactccccaccccgtccccttgaggtgggtgttcctgctagagtgttcatggttctcttgtaaatgacttcagtatagcatcagtttacatttgtggtgggataacctctctgaatattaactgaactctaacctcatccccaaataggcacatgtgtgttggctgaaaggtaatcccattcaggcagcagctgggcctgtttctcttcactgacccagggaaatgatatgaaatatcaattttccaacttgtactttaaaccatctttaattaccttgaagctacaattaattattagagatgtggtaccaactccatataatatggcattcactgtagtaaaagcatgattttgaatatagaacattgtttttaccatgaattattaggggaaattacaaaagagtgaactcttaaatcagcaaacctgggactataactttggcagatggttgggggaatgaagtggaggatcacatgttatttgtaagcaagagaaagccagcaagtattttggttatataagctccttgttgccattttttattcatccgttttttattcatccattgcaagattgttcttgatattgtcttygtaaagcaccaccattaaatattcattgagacagctggggggaggcggataaagaagggaaatgagaaatagaaaagggggagaacaatcagtttctaggctttctgaggcatagaaaacctggatgtagtttcagcaggggtgccatatgaaaggaatggaagtgttagcttacctggagggacgtcatgacaaccaacacagaagaaaacaaatgcagtaagaaaagaaagaaagcaataagctaaagtgactggaaatctgaagataggtattatatttgatctgatcaatgccaaatgtccaatagtcaagtgttatgatacctggaatcaacatagtgactatatataccttgggctacagtaaaaataga

SEQ ID NO: 701511 - DNA, 611 bp, Homo sapiens
gctccacttgtcaatttttttgttgcaattgcttttgggcacttcattataractttttgccaaggccaatgtccagaatagtatttcctaggttttcttctagaatttgtaaagttttaggtcttacatttaagacttcaatccatcgtgtgttaatttttgtatatggtgaaaggcaggaatccagtttgattcttctgcaaatggctagtcagttatcccagcaccatttattgaatagggagttccttccacattgcttgttattgtcaactttgtcggagatcatatggttgtagatgtgtggctttatttctgggttctctatccattggtctatgcaactgtttttgtgccagtgccatgctattttaacttctgtagccttatagtttgaatttgggtagtgtgatgcctctagctttgttctttttgtctaggattgctttggttatccccttttgcctatttttaaactgcgtattttgtgctttggttgttgaattgttagagttatttatatattctggatcctagcctcctttttaaagccagctgaaaggcatcaccaactgtggttttgccctggggatttttcaaactgtagtag

SEQ ID NO: 701512 - DNA, 1727 bp, Homo sapiens
attgactgtggtgatggttgtacaactctatgaatatactaaaaataattgagttagatactttgaatgggagacatatggtaagtgaattatatcttaataaagctgttaaaataaaaccagttttctttaagctttgaaaatggagaacaattgccattcctctcaatgagcaaatgccttggaaaggagctcaacrtgcctgctacagggctgccacctatggccatgcaggctgagccccagagtgggaagtatggagtgggaagtatgcagtgtggcagtgcttatctaagcagaagaggtgcctcctgcagtctgcctcatttctgtgtgtctcctagagggtatcttgttacacttaacaagctcatccaatgttgaagattagcattttttctgtaacatggccccaaaacacaagcggctatttcacgtggttctgatttggtgctgaaataactattgatttggtaactaatgatctggggctgatctgatgctgaaatagtgatttgcctaatgtagaagaaaaaaactgagtgtactgaactgcaaacccaaacctaaccagtcttccttcctaaaatgtatgcctgggtagttttgaccatgtatgatttctaccttacaagctgatttgaagtctgaataccttggaaaagacaaatccattaaataaaaacatagaaaaccaggtaaaataagtattataaagaaatgctatgggtttcaagggaggggagaagaaatgacagctgactggcagagtagcatgggacgagaatggctggtgtggcaggtgaagtctgagctagacacagagggtggaagagactgagacaggtgggctggctcaaaggcatagagcggcagggaggcaataatgaagaggaagaccctgaaactagaggccaggtcttcacctacagctctggcactttctagaagtgtggcctggggcaagtcactttgcctctttgtgtcccagtttcctataaagtgggaataacaccatatgtaattgaatctaagacaccatcgattataacatgaaccattattccattaccactaagaaaaaaaatgatgttggttatgtcactggttataaaatgtatccctaattcaaagatgttataagaaaaaaattcacctcagaattgaatatggtaacaactactcagagttgatatgagaattaaatgattatatgtaaagtaaatatgattgctgttgttgctatcaatatttgacaaatatttgttgagcaactactaagtgccctcaaggtcctatgcctaagataaacatggtcccaatccttaggaattcagaatcgatccaaacaggacaaaaaacagggaagtcagaagagggatgtgtgcaggactggtcacaggtggtgatctctagcttgactggaatataactgaagcctcactttactgagctgagagaatgtaaggcagattaggatctaaagtaaagagagcatcagacataatcagaactcttcttgaaacaccctgtctcccctgtgaagtacatatatacaactttatatccaattctgtatgatactacaaaggcagtgacatagagtacccaggatagcatccatatgcaaaatataatttaggagccatgttgtaccaaaaacaatgttcacactaaaacgcactgtagcaagatgctcaaactattaacagagaaattattaaaga

SEQ ID NO: 701513 - DNA, 1727 bp, Homo sapiens
attgactgtggtgatggttgtacaactctatgaatatactaaaaataattgagttagatactttgaatgggagacatatggtaagtgaattatatcttaataaagctgttaaaataaaaccagttttctttaagctttgaaaatggagaacaattgccattcctctcaatgagcaaatgccttggaaaggagctcaacgtgcctgctacagggctgccacctatggccatgcaggctgagccccagagtgggaagtatggagtgggaagtatgcagtgtggcagtgcttatctaagcagaagaggtgcctcctgcagtctgcctcatttctgtgtgtctcctagagggtatcttgttacacttaacaagctcatccaatgttgaagattagcattttttctgtaacatggccccaaaacacaagcggctatttcacgtggttctgatttggtgctgaaataactattgatttggtaactaatgatctggggctgatctgatgctgaaatagtgatttgcctaatgtagaagaaaaaaactgagtgtactgaactgcaaacccaaacctaaccagtcttccttcctaaaatgtatgcctgggtagttttgaccatgtatgatttctaccttacaagctgatttgaagtctgaataccttggaaaagacaaatccattaaataaaaacatagaaaaccaggtaaaataagtattataaagaaatgctatgggtttcaagggaggggagaagaaatgacagctgactggcagagtagcatgggacgagaatggctggtgtggcaggtgaagtctgagctagacacagagggtggaagagactgagacaggtgggctggctcaaaggcatagagcggcagggaggcaataatgaagaggaagaccctgaaactagaggccaggtcttcacctacagctctggcactttctagaagtgtggcctggggcaagtcactttgcctctttgtgtcccagtttcctataaagtgggaataacaccatatgtaattgaatctaagacaccatcgattataacatgaaccattattccattaccactaagaaaaaaaatgatgttggttatgtcactggttataaaatgtatccctaattcaaagatgttataagaaaaaaattcacctcagaattgaatatggtaacaactactcagagttgatatgagaattaaatgattatatgtaaagtaaatatgattgctgttgttgctatcaatatttgacaaatatttgttgagcaactactaagtgccctcaaggtcctatgcctaagataaacatggtcccaatccttaggaattcagaatcgatccaaacaggacaaaaaacagggaagtcagaagagggatgtgtgcaggactggtcacaggtggtgrtctctagcttgactggaatataactgaagcctcactttactgagctgagagaatgtaaggcagattaggatctaaagtaaagagagcatcagacataatcagaactcttcttgaaacaccctgtctcccctgtgaagtacatatatacaactttatatccaattctgtatgatactacaaaggcagtgacatagagtacccaggatagcatccatatgcaaaatataatttaggagccatgttgtaccaaaaacaatgttcacactaaaacgcactgtagcaagatgctcaaactattaacagagaaattattaaaga

SEQ ID NO: 701514 - DNA, 622 bp, Homo sapiens
gccctggggtctctgggtgaatttgatgcagactcagccattagcctggctgggccacaaaatcaggaagcttagaccagtgctgtggaaccttgattcctgtcccagttttgtcatttcctgcctcagcctctttgcarctcccggcctcaattgcctcacctccaaaatggaggtcttaatgacaatggtctggcttcactcacagggttatcgtgaaaatcaaaagagattgctcagggaaaagcctcttcaaactggagctccaggtgatggttgtcatctgtcgatgttgctctctggtgagttctttaaaaatggaaattactgtttgtttctaattacaaaagttcaggagttacagaatagcacacagatttttaaacacggtttattaccccactacttgttaataatctctactaacctgttggtgtatttccttccggatacataaagagagtggaaccctgaacgatatggaagttggggtgttgacccccctcagagttgaaaatctgcatacaacttttgactccccaaaacactacagatagcctactgttgactgcaagccttgctgagaacataaacagtcaattaacatattttgtatgttata

SEQ ID NO: 701515 - DNA, 622 bp, Homo sapiens
gccctggggtctctgggtgaatttgatgcagactcagccattagcctggctgggccacaaaatcaggaagcttagaccagtgctgtggaaccttgattcctgtcccagttttgtcatttcctgcctcagcctctttgcaactcccggcctcaattgcctcacctccaaaatggagrtcttaatgacaatggtctggcttcactcacagggttatcgtgaaaatcaaaagagattgctcagggaaaagcctcttcaaactggagctccaggtgatggttgtcatctgtcgatgttgctctctggtgagttctttaaaaatggaaattactgtttgtttctaattacaaaagttcaggagttacagaatagcacacagatttttaaacacggtttattaccccactacttgttaataatctctactaacctgttggtgtatttccttccggatacataaagagagtggaaccctgaacgatatggaagttggggtgttgacccccctcagagttgaaaatctgcatacaacttttgactccccaaaacactacagatagcctactgttgactgcaagccttgctgagaacataaacagtcaattaacatattttgtatgttata

SEQ ID NO: 701516 - DNA, 622 bp, Homo sapiens
gccctggggtctctgggtgaatttgatgcagactcagccattagcctggctgggccacaaaatcaggaagcttagaccagtgctgtggaaccttgattcctgtcccagttttgtcatttcctgcctcagcctctttgcaactcccggcctcaattgcctcacctccaaaatggaggtcttaatgacaatggtctggcttcactcacagggttatcgtgaaaatcaaaagagattgctcagggaaaagcctcttcaaactggagctccaggtgatggttgtcatctgtcgatgttgctctctggtgagttctttaaaaatggaaattactgtttgtttctaattacaaaagttcaggagttacagaatagcacacagatttttaaacacggtttattaccccactacttgttaataatctctactaacctgttggtgtatttccttccggatacataaagagagtkgaaccctgaacgatatggaagttggggtgttgacccccctcagagttgaaaatctgcatacaacttttgactccccaaaacactacagatagcctactgttgactgcaagccttgctgagaacataaacagtcaattaacatattttgtatgttata

SEQ ID NO: 701517 - DNA, 1105 bp, Homo sapiens
tgataccgaggactagtggggatagcggtttgttcctgcctgtaactgaaacagggagtaatggggacaggctctcttccagcaaaaggaccatgggcaccaaraaacttcttgatccagtgacctcacgtctaggaatctatcctaaggaaataattaaaggcacacacaaagagttatctaccaggactcacatagtgtttgttatttacccaggtgaaaaaccagaaatcccctaaatttccatcaacagacagatggtcaggcataatttgatgatccatgtaatggaatatgatggctggcatttaaaaatcacattgtagaagaatagctaatatttgataacctgtgaaatgctaatgagatagctgagctgaacaattagaggacaaggcaatttgtatacgtgaatatgtatatgtgtgaatgtgtgtctctgcactcatatgtatgaatctgacctgaaaatattcatttatatgtaggaaaagaacattgaaaggaaattctctaaatgttaacattgggtatctctgaattatagaattatgtacagttgcagttgttttatgtgttatcttctgtaatttcctttaaaataagtataaatgtataggcatttataagcttataaatgcttataaatgtataggcacatagggattttgtaaatgtatatacagagtttattgagacatgggggaaatcagacaatgtggaaattagtaaaactagacagtgcccagtcttagactgaagtcagaaaaatgtcaatgggatttcttttttcagaagaggaaaagtcaggaataatatagatctcatcaatattttctaccttattgaagtcaaaaggagaaaaaattgggtttcagctttgtggaccaccatttttattttcaacctctggaaaatgtttttgggcaatcctgcatcttctctacatgtgatctgtgagctctctggatcacaggccagggattctatcaagcaacagggccccaaggcctccttggtgcttcccctatttgcagagaggaatggatttggaacattgaaaatggtatccggatggtgttaagtttaaattggaatggcccaa

SEQ ID NO: 701518 - DNA, 648 bp, Homo sapiens
agctgaccaagtggctaaacatgttgcctcttctcaagcagcacccattttccacctaaccccttatcttccccctccagctacagtccctgttttctcccccagagaaaaagaaaagttaaaagaaataggagccaaagaaagtcacgagggaagatgggtacaaccagacaagaaggaaatgctgtctaagcccttcatgcragaggtattgtcacagctacatcaaggaactcactggggcccccaagctatgtgtgatgcagtcctcagagtttatggatgcgtaggaatttatacccttgctagacaagttgcagatcgtttcagagtgcgcagaaaaaccaacaaacaacctaaagaaaatgggagtaccacatgccgtgcatccaccctcatcagggagagtcgaaaggcctattgccctgttgagagtccgaactgctccctgaaaaaacataggtctacccccttatgagatgctttttagattgccttatctacattctactactgatcttcccacattcgaaacaaaagatcagtttcttagaaactatgtgttaggtctatcttctaccctttcctccctcaggactcaaggcctcctagcacaaactccacccattgaattaccagttcatcaac

SEQ ID NO: 701519 - DNA, 592 bp, Homo sapiens
aattcttccaaggcacgtgagtctgctcctcagcaaagcagtgacaaacctgcttttccctggtttccccaactatgtaaaaccttattaaagaattcctgaacaatataaagttccctcagcaagacggaacttcccaagctcttgtctcaggagagaatgtggattatagaaagattgtgggtgtgagtggagtgggaagttatttaggtagtaagattttcaggctcggtgcagtggctcacacctgtaatcccagcactttgggtggccgaggygggcagatcacaaggtcaggagatggagaccatcctggctaacagggagaaactccatctctactaaaaatacaaaaaaaaactagctgggcacctgtagtcgcagctactcgggaggttgaggcaggagaaccgcgtgaacccagaaggcggagcttgcagtgagccaagatctcgccactgcactgcagcctgggtgacagagccagactccgtctcaaaaaaaaaataataaaaaaataaaaagttaaagaggccaagaaacatcatttaaaacacgatataaattttcatcagacataaaagataaaaaa

SEQ ID NO: 701520 - DNA, 2546 bp, Homo sapiens
agtttcattttgtttctgtttccagttctctacaagtcattcatctctatttctttgcgagacagtttcatttgaggctggctttccccctgtggcacaagtggctgctttatgtcagcatttcagtgaagtccttagatgggctctgagtggcccagcttttgtcacatgccccctcctgaacaaatcaactcctgttgggaaggaaggtagtttgccgattggcttggtcaagtcacagtctcccttcttctcagccccttcaagaaggaaatcggcttctttgggctcacaccatcccccagcagatctctggactatgatcaagaacagggagaaaatgaagcaagtgttcccacactagtcatttccaagagctggccagttagcacagaacaagaaaacacacgcacggggcactggcatgtgggcagctgaagaagggccctgaagatgtacaagtcctaatttctggagcccatgaatatgttaggttacatggcaaggagaagttaagggcccaaatgggattacggtcactaatcagctgacctcgatgtcaggagattatcctgaattattcaggtgggatgtgcaagagggaggtaggcgagtccgcgtgagggtgcgcagtgtgagaaagcctcacaacaattgctggctttggaaatggaagggggctgtgagccagggcatgtgggcagctcagagaagcacagaaagagattcttctccacagtctccagaaaggaacgcagccccgatgacgccttggctgtagcccagtgacacccaggtcagagtctgacctccagaactgcaaaataatagatgtgtgttgttctgagccactgagctggtggtaatttgttacagcagcagtgagaaacaaaaacacggcattccaagggcagtactctgcatggcaggagtgacagagtggtgcccagtgcaacggtgtgtgacagaaatacaacatgcactgcaatggggatcttaagttttctagtggccacattaagaaagaaaaagaggccgggtgtggtggctcatgcctgtaataccagcagtttgagaggctgagtgggtggatggcttgaggttgggagttcgagaccagcctggccaacacggtgaaaccctgtctccactaaaaatacaaaaattagccaggagttatggtgggtgcctgtaatcccagctgctcaggaggcgaggcaggagaacacttgaatctgggaggcagagtttgcagtgagccaagatcgcaccactgcacgccagcctaggcaacagagcgagactccatgtaaaaaaaaaaaaaagaaaagaaagaaaaaaaacaggtaaaattaatttcaataatatattttaacccaatatattcaaaatactatcattgcaatgtgtcatcaatatacaaaatattgagaaggtgtttcccattctttttaatccccagttttagaattcagtgtatattttacacacagcacatctcaacatttctgagctccttttcagtgctcatcaggcacacatggttagtggctgctgccctggacagcacaggcctagtgactgtacttttggttgtaagggtggcagtggctggcatgaaccagaacaggggtttgtttgtgacagtgacaaggagaccgctaacccctgctgatctgtgtgtccagttttatttctcttttttctaatttttttatttccatacataccctgcttgtatatcaagctcttttctaatcagggatcctcaaatgacaggagttgacctctgattgtgtttgtgcatttcaaagcccagagctgtgacctcagccacggtgggcaggatgggtgctggagaagggcattaaggctcccagctttgtgggggaaatggcatcttcttgagtgagtggggaagtgcaaatagaatatgcacaagctaggaaggacgtttttaaagcctgtgcttcgaacattcttcctctaaaggatcaggtgagctggctcagagcagggagccaaccgcygagccagggtgagagggctttgtatttggagagtgaaaagaatacggttgtttaggctttggactcagagcatcagaaactcaggagaaatgagatcagctgaaaaagaaatgggtttgatgttgtagaccaaacatgaacagtggggaacaggctgaaaaatgaggggagaacagtcagcagcttccacggcttctcccaaatggagggaagtggggccagctcaggggacaggctggaggcttatgacggaaagatggtggggtccaggtgtggcaggacaggaggcaaagctgggggctgctatgggacagagggggcagagggaaagttgtgctgctaatggggtcacaagagtcacttatggcctggggccttcaagaaccaagggaagccctcccagagcccagcaccaccacaagcaatgctcacggctccagccagcaagacttggggtagcagcccccagcctctctccccatattggggacaaaagagaactggagaagccagaga

SEQ ID NO: 701521 - DNA, 2546 bp, Homo sapiens
agtttcattttgtttctgtttccagttctctacaagtcattcatctctatttctttgcgagacagtttcatttgaggctggctttccccctgtggcacaagtggctgctttatgtcagcatttcagtgaagtccttagatgggctctgagtggcccagcttttgtcacatgccccctcctgaacaaatcaactcctgttgggaaggaaggtagtttgccgattggcttggtcaagtcacagtctcccttcttctcagccccttcaagaaggaaatcggcttctttgggctcacaccatcccccagcagatctctggactatgatcaagaacagggagaaaatgaagcaagtgttcccacactagtcatttccaagagctggccagttagcacagaacaagaaaacacacgcacggggcactggcatgtgggcagctgaagaagggccctgaagatgtacaagtcctaatttctggagcccatgaatatgttaggttacatggcaaggagaagttaagggcccaaatgggattacggtcactaatcagctgacctcgatgtcaggagattatcctgaattattcaggtgggatgtgcaagagggaggtaggcgagtccgcgtgagggtgcgcagtgtgagaaagcctcacaacaattgctggctttggaaatggaagggggctgtgagccagggcatgtgggcagctcagagaagcacagaaagagattcttctccacagtctccagaaaggaacgcagccccgatgacgccttggctgtagcccagtgacacccaggtcagagtctgacctccagaactgcaaaataatagatgtgtgttgttctgagccactgagctggtggtaatttgttacagcagcagtgagaaacaaaaacacggcattccaagggcagtactctgcatggcaggagtgacagagtggtgcccagtgcaacggtgtgtgacagaaatacaacatgcactgcaatggggatcttaagttttctagtggccacattaagaaagaaaaagaggccgggtgtggtggctcatgcctgtaataccagcagtttgagaggctgagtgggtggatggcttgaggttgggagttcgagaccagcctggccaacacggtgaaaccctgtctccactaaaaatacaaaaattagccaggagttatggtgggtgcctgtaatcccagctgctcaggaggcgaggcaggagaacacttgaatctgggaggcagagtttgcagtgagccaagatcgcaccactgcacgccagcctaggcaacagagcgagactccatgtaaaaaaaaaaaaaagaaaagaaagaaaaaaaacaggtaaaattaatttcaataatatattttaacccaatatattcaaaatactatcattgcaatgtgtcatcaatatacaaaatattgagaaggtgtttcccattctttttaatccccagttttagaattcagtgtatattttacacacagcacatctcaacatttctgagctccttttcagtgctcatcaggcacacatggttagtggctgctgccctggacagcacaggcctagtgactgtacttttggttgtaagggtggcagtggctggcatgaaccagaacaggggtttgtttgtgacagtgacaaggagaccgctaacccctgctgatctgtgtgtccagttttatttctcttttttctaatttttttatttccatacataccctgcttgtatatcaagctcttttctaatcagggatcctcaaatgacaggagttgacctctgattgtgtttgtgcatttcaaagcccagagctgtgacctcagccacggtgggcaggatgggtgctggagaagggcattaaggctcccagctttgtgggggaaatggcatcttcttgagtgagtggggaagtgcaaatagaatatgcacaagctaggaaggacgtttttaaagcctgtgcttcgaacattcttcctctaaaggatcaggtgagctggctcagagcagggagccaaccgctgagccagggtgagagggctttgtatttggagagtgaaaagaatacggttgtttaggctttggactcagagcatcagaaactcaggagaaatgagatcagctgaaaaagaaatgggtttgatgttgtagaccaaacatgaacagtggggaacaggctgaaaaaygaggggagaacagtcagcagcttccacggcttctcccaaatggagggaagtggggccagctcaggggacaggctggaggcttatgacggaaagatggtggggtccaggtgtggcaggacaggaggcaaagctgggggctgctatgggacagagggggcagagggaaagttgtgctgctaatggggtcacaagagtcacttatggcctggggccttcaagaaccaagggaagccctcccagagcccagcaccaccacaagcaatgctcacggctccagccagcaagacttggggtagcagcccccagcctctctccccatattggggacaaaagagaactggagaagccagaga

SEQ ID NO: 701522 - DNA, 2546 bp, Homo sapiens
agtttcattttgtttctgtttccagttctctacaagtcattcatctctatttctttgcgagacagtttcatttgaggctggctttccccctgtggcacaagtggctgctttatgtcagcatttcagtgaagtccttagatgggctctgagtggcccagcttttgtcacatgccccctcctgaacaaatcaactcctgttgggaaggaaggtagtttgccgattggcttggtcaagtcacagtctcccttcttctcagccccttcaagaaggaaatcggcttctttgggctcacaccatcccccagcagatctctggactatgatcaagaacagggagaaaatgaagcaagtgttcccacactagtcatttccaagagctggccagttagcacagaacaagaaaacacacgcacggggcactggcatgtgggcagctgaagaagggccctgaagatgtacaagtcctaatttctggagcccatgaatatgttaggttacatggcaaggagaagttaagggcccaaatgggattacggtcactaatcagctgacctcgatgtcaggagattatcctgaattattcaggtgggatgtgcaagagggaggtaggcgagtccgcgtgagggtgcgcagtgtgagaaagcctcacaacaattgctggctttggaaatggaagggggctgtgagccagggcatgtgggcagctcagagaagcacagaaagagattcttctccacagtctccagaaaggaacgcagccccgatgacgccttggctgtagcccagtgacacccaggtcagagtctgacctccagaactgcaaaataatagatgtgtgttgttctgagccactgagctggtggtaatttgttacagcagcagtgagaaacaaaaacacggcattccaagggcagtactctgcatggcaggagtgacagagtggtgcccagtgcaacggtgtgtgacagaaatacaacatgcactgcaatggggatcttaagttttctagtggccacattaagaaagaaaaagaggccgggtgtggtggctcatgcctgtaataccagcagtttgagaggctgagtgggtggatggcttgaggttgggagttcgagaccagcctggccaacacggtgaaaccctgtctccactaaaaatacaaaaattagccaggagttatggtgggtgcctgtaatcccagctgctcaggaggcgaggcaggagaacacttgaatctgggaggcagagtttgcagtgagccaagatcgcaccactgcacgccagcctaggcaacagagcgagactccatgtaaaaaaaaaaaaaagaaaagaaagaaaaaaaacaggtaaaattaatttcaataatatattttaacccaatatattcaaaatactatcattgcaatgtgtcatcaatatacaaaatattgagaaggtgtttcccattctttttaatccccagttttagaattcagtgtatattttacacacagcacatctcaacatttctgagctccttttcagtgctcatcaggcacacatggttagtggctgctgccctggacagcacaggcctagtgactgtacttttggttgtaagggtggcagtggctggcatgaaccagaacaggggtttgtttgtgacagtgacaaggagaccgctaacccctgctgatctgtgtgtccagttttatttctcttttttctaatttttttatttccatacataccctgcttgtatatcaagctcttttctaatcagggatcctcaaatgacaggagttgacctctgattgtgtttgtgcatttcaaagcccagagctgtgacctcagccacggtgggcaggatgggtgctggagaagggcattaaggctcccagctttgtgggggaaatggcatcttcttgagtgagtggggaagtgcaaatagaatatgcacaagctaggaaggacgtttttaaagcctgtgcttcgaacattcttcctctaaaggatcaggtgagctggctcagagcagggagccaaccgctgagccagggtgagagggctttgtatttggagagtgaaaagaatacggttgtttaggctttggactcagagcatcagaaactcaggagaaatgagatcagctgaaaaagaaatgggtttgatgttgtagaccaaacatgaacagtggggaacaggctgaaaaatgaggggrgaacagtcagcagcttccacggcttctcccaaatggagggaagtggggccagctcaggggacaggctggaggcttatgacggaaagatggtggggtccaggtgtggcaggacaggaggcaaagctgggggctgctatgggacagagggggcagagggaaagttgtgctgctaatggggtcacaagagtcacttatggcctggggccttcaagaaccaagggaagccctcccagagcccagcaccaccacaagcaatgctcacggctccagccagcaagacttggggtagcagcccccagcctctctccccatattggggacaaaagagaactggagaagccagaga

SEQ ID NO: 701523 - DNA, 765 bp, Homo sapiens
ggatatgaacacttttatgtacacaacactttgtggagctattttatgtttaactacccatagcaccactatgtttatgctttccagagaaataagctctgaaattttattgaatataacctatttaaaaacttatttaactacaatgacagtctctccttgatgcaccaaaatcttcagaaataacttgtgaagacttgaaaacatgtcagtaattgacatgaaaaatgaagcactgacataattttttgcaggtataaaaaagacaagctgagatccttactagatccaagaagagcaaagtacgttagacaggaaataaatatggaacacaaatattttcacttgtaatgaaaattcctctatttacagttttcagaagagaaaaaaatayacacacacacacacacacacattcacacacaaaaaccagagcaatatggctttacggggtgtttcttcatcaaagtcctatttgccatttgacatctgggaacactctatagggatcaacaaaggggttctaaattgtgatctgagtagtttagagtttaacattcatgaaggggagccaagaggacaagtaacactttgaccatcggccatttcctctccttactgtcattctctgaaaagcacacactggattttctcagggtcatgacatgtcaaaaagacatgctttaagggggaaacagttgcaatcaacatagccatgggagagatgcagctatgcttgctaggatttccaatacttctgtttca

SEQ ID NO: 701524 - DNA, 596 bp, Homo sapiens
tcgcttctcactgcactctgcaacttgccttgaatttcttctgggcaagatccaataaccctcccttggggtctggatcgggaccccttttccagcaacaatattgtttcttgaactcggtggttatgcaagtgtgtccacattttaatcattcattgaaatgtacatgtacacttgtgatttctgcacacccgcttcaattttacaaattttatgctcacaacccattgggagaggtatatatacagggaaataactatggatccgtttggtaaacaaatgtagaactcaactatcytgcactcttgaagcagctgactccagtgccgcagggggctacctgcatgccaattccacacccaataatcttgggcaggttaccaaagtgtgaagaccctgactgaaaaatgggagtaataatacaactacctgatattgttgcaaggatttaatataacttatgtaaagtgggcagaagtgctccgcaggcacagagcaggtgctcaataaatgccaggaccaaaataccacgaaactgtaatttttataaggaaaaggatcttttcttcagtgctcaacgaggaaatattatgggg

SEQ ID NO: 701525 - DNA, 1044 bp, Homo sapiens
atattgctataaattagccactcattcctgtgtgcctcgaagccacttaatagaaaataaattaacaatttgattgagcaaaccaagatactcatatgtttggttggtactggtatttttatgttaaactcattggtattcattaactaattacatacatttcttttttttctttttttttttttttttgagactgagtcttgctctgtcactcaggctggagtgcagtggcacgatctcggcttactgcaacctctgcctcccgggttcaagcagttctgcttcagcctcccaaatagctggaattacaggtgcccaccaccacacccagataatttttgtatttttagtagagatggggttttamcctgttggtcaggctggtcttgaactcctgacctcaggtggtccatccaactcggcttcccgaagtgctaggattataggtgtgagccaccatgcttggccagttacatacgtttctgaaaacataatatggacatttgccttgctctcccagcattggctccttccacactaattctccttgctttgagggaagaaacccagaaacgattttatcggcattgtttccacttttaaccagttctgcctgaaagaaaattattaccccaataatcaacagtatcagaaaatttgtagatgcttccgtttaaaatgatcattgattttttttttttttttttttgagatggagttttgctctgtcacccaggctagagtgcagtggcgcgatctcggctcactgcaacctccacctcctgggttcaagcagttctcctgccacagcctcctgaggagctgggattacaggcacgtgccaccatgcccggcattttttgtgtttttagtagagacggggtttcaccatgttgaccaggctggtctcaaactcctgaccttaagtgatccacccgcctcagcctcccaatgtgctgggattacaggcgtgagccaccgcacctggcccctgcgatcattgatttttaaagttgatgtttgtaaatgttgctaacgccccca

SEQ ID NO: 701526 - DNA, 1044 bp, Homo sapiens
atattgctataaattagccactcattcctgtgtgcctcgaagccacttaatagaaaataaattaacaatttgattgagcaaaccaagatactcatatgtttggttggtactggtatttttatgttaaactcattggtattcattaactaattacatacatttcttttttttctttttttttttttttttgagactgagtcttgctctgtcactcaggctggagtgcagtggcacgatctcggcttactgcaacctctgcctcccgggttcaagcagttctgcttcagcctcccaaatagctggaattacaggtgcccaccaccacacccagataatttttgtatttttagtagagatggggttttaacctgttggtcaggctggtcttgaactcctgacctcaggtggtccatccaactcggcttcccraagtgctaggattataggtgtgagccaccatgcttggccagttacatacgtttctgaaaacataatatggacatttgccttgctctcccagcattggctccttccacactaattctccttgctttgagggaagaaacccagaaacgattttatcggcattgtttccacttttaaccagttctgcctgaaagaaaattattaccccaataatcaacagtatcagaaaatttgtagatgcttccgtttaaaatgatcattgattttttttttttttttttttgagatggagttttgctctgtcacccaggctagagtgcagtggcgcgatctcggctcactgcaacctccacctcctgggttcaagcagttctcctgccacagcctcctgaggagctgggattacaggcacgtgccaccatgcccggcattttttgtgtttttagtagagacggggtttcaccatgttgaccaggctggtctcaaactcctgaccttaagtgatccacccgcctcagcctcccaatgtgctgggattacaggcgtgagccaccgcacctggcccctgcgatcattgatttttaaagttgatgtttgtaaatgttgctaacgccccca

SEQ ID NO: 701527 - DNA, 1044 bp, Homo sapiens
atattgctataaattagccactcattcctgtgtgcctcgaagccacttaatagaaaataaattaacaatttgattgagcaaaccaagatactcatatgtttggttggtactggtatttttatgttaaactcattggtattcattaactaattacatacatttcttttttttctttttttttttttttttgagactgagtcttgctctgtcactcaggctggagtgcagtggcacgatctcggcttactgcaacctctgcctcccgggttcaagcagttctgcttcagcctcccaaatagctggaattacaggtgcccaccaccacacccagataatttttgtatttttagtagagatggggttttaacctgttggtcaggctggtcttgaactcctgacctcaggtggtccatccaactcggcttcccgaagtgctaggattataggtgtgagccaccatgcttggccagttacatacgtttctgaaaacataatatggacatttgccttgctctcccagcattggctccttccacactaattctccttgctttgagggaagaaacccagaaacgattttatcggcattgtttccacttttaaccagttctgcctgaaagaaaattattaccccaataatcaacagtatcagaaaatttgtagatgcttccgtttaaaatgatcattgattttttttttttttttttttgagatggagttttgctctgtcacccaggctagagtgcagtggcgcgatctcggctcactgyaacctccacctcctgggttcaagcagttctcctgccacagcctcctgaggagctgggattacaggcacgtgccaccatgcccggcattttttgtgtttttagtagagacggggtttcaccatgttgaccaggctggtctcaaactcctgaccttaagtgatccacccgcctcagcctcccaatgtgctgggattacaggcgtgagccaccgcacctggcccctgcgatcattgatttttaaagttgatgtttgtaaatgttgctaacgccccca

SEQ ID NO: 701528 - DNA, 1651 bp, Homo sapiens
gatgacattaatctattcatgagaaatcctctcccatgtaccaaactcttcctatttggcccatgtccaacattaggatcaaattccaacatgaggcttggagaggacaaagaagccatagcaggaacatttggtaaacaccagaaatcagaaaatgcatttgtatcaactcactgacaaaatcctctgctcttctcaatatcctaggttgctgtttgtgtctggcactccatggtgtcatagagcagatgcccccttctgctttaattcaaaataaatgcaatctttggttcatagatttctaatttttacacataaaaataggacaatgataaacaaatgatggcgatagaagcaaagatgctttcagtcctttgaaatctaatcaaaagagaaagacattttttatattgtttattgctctataggatgtgatacgtatgccaagatctctgcccaataaaattaaattattgttctttgtaaaaagaattaatatcatgctcaatctgggatctacttaataatcagtagctatgcaaagtctggttagcacaatagaataacttcctccttaggaaatcataaatgtgaacatgcaattcagagaggctttcatgccaggctgacttcaaagagaccagatacaaaattttctcttaatcggatgtctttttcttaaaatatgcatatataaatgggccgttactgagaggaatttaggattaagaaatatttcctatatgacaggttggtattcattgatttaataatttatttaataggtatttaatatggatacsaagcatggagataataagcaatttcataagaaataagaaattctgctacctgctcttagggcagtgacaatcaaaataaaagacatattaataaacaaatagtccattgtgatgttaccttaggaatgtgcacaaaatgacacagaagtacagaaatgctttttatccaaatatcaaaagctctttctttcttcccactacacaagatgtatgtgtgaaaatatatctatctacatattttatatctcaaaatgtataaagaagataaatatagtggtcacattatcatatatacttcagtaagtcattatcatatcttttcagattttgcttctttctccaaataattattttattttttatttctcttcttttctatccactatcctttttcagcagactacagtgttaagtctgcttttcctttgggaagcagctaagcaaaatttaaatgttttgcatactcatgatattctgtgtttttactttataatggtttttaaatagtgaagtactaatgaatttgtattttttcttatttagattttagttactcaccattttttactttatagagaaagagttatattccagaaaaacaaacatacttttcaaaaaattgggggaatatgagaagattacaggattttaggagattgtcatatctggaatttatacatcagtgtctgcagaaggaagtgagacttgttagaatgatgatattctgtcattactgaagtctgagtttgttaatctttgttttagaaactgttgggttaaagcagaaatacatgtacatatatgtacatatgcaaagtaatatatatatacatatgcatacatgccat

SEQ ID NO: 701529 - DNA, 1651 bp, Homo sapiens
gatgacattaatctattcatgagaaatcctctcccatgtaccaaactcttcctatttggcccatgtccaacattaggatcaaattccaacatgaggcttggagaggacaaagaagccatagcaggaacatttggtaaacaccagaaatcagaaaatgcatttgtatcaactcactgacaaaatcctctgctcttctcaatatcctaggttgctgtttgtgtctggcactccatggtgtcatagagcagatgcccccttctgctttaattcaaaataaatgcaatctttggttcatagatttctaatttttacacataaaaataggacaatgataaacaaatgatggcgatagaagcaaagatgctttcagtcctttgaaatctaatcaaaagagaaagacattttttatattgtttattgctctataggatgtgatacgtatgccaagatctctgcccaataaaattaaattattgttctttgtaaaaagaattaatatcatgctcaatctgggatctacttaataatcagtagctatgcaaagtctggttagcacaatagaataacttcctccttaggaaatcataaatgtgaacatgcaattcagagaggctttcatgccaggctgacttcaaagagaccagatacaaaattttctcttaatcggatgtctttttcttaaaatatgcatatataaatgggccgttactgagaggaatttaggattaagaaatatttcctatatgacaggttggtattcattgatttaataatttatttaataggtatttaatatggataccaagcatggagataataagcaatttcataagaaataagaaattctgctacctgctcttagggcagtgacaatcaaaataaaagacatattaataaacaaatagtccattgtgatgttaccttaggaatgtgcacaaaatgacacagaagtacagaaatgctttttatccaaatatcaaaagctctttctttcttcccactacacaagatgtatgtgtgaaaatatatctatctacatattttatatctcaaaatgtataaagaagataaatatagtggtcacattatcatatatacttcagtaagtcattatcatatcttttcagattttgcttctttctccaaataattattttattttttatttctcttcttttctatccactatcctttttcagcagactacagtgttaagtctgcttttcctttgggaagcagctaagcaaaatttaaatgttttgcatactcatgatattctgtgtttttactttataatggtttttaaatagtgaagtactaatgaatttgtattttttcttatttagattttagttactcaccattttttactttatagagaaagagttatattccagaaaaacaaacatacttttcaaaaaattgggggaatatgagaagattacaggattttaggagattgtcatatctggaatttatacatcagtgtctgcagaaggaagtgagacttgttagaatgatgatattctgtcattactgaagtctgagtttgttaatctttgttttrgaaactgttgggttaaagcagaaatacatgtacatatatgtacatatgcaaagtaatatatatatacatatgcatacatgccat

SEQ ID NO: 701530 - DNA, 1651 bp, Homo sapiens
gatgacattaatctattcatgagaaatcctctcccatgtaccaaactcttcctatttggcccatgtccaacattaggatcaaattccaacatgaggcttggagaggacaaagaagccatagcaggaacatttggtaaacaccagaaatcagaaaatgcatttgtatcaactcactgacaaaatcctctgctcttctcaatatcctaggttgctgtttgtgtctggcactccatggtgtcatagagcagatgcccccttctgctttaattcaaaataaatgcaatctttggttcatagatttctaatttttacacataaaaataggacaatgataaacaaatgatggcgatagaagcaaagatgctttcagtcctttgaaatctaatcaaaagagaaagacattttttatattgtttattgctctataggatgtgatacgtatgccaagatctctgcccaataaaattaaattattgttctttgtaaaaagaattaatatcatgctcaatctgggatctacttaataatcagtagctatgcaaagtctggttagcacaatagaataacttcctccttaggaaatcataaatgtgaacatgcaattcagagaggctttcatgccaggctgacttcaaagagaccagatacaaaattttctcttaatcggatgtctttttcttaaaatatgcatatataaatgggccgttactgagaggaatttaggattaagaaatatttcctatatgacaggttggtattcattgatttaataatttatttaataggtatttaatatggataccaagcatggagataataagcaatttcataagaaataagaaattctgctacctgctcttagggcagtgacaatcaaaataaaagacatattaataaacaaatagtccattgtgatgttaccttaggaatgtgcacaaaatgacacagaagtacagaaatgctttttatccaaatatcaaaagctctttctttcttcccactacacaagatgtatgtgtgaaaatatatctatctacatattttatatctcaaaatgtataaagaagataaatatagtggtcacattatcatatatacttcagtaagtcattatcatatcttttcagattttgcttctttctccaaataattattttattttttatttctcttcttttctatccactatcctttttcagcagactacagtgttaagtctgcttttcctttgggaagcagctaagcaaaatttaaatgttttgcatactcatgatattctgtgtttttactttataatggtttttaaatagtgaagtactaatgaatttgtattttttcttatttagattttagttactcaccattttttactttatagagaaagagttatattccagaaaaacaaacatacttttcaaaaaattgggggaatatgagaagattacaggattttaggagattgtcatatctggaatttatacatcagtgtctgcagaaggaagtgagacttgttagaatgatgatattctgtcattactgaagtctgagtttgttaatctttgttttagaaactgttgggttaaagcagaaatacatgtacatatatgtacatatgyaaagtaatatatatatacatatgcatacatgccat

SEQ ID NO: 701531 - DNA, 650 bp, Homo sapiens
tttaaaaaatacatccgtattttatgtgtgtttaaaaaacagctatgtatacttttaaaccaatatcrtgttggttaaaaaaaaagatgtgtttgatgtcttctacttctattttttctctcttcattttatttcatttttggctttaaaactaaatcataacatgttggtgctataatatttgattcgttaagcttttcatggtggattatgcattcatggtggattatggattatgaaacagaaaaaaaattctctttgtttgtttgtttaatgatttctgccttgatttctactttgtatgaaattattcttaccacgacccttaccttgcttgcttttgcctcttatgactttgaccattctttttattatttattttaaatttttgtgggtacaaagtagattaatatatttatagggtacatgagatatttttaaacaggcatacaatgcataataatcacatcaaggtaaatggggtatccatcacttcaagcatttatcccttctttgtgttacaaacaatccaattatactcttagtttttttaaaagaaacaacaaatttttgttgactgtagttatcctgttgtgctaccaaatactgtatcttgttcattctgtttaactatattttttagctcttta

SEQ ID NO: 701532 - DNA, 596 bp, Homo sapiens
tgctccttaatgcacagttttggggccggctctcccttcagggtcagcagcttaactctttctctctctgggcacgagtgagcagagctgcatcctggctccccmttgtccatctgcaagatggatagctttggctctcttgctctctctctctctggccacaagcgcctgcacaagagcacctgtacagtgtcagcagggcagttataccttccccaaacaatagtggctttgagccaagtataagcttacacaaacaggttatgtaactcgtggaggtgtgcacctatgcacccatcccgctaagtcatgcaggcctggatgtctgcctcagcccaattcttgacctaagcacatccatgtaccttacagttggaattggcaatcataccaaagaaaatgaaataggctataatctagtattatggttacttaactttgtagaagaataacaggcaggagatgcagtaagtatagaagcttcatctaatcaaaagacaccaaagctatgcaagtcccaaggtatctgggagctacataggagctgcagctctatttcccatcaaccttgaatgttactctaggtactcagtccc

SEQ ID NO: 701533 - DNA, 625 bp, Homo sapiens
ataagacagatcacatacaaaccaaggatggtttgaagagaatgaaccagaagcaggttcctaccatactctaggccagagaaaataaatccagaacctaaaggcagtggtggtagagctggagaaggtgacactgaattagtgtttaggagtaaaaataatcaaatttggggcacaaattaaaggattatatcccagttcctggcttgtactttggggtggtgccatttactgaaatggggtatctacaaagaggaggtttgaggtggaggaagcagacaagcacatttatatctcttatcattgtttcagtccgtgtgaattgtatgatgctatattatattcttttgtgcctttgtctaaattccttatgaatggggctcactgtacytactttgtgtctgtgtagatgtttccctgattatttaccacattttcttcattatctattaaattattcaataacaatttactgggcatctacctttctaggcattggggtaaaaaaatgaataacacaatttctatttcaaggagcatgtcatctactgtatgagacaaatacatacaataatgattattctaaaataagaactatgaaagtggtattccagttctccaatgt

SEQ ID NO: 701534 - DNA, 1397 bp, Homo sapiens
  misc_feature 836, 981: n = A,T,C or G
tgtaatcccagcactttgggaggccgaggcgggtggatcacgaggtcaggagatcgagaccatcctggctaacatggtgaaaccccgtctctactaaaaaatacaaaaaattagccaggcatggtggcgggcgcctgtagtcccagctacttgggaggctgaggcaggagaatggcgtgaayccgggaggcggagcttgcagtgagccgaaatcgcaccactgcactccagcctgggtgacagtgtcagactccgtctcaaaaaaaaaaaaaaaaaaaaatgcatgcagaaatgtaagaatctgagatcttgacaaacttcactgtcaatatgtttgctctcctgaaccatttattgcctaagttaagatttatgtatgattgtaaattaatttcttttcctcatctccaattataaacaatcacctgtttattacatctccttggcaaaataatacataatattgagtcataatgatgtccagtattccaactgctttaaatgagttgactcaataattcctcaagattatcctatagataacaagacattactgtctccaattcgcgatgaggattacaatgtgcagtcaggataaataattggcctcaaggcacacatctagatgacagcagagatgtaacttaatcgatagcttctagcgtcaggttctacatcctagtgttctgatgtaatgcacctctcatatcgtcacttctcttcacaattgcaatattaatcacgtagtttagcctccatctgagatcttgcctgtgtataactcaagatacacactgctgcaaaagtgatttcttagtgatataggcaaaaaaaanaaaccttcaaaaatctcctcctctctaaaagcaataaaaatagtgcaaaaaattgtcaaaacaacattttcagaactatacaaatgaactaaaggcttacaactatgcaaggagcatttattcaataaaataaactgaaaaaaancagtaagctttgcatcatttcaaactggtctattcccctccctctctctccagttctacagtagccttgaaaaccaacaaccctgcagcatggtaaaaccagcaacctcttgatttcaaattttaaagccctccatcaaaatgggtcagcagaacaagccttaagcagagatgacatctcagagataaatcactgctgctctggaccacgtctactcctatgtactgcaggacagcagagacttgagctgcaaaggctgctgctagccaagatgagtttatgtggaaattgaatcagtaataaaaaaatctttcatcaaaaaaattttaggacctgatggcattactgctgaattccaccaaatgtttacaaaaagcacttacaccaatccttctccaactctttaaaaagaatca

SEQ ID NO: 701535 - DNA, 1397 bp, Homo sapiens
  misc_feature 836, 981: n = A,T,C or G
tgtaatcccagcactttgggaggccgaggcgggtggatcacgaggtcaggagatcgagaccatcctggctaacatggtgaaaccccgtctctactaaaaaatacaaaaaattagccaggcatggtggcgggcgcctgtagtcccagctacttgggaggctgaggcaggagaatggcgtgaacccgggaggcggagcttgcagtgagccgaaatcgcaccactgcactccagcctgggtgacagtgtcagactccgtctcaaaaaaaaaaaaaaaaaaaaatgcatgcagaaatgtaagaatctgagatcttgacaaacttcactgtcaatatgtttgctctcctgaaccatttattgcctaagttaagatttatgtatgattgtaaattaatttcttttcctcatctccaattataaacaatcacctgtttattacatctccttggcaaaataatacataatattgagtcataatgatgtccagtattccaactgctttaaatgagttgactcaataattcctcaagattatcctatagataacaagacattactgtctccaattcgcgatgaggattacaargtgcagtcaggataaataattggcctcaaggcacacatctagatgacagcagagatgtaacttaatcgatagcttctagcgtcaggttctacatcctagtgttctgatgtaatgcacctctcatatcgtcacttctcttcacaattgcaatattaatcacgtagtttagcctccatctgagatcttgcctgtgtataactcaagatacacactgctgcaaaagtgatttcttagtgatataggcaaaaaaaanaaaccttcaaaaatctcctcctctctaaaagcaataaaaatagtgcaaaaaattgtcaaaacaacattttcagaactatacaaatgaactaaaggcttacaactatgcaaggagcatttattcaataaaataaactgaaaaaaancagtaagctttgcatcatttcaaactggtctattcccctccctctctctccagttctacagtagccttgaaaaccaacaaccctgcagcatggtaaaaccagcaacctcttgatttcaaattttaaagccctccatcaaaatgggtcagcagaacaagccttaagcagagatgacatctcagagataaatcactgctgctctggaccacgtctactcctatgtactgcaggacagcagagacttgagctgcaaaggctgctgctagccaagatgagtttatgtggaaattgaatcagtaataaaaaaatctttcatcaaaaaaattttaggacctgatggcattactgctgaattccaccaaatgtttacaaaaagcacttacaccaatccttctccaactctttaaaaagaatca

SEQ ID NO: 701536 - DNA, 640 bp, Homo sapiens
tctaatgctattgtcagttttactcatagaattttattggcattttaaagagaactttgggtaaggtttttcagtcatatctattctgaaaccttaatatcctacctgaagatttgtgttgcttaattttaaggtaaaaatgatttgctacctgatatagaataaatctaattgtaattcaattacgaagtttttttaaatcaaaggactcttcatcatttgttttgggatgtctattcgtgtgtgtttctttgtcctttgggaaactggttaggagaaagggaaagcatattttctagttctaagaaaggaaaataaaaataggagaatccataatatgcatttttcttaggcaattttaataatatttgtgttttaacactatgctaatagatgtttgttccctgtgggttaatttctatcttttttcagttgctcaggtacctgaatattggctttgtgtctaaagtttctggaactttcctccttaccgtgaaataacttggcttaaatcacactgcatatagtacacaggtgcttagctcaagcctgagaattactgcratctagtaaggcggatttgaactactgtgggagttctatttaggaagatgcagcctctgagcaagttgatggctat

SEQ ID NO: 701537 - DNA, 1818 bp, Homo sapiens
ggccatgatccaggaatgtaggcagcctgtggaagctgaaaaagtcaaggggacaaaattttcccctagagccttcagaaaataatgtaggtctagctgacaccttaattttagcacagtgaaactgattttggtcttttgaactctagaattctcagataacaaatctaggttgttttaagctactaggtttgtggtaatttgttacagcagcaatacgacattaatgcacttggtcttactttattcttctcagctaatatccaagtttttgctacttttccctgtaccactcttccttcttttattcaagaaaacaacttccacttcatcaagaaaattggggtgatcagatttaaatgacttttactcatgcccttacatctaaaaatgtttccatctatgcccacatctatgcctatttctcttaatctgagaaatacttgattgcatagcctcttgtctatgaaccatgcttcttggagtatctcatctgtttcacctgtaacttcaatctcttcccctcttttgtctcaagctgtaaacaggccctgatccttaaaacaaaaacgaattacaatcttgatcacgtttctcttatctttctcatttacgcttggactacttttgtaccatctttattgaaataacttacatattatacaactcacccatttaaagtttataattcaatttttttagcatattcacaatgttgtgcaaccatcaccacaatctaattttacagttttatcacccctaaaagaaaacccacacccattagcatcagacaacttcttggggaaaaaaagtttataatttctattttattttcattaaatttactatttattcactgaaatctagtttcttcccctatcacttcattgcaatagatctttcaaaatcattaatggcctctatattaacctgtccagtgtttaatcttgattttgctactctattacaactcttacattgctcatgtatttcttttgaaaatttctacacctgttatttcccaaataccattctgttctggttttctttctgcatctctgaacactcgttctcaatcttcaaggagttttctcacaaacacttaaccattggaaacactatgttccccaaagttccaataataaccttggtgctttttttcactctgttgcttttttaaaaaatagctatattgaagtataagtaatatagagaaactgcatatatttaatgtatacaatttgatgagtttgtacaaagtcatatacccataccatacacacatgaacaaggtgagagaaggagagagagaaagagagagagaaacctcatcactctaagcttgagagtcagatatttgcaagtgtccataagacatatccacattgatttccaaaaggcacctcaaaggtatcttttaactcatgtcaaaaacttaactcattttctttatcaaatcctgcttcttgaactgaattcctatttcaaagactgtcactagcactacctagtcaacaaaatcagaaatctgataatcaaatgaggctcatccttcataccagaaagtccaataaaaagtcctcacctaatcagcaygttgtcagttactttctgccacaatactacattacacataatcttcactaaattctacaaggactgtatgattctttttctggatcataatttagaaatactgtttacaaagaagagttaagtttacttcttcctaaaactttttattgcctatttaaaaattttattactattctgctcattcaaaatattgtgatatattcataaactgaccatccttca

SEQ ID NO: 701538 - DNA, 741 bp, Homo sapiens
taacaatattattgtttcttagagatgaggccaatcgactccttacatatttccacattgttcttaagttctccctatcacctaaagcaattaagcatgtctgtctttgctgtctgaaacatctcaagcaccataattgtattatttaactctttcttttttccttgatatatttgaaaaagcatacatatatacacacgcacrcacacacacacacacacacacatatatatatatatataaaataaacataatccagagtaagttagacaatcttgatgttgttagagacccaaggtctaactttctgctctgctataccaagggggtgtgctccattttcatgtccaaattcaggaacggggccccgccttcacatatacatttcaaaaggtagaatgaaatagggtggggaagtcataactactcttttttaaggagatgttttaggagcaatacattttatttgcttacatctcaccagtcaaaataaagtcatcgtgatacatggatactggggaatgtagacttttatctgggatatggttcttctacaaaattaagaagaaaggatattccaaagcaacaagctttctctgaaagagatactaaaacaaacagtgacaataaaatacacacacccacacagaggcacatatctaatcatactgtcagaaagtaaatatggaggatatatacttaaaaatttttactaaattcttttttccaagtttttttgga

SEQ ID NO: 701539 - DNA, 741 bp, Homo sapiens
taacaatattattgtttcttagagatgaggccaatcgactccttacatatttccacattgttcttaagttctccctatcacctaaagcaattaagcatgtctgtctttgctgtctgaaacatctcaagcaccataattgtattatttaactctttcttttttccttgatatatttgaaaaagcatacatatatacacacgcacacacacacacacacacacacacayatatatatatatataaaataaacataatccagagtaagttagacaatcttgatgttgttagagacccaaggtctaactttctgctctgctataccaagggggtgtgctccattttcatgtccaaattcaggaacggggccccgccttcacatatacatttcaaaaggtagaatgaaatagggtggggaagtcataactactcttttttaaggagatgttttaggagcaatacattttatttgcttacatctcaccagtcaaaataaagtcatcgtgatacatggatactggggaatgtagacttttatctgggatatggttcttctacaaaattaagaagaaaggatattccaaagcaacaagctttctctgaaagagatactaaaacaaacagtgacaataaaatacacacacccacacagaggcacatatctaatcatactgtcagaaagtaaatatggaggatatatacttaaaaatttttactaaattcttttttccaagtttttttgga

SEQ ID NO: 701540 - DNA, 741 bp, Homo sapiens
taacaatattattgtttcttagagatgaggccaatcgactccttacatatttccacattgttcttaagttctccctatcacctaaagcaattaagcatgtctgtctttgctgtctgaaacatctcaagcaccataattgtattatttaactctttcttttttccttgatatatttgaaaaagcatacatatatacacacgcacacacacacacacacacacacacatatatatatatatataaaataaacataatccagagtaagttagacaatcttgatgttgttagagacccaaggtctaactttctgctctgctataccaagggggtgtgctccattttcatgtccaaattcaggaacggggcccygccttcacatatacatttcaaaaggtagaatgaaatagggtggggaagtcataactactcttttttaaggagatgttttaggagcaatacattttatttgcttacatctcaccagtcaaaataaagtcatcgtgatacatggatactggggaatgtagacttttatctgggatatggttcttctacaaaattaagaagaaaggatattccaaagcaacaagctttctctgaaagagatactaaaacaaacagtgacaataaaatacacacacccacacagaggcacatatctaatcatactgtcagaaagtaaatatggaggatatatacttaaaaatttttactaaattcttttttccaagtttttttgga

SEQ ID NO: 701541 - DNA, 3286 bp, Homo sapiens
tttcttgtttgcaaaactatataaggcttttttattgttgttatttaatgtgaatgagcacagaaaaacattaatagataaatgctgagtaaattaaattaaatcgaatgtagttaattgtggactatttactctccacacactacttcaccagtttaatcaaatatctcatattttgctcctttttatttgcttgtttgtttgtttggtttggattttgttttaaacatgttatctgatccttgaagtaagaatgtagagaagcagagaaaataaacgacaagtaaatctgacttaaattaaagcattgcctagtctaaacggtacattaacatttgtaaatagtttgtcctagaaaatttggtagagggtaagcacatcaaaagatacataagtctgaaatcacctaacacwacagatagagaaaaggttagttaggggattaagcatataaatgttataaaaaggcagtttaattgcttaaatgtttcattgaatataagatacatatgtcacatttcatttccaagcatcttaatttgatcccttggatttcaagagaattttataaggaatgtttgggttttcattatcatttcatttataaaaacatgaagtattttatgatacatttatattatcattcatttaaaattacagcactgaatgaatcccaattataaaattttttattgtaaaaattattttaaagttacaaaataatttctaagtaacctttattcaggtatttctgaaatgatgtatgatatttactgcattaatttataatttattctctctcagtaacattcatacacatatttatatacatacctaaactctactataacaagaatcttgcaaacccataaaacaattatcaaaatactgtccttgatacagtattatatcataagcagactattcacatttttctaattttctcaataattttttatttttttagtccaggatccaaaataagatgtcatattattgtgttttaagaaggaagaggtttaaagaaattattgccctaaaaagcagatttttccatgaatctgctcttataagtagttaggttttctggtgtgtgtacaaaaataaaagatttctaactgtgcaatgtttgaccataagttctaaatatattattcctatatttgaatatgtgtaattcattatgacaattgctgcataataagtaaattatttaaacagtgtaaaattgaggaacacaaaagactataatggcaaaccaaatatataatgagcaaatatttattctacgtttatgtcagtagtggaagattttgcaactatacctatcataaaacacttaaaactatacctatatttctaatattaaaatacacacacacacacacacacacacacactgaaagtttttctctgagtgaataaactggtcatttggctgtataacaaatagagatgcaaccctacctagctgcctagatagtttaaaatacctaatcaaaatagtcacttttgaaaaccatctcaagaatttttactgccaagtacagttcatatatttaatattattaattctgatgtaaatgtagttaatatataatataaacaccaacaatttatacgtagaaactaatctatttgtagcttaagacagttttatcatcacttcaattttttacttattttattattcagaatgtcaaaatgttaatctttagaagtatattttttagcaaaatataattcacctattaaataaaatgaaggtgggaaatatagaaaatgcaaatatttaaattctccaagtatattaaaattgaattttagacagtactcctaacatacattttaagcaatttgccagttttgctatgatagcaatgacattacttctctttttctatgttactgaatagactagtgacttttctactataggcttaaaatttgttgaaagacccataaatgccagtaccatcaaagagatcttaaatttaaaaaggtcaaggaaaatactattttaaaaaacttttataatcattacgtttgtatttgtttgcagtcctaacatttacttattatatatttatgatatatcacatctttaagcaacttagatgtattaacattttcaagttgcatagtacaccacttgtaccaattataaatcaggctctactctaaaagttttatatataatatatttgcttttaatgctaacatatgtggttcataactttttgaaataaatgtaacttactagaacattatttgtcaaattgtatatcgaaaaaaatttctctttattctttagtaatatgcaacaaaaccaagagaggaaaatcatgagagctctgtatacagcttttaaaacttctagaaaaacatagaaaaaaaatcattgtgagcttggtttagacaaagacaaagatttcttagctattacacctaaaactcaatatgttactggaattttttaaaatgtgctcttccaaagttacagacataatgaaaagacaaatcacagactggaagaaaatagtggcaaattacatatctaattaaaaatttgtataaaggaaatttaactccatctcaaaactcaacaattagaaaaaaataaataatgggtaaaaatttgaacattttagtaagaaaatatgtgtaatatatttaagcccatgataaaatgctaaacattattgaggattaggaaattcaaattacatacacaatgagacacacacacacacacacacacacacacacacaaagagacagagacagagagaggattaataagacctaaagctggggaaatcgaatttattgaatttgtggttaacactatacaagtgattcttgtactattctcacaattgtgtaagtttacatttatatcaaaattaaaagttacaaaataattcttagaaaaacatgccaggtgaggtggctcatgcctgtaatcccagcactttgggaggccaatgttgggggatcacctgaggtcaggagttcgagaccagcctggccaacatggtgaaacccagtctctactaaaatacaaaaacattagccacacatgatggtgtgtgcctgcaatcccagctactcaggaggctgaagcaggagaatcgcttgaagacagaggttgcagtgagctgagatcacaccactgcactccagcctgggagacagagaaagactccatctcaaaaaaaaaaagaaaaaaaaaagaaagaaaaaatataattatgtagcataaatattttacaatgattatgct

SEQ ID NO: 701542 - DNA, 3286 bp, Homo sapiens
tttcttgtttgcaaaactatataaggcttttttattgttgttatttaatgtgaatgagcacagaaaaacattaatagataaatgctgagtaaattaaattaaatcgaatgtagttaattgtggactatttactctccacacactacttcaccagtttaatcaaatatctcatattttgctcctttttatttgcttgtttgtttgtttggtttggattttgttttaaacatgttatctgatccttgaagtaagaatgtagagaagcagagaaaataaacgacaagtaaatctgacttaaattaaagcattgcctagtctaaacggtacattaacatttgtaaatagtttgtcctagaaaatttggtagagggtaagcacatcaaaagatacataagtctgaaatcacctaacactacagatagagaaaaggttagttaggggattaagcatataaatgttataaaaaggcagtttaattgcttaaatgtttcatygaatataagatacatatgtcacatttcatttccaagcatcttaatttgatcccttggatttcaagagaattttataaggaatgtttgggttttcattatcatttcatttataaaaacatgaagtattttatgatacatttatattatcattcatttaaaattacagcactgaatgaatcccaattataaaattttttattgtaaaaattattttaaagttacaaaataatttctaagtaacctttattcaggtatttctgaaatgatgtatgatatttactgcattaatttataatttattctctctcagtaacattcatacacatatttatatacatacctaaactctactataacaagaatcttgcaaacccataaaacaattatcaaaatactgtccttgatacagtattatatcataagcagactattcacatttttctaattttctcaataattttttatttttttagtccaggatccaaaataagatgtcatattattgtgttttaagaaggaagaggtttaaagaaattattgccctaaaaagcagatttttccatgaatctgctcttataagtagttaggttttctggtgtgtgtacaaaaataaaagatttctaactgtgcaatgtttgaccataagttctaaatatattattcctatatttgaatatgtgtaattcattatgacaattgctgcataataagtaaattatttaaacagtgtaaaattgaggaacacaaaagactataatggcaaaccaaatatataatgagcaaatatttattctacgtttatgtcagtagtggaagattttgcaactatacctatcataaaacacttaaaactatacctatatttctaatattaaaatacacacacacacacacacacacacacactgaaagtttttctctgagtgaataaactggtcatttggctgtataacaaatagagatgcaaccctacctagctgcctagatagtttaaaatacctaatcaaaatagtcacttttgaaaaccatctcaagaatttttactgccaagtacagttcatatatttaatattattaattctgatgtaaatgtagttaatatataatataaacaccaacaatttatacgtagaaactaatctatttgtagcttaagacagttttatcatcacttcaattttttacttattttattattcagaatgtcaaaatgttaatctttagaagtatattttttagcaaaatataattcacctattaaataaaatgaaggtgggaaatatagaaaatgcaaatatttaaattctccaagtatattaaaattgaattttagacagtactcctaacatacattttaagcaatttgccagttttgctatgatagcaatgacattacttctctttttctatgttactgaatagactagtgacttttctactataggcttaaaatttgttgaaagacccataaatgccagtaccatcaaagagatcttaaatttaaaaaggtcaaggaaaatactattttaaaaaacttttataatcattacgtttgtatttgtttgcagtcctaacatttacttattatatatttatgatatatcacatctttaagcaacttagatgtattaacattttcaagttgcatagtacaccacttgtaccaattataaatcaggctctactctaaaagttttatatataatatatttgcttttaatgctaacatatgtggttcataactttttgaaataaatgtaacttactagaacattatttgtcaaattgtatatcgaaaaaaatttctctttattctttagtaatatgcaacaaaaccaagagaggaaaatcatgagagctctgtatacagcttttaaaacttctagaaaaacatagaaaaaaaatcattgtgagcttggtttagacaaagacaaagatttcttagctattacacctaaaactcaatatgttactggaattttttaaaatgtgctcttccaaagttacagacataatgaaaagacaaatcacagactggaagaaaatagtggcaaattacatatctaattaaaaatttgtataaaggaaatttaactccatctcaaaactcaacaattagaaaaaaataaataatgggtaaaaatttgaacattttagtaagaaaatatgtgtaatatatttaagcccatgataaaatgctaaacattattgaggattaggaaattcaaattacatacacaatgagacacacacacacacacacacacacacacacacaaagagacagagacagagagaggattaataagacctaaagctggggaaatcgaatttattgaatttgtggttaacactatacaagtgattcttgtactattctcacaattgtgtaagtttacatttatatcaaaattaaaagttacaaaataattcttagaaaaacatgccaggtgaggtggctcatgcctgtaatcccagcactttgggaggccaatgttgggggatcacctgaggtcaggagttcgagaccagcctggccaacatggtgaaacccagtctctactaaaatacaaaaacattagccacacatgatggtgtgtgcctgcaatcccagctactcaggaggctgaagcaggagaatcgcttgaagacagaggttgcagtgagctgagatcacaccactgcactccagcctgggagacagagaaagactccatctcaaaaaaaaaaagaaaaaaaaaagaaagaaaaaatataattatgtagcataaatattttacaatgattatgct

SEQ ID NO: 701543 - DNA, 1599 bp, Homo sapiens
tcatatacatacatatttacaatgaacacatggaatatatgtgtgtccatgtgtgtaacatatatttctacatacttgtgtatatgtaagaactaccaagcaaaaacatacaaggaattttttaaatataaataatggacaaggaatttctcaatggtaagtatcataaaataaaaaggtataacttttgaaacagtaaaatactaatttatttacatcatgaaagtataatagctgctagaaatgaaacagaatatcaacagaatatgtagaaatgtaatatcaaaaaatcacataatcacttcgaaagattaaattaaaacaaatgattgagccatatttcattatgggaaagcaaaacttatcaacatttatgacttgatccaacatgaattcatgattgtctaaagaaatgttatataacagattacaaataagtgttcatatgactgatgacataaatatttttaatgtttatatcaaataaactataaaataaatctaataggcaatacatacctgcagtaattattatgtctatcaaagtagtaatactcattgtataaatacggcattcaaaataggtaagacaaatatgaatgccttaaaaataagcaaaacatacaggaattcaataaaaaggtatttttaatgttcaatatgttcttaaaaagatattttcacaagaatatttatactgctttttttttttttttggactgaggatctcactctgtcacccacgcgtgagcgcagtggcaccatccttggcaaacttttttatttcacgtaggtttcgccatgttgcctagtaggtctccaacttctgagctcaagggacctgcacgcctcagcttcccaaagagctgggattacaggcatgaaccacagcgtcyggcctgcatattatctttatcaaattggcataaatgtttaaaaatcagtaatagaaaatgattgttacaattattatacattgttcttggaaacagaacaagaacaatatggcaggatgacagttcttccatatgaattcagtgtcttataatgatttaattcaaatatagttaaatatacttaaatatagttaagtatttagttaaataaattatatggaaatatgaataataaatataaaacctactaggattgtgatgctataatcatttataatatttatgattactaaaccttcttacagcattgatagtattatatgcaggctaatatatgaaatgactaattattaatatactgataaagaacataaatatatatttcattttatgacaaaaataatttatgttcattgtagaaaatataaaatatctttacaatgagtgaataaaaattataacctgtgataattattttattttttaataggagacaacaaactatacttggaatgaaaaaaaatcatgaaaaagaagctttagtgataaaaatgctaataagattatattatgaacattactatcagactagttttgaaaacataactgataatatttttagaaaaataacttaccaaaatgagctgcaatgatttccaaatactaataattgtatatgcattagagaaataatgtaagcagt

SEQ ID NO: 701544 - DNA, 738 bp, Homo sapiens
ttgcctccttgttcctgatcttgcatgaatatcacattgtaatttttggtcttcttaaaatttactttctcaaagttatagaagccagaggtctgacatcaaggtggtggccggttcttttttgaagctcttaggggtaatccatatcatgcctsttttctaggttctgatggctgacagaaatccttggcaaacattgtcctatagataaatcacttcaatacttttcatcttcacatgtctttctccaaaggccctataagtacccttcacttattattggacttattgcccaacctaatttaagataatcccatttcaatatttttaacttaatttcatgtgcaaatacttttttttccccaaatatgtaaggttaccttcatagcttttagggaacatatggtttctgcttgtttgtttgtgggccacaatttaacccagcacacatagaaaattaaaagttgaaaacttgagtttccttatcttaaatataaccagtcattttccccaaaagtaagaaatttttaaaaagtcttatcttatgttcaagggtacatatgcaggtttgttttataggtaaactagtgtcatggaggtttgttatccaggttatttcaccactcaggttctaagtcttgtactcagtagttattttttttctgattcttttcctcctcctaccctctacactcaagtaggccctagtatctgttgttctctgctatgtaaccatga

SEQ ID NO: 701545 - DNA, 738 bp, Homo sapiens
ttgcctccttgttcctgatcttgcatgaatatcacattgtaatttttggtcttcttaaaatttactttctcaaagttatagaagccagaggtctgacatcaaggtggtggccggttcttttttgaagctcttaggggtaatccatatcatgcctgttttctaggttctgatggctgacagaaatccttggyaaacattgtcctatagataaatcacttcaatacttttcatcttcacatgtctttctccaaaggccctataagtacccttcacttattattggacttattgcccaacctaatttaagataatcccatttcaatatttttaacttaatttcatgtgcaaatacttttttttccccaaatatgtaaggttaccttcatagcttttagggaacatatggtttctgcttgtttgtttgtgggccacaatttaacccagcacacatagaaaattaaaagttgaaaacttgagtttccttatcttaaatataaccagtcattttccccaaaagtaagaaatttttaaaaagtcttatcttatgttcaagggtacatatgcaggtttgttttataggtaaactagtgtcatggaggtttgttatccaggttatttcaccactcaggttctaagtcttgtactcagtagttattttttttctgattcttttcctcctcctaccctctacactcaagtaggccctagtatctgttgttctctgctatgtaaccatga

SEQ ID NO: 701546 - DNA, 738 bp, Homo sapiens
ttgcctccttgttcctgatcttgcatgaatatcacattgtaatttttggtcttcttaaaatttactttctcaaagttatagaagccagaggtctgacatcaaggtggtggccggttcttttttgaagctcttaggggtaatccatatcatgcctgttttctaggttctgatggctgacagaaatccttggcaaacattgtcctatagataaatcacttcaatacttttcatcttcacatgtctttctccaaaggccctataagtacccttcacttattattggacttattgcccaacctaatttaagataatcccatttcaatatttttaacttaatttcatgtgcaaatactyttttttccccaaatatgtaaggttaccttcatagcttttagggaacatatggtttctgcttgtttgtttgtgggccacaatttaacccagcacacatagaaaattaaaagttgaaaacttgagtttccttatcttaaatataaccagtcattttccccaaaagtaagaaatttttaaaaagtcttatcttatgttcaagggtacatatgcaggtttgttttataggtaaactagtgtcatggaggtttgttatccaggttatttcaccactcaggttctaagtcttgtactcagtagttattttttttctgattcttttcctcctcctaccctctacactcaagtaggccctagtatctgttgttctctgctatgtaaccatga

SEQ ID NO: 701547 - DNA, 738 bp, Homo sapiens
ttgcctccttgttcctgatcttgcatgaatatcacattgtaatttttggtcttcttaaaatttactttctcaaagttatagaagccagaggtctgacatcaaggtggtggccggttcttttttgaagctcttaggggtaatccatatcatgcctgttttctaggttctgatggctgacagaaatccttggcaaacattgtcctatagataaatcacttcaatacttttcatcttcacatgtctttctccaaaggccctataagtacccttcacttattattggacttattgcccaacctaatttaagataatcccatttcaatatttttaacttaatttcatgtgcaaatacttttttttccccaaatatgtaaggttaccttcatagcttttagggaacatatggtttctgcttgtttgtttgtgggccacaatttaacccagcacacatagaaaattaaaagttgaaaacttgagtttcctyatcttaaatataaccagtcattttccccaaaagtaagaaatttttaaaaagtcttatcttatgttcaagggtacatatgcaggtttgttttataggtaaactagtgtcatggaggtttgttatccaggttatttcaccactcaggttctaagtcttgtactcagtagttattttttttctgattcttttcctcctcctaccctctacactcaagtaggccctagtatctgttgttctctgctatgtaaccatga

SEQ ID NO: 701548 - DNA, 670 bp, Homo sapiens
ttagactccagggtccaaagtggaatgatgagatactttggaataatttttgctgtattctctggagcttagggggcacaaagattagtacctatttccctctttggactagatgtggacccaataaagggacaaagtgacctcaacaaaggaatggatcacagaatgcagaagtgtatgacagatgtcataagtagccatttcaagaagacatgctgtgcatatcccaggaaatgcaattagaggtttccagcaggggcttctctgagagactcttaatagtgtctcctaacaaaggagtgttgaacatccatcaaggcaaaagagatcaacaccaaaacaagtcaagaaagacttttyttttccttacctcctcttccctacccctgctctaatctcataggatccagagactgacttaggcaggagaaatagaagctcagggcgaggaaatcaagaagcttaattatgtcccttttcatactttgcaagcttgaagcaattctcagctcagagaagaggctttaaatgaaactcacatattattacagtgaactagaggttgtaattagtaaaatgagactagattttgactgaaaacaatcaaaggacatcaaagagtgataaaaattatagtctataccagttcttatccagggcaacaaaaaaa

SEQ ID NO: 701549 - DNA, 1721 bp, Homo sapiens
cactggggagaatggcaaacaaaccaatagtgaaaaaacaatgtggcaaatattataagatggctatgtcctgggtgcagtggaagaacagtagagggaaacattctctctacctgtggggagagccagacaagttttcacagcgaagacaaaaactcaactgagccttaagtaagggaaccataaacagtcatcaaggagacagataggaagggcatctcattgctgaacctgaggtctccctgaccaattcacatacttgctgctggtgtttagctggatacctgccctgctgagcctctgatcacagaaataccttagagtatgttctcagtctccccttaaatcaatgcaactggtgccctctctctcctttctcctgtattgatgtactgctttaagctttgttcactctacccattttttttgcttagtgctgctcatgttctgtctagcctgatcccccacctatgagctatttttgacaatggatttcttttcacttttccagtctcaagaataagagtttatgataattgttactgtcaaaaacccatggtgacaggtacatcgtgacttgaaaaaacactgtaatatttagggagaaatgtgttacattgaggtagaagtatttatctatgcattcaataaaattaataggtacatacttcggtactctaacagggtgtaattgttgaaatagtctttactacatagtcatctgtgaattctttctttgaaaatacctttttcatcccccacagtttggaatattgttcaaaagctctgatgagtaactcttctgtgtcagacactgttcttgctgcaaaaggataaagttacttaactgactccctcctttgcttcttgcactaactcagttgttctcaaccagggcaattttggcctccagcagatatttggcaaggtttggagatatttccggttctcacaattggtggaggaatgctactgctctctagtgggtagaggccagggatgtgataaagcttcttcaatacacaggatatctcctgcataacgaggaattttctaatcctaaatggcagtactggcacagttgagaaactctgtcctagccttgtatagagaatgctgtttttgctttgtacagatctccaaggcgcacccatctcctagcagttgtgagtattggctggtaaacattcacaccttctcctttctcagagaattacccctatccagccaggagcccccgcaatagagtggctaagactctcatcagaccaaagccacctcagaccaaagccaatgagaccaactctgtggggtaattcatacttcagagctttcctgtgggatcacattgaagctagtctctatttgagactatattcttgcttaatttttcccctgaactttgctgcttctgtcacttcacttccaattttctgagctcttcctcaataaattgcctgggcaacgatccctatcttgggctctgcttcygtgaaacccaacctgagacaacttgacttgaataaattaaatgctaaaacgtggcttccacactctctactctacattgggggtgatagattctagactttgatagtaacctcattttcttcaggtctcacctgataaagggtaaaaattagattatttttgcattgagacactactgtctctgaatcaattcctctctcataaacctgtcctcatcttctagaaagcca

SEQ ID NO: 701550 - DNA, 1324 bp, Homo sapiens
cccaatgacacatttttgtgaatccctgtaggtcaaaagggttctttcactccagctgtcttaaaacttctcggaggtttcctgaaatcaaatctccattccacccacgagatatctacaacccatttgcttgttggtatcctgactgcatccccaaacttccaaattgtacataaattcttctcaagttttgagatatgtaaaggcagcagggcttctttttctgtgcttctcttagctctttattttacttcctgagagcgtcattggtggccttttcctacaggtcgtcttccagctgctatgatgcattcatgaccctggctattaagggcagctatgaatggagtcaatgttattcagatcatttgccttatcattcctgtttactagactctgaaatgtcctggggatgagcacccatgtctgtatagctaagacaaggtcagatacatgttctcacgtaatcattatgatagtattttatgcaatatgcgaaagcattctttgtacaccttactttcttgcgcattgtttactgtgctgcgttctggaagagggcaaaggtttacttttgttgtaagctcactagaaatgctgattaggaaaatgatagaggagactctggctctgcttgtgaccctggaaataaatgctgcttctttcatctgtgcagtcacctattacactgctgcaaccaaatacacatttaaaggaaaggcagagacacacaaagatttcaaaacagtcttgtgtcttcatcctctggcccatgttttcaaatgtcagactggtatctctcacacaggagagctcaaatacaagagtgaaaactggtcagacaccctacccctgtctactttcaaaagtatgtgaaatgacttatttgctgatgacatttttattttattttcatgtgtggtttgacattcataaagaggcttttagaacattgctgtagttctaaacattgcttgtagacaagaaataaaaattaactgctttgtatgcataaatcaactttcttacatctgagtcttgttcatgtctgtagcaaaataaaaagcaagacggtaaccgctccattttagtgaactattatagataggaaaccttgtcgaagtaggaaatttcttttctttttttaaattactttttaaatttactactatctctatgccttctaaaatgtaatacagtgaattaacctaactaactactatggtttgaatgtgtcctccaaagttcaggtgttggaaacttagtccctgtattaggccattcttggatcgttataaagaaatacatgagattgastttttta

SEQ ID NO: 701551 - DNA, 1730 bp, Homo sapiens
aaaaaaaaaaaattgtgaagacttccaaaatcagggagggatgaaggacagtttaggtgactggaattgtgagaagtgggttgtagaaaggctcagtgaggcatttctatccaggggaggcggrtactctatgcctatttgttttacagacataccattaactattttaaggactaatgcgagcagaagacaaacatatttagtttgggacaaactggttgggtgcttaaaaacatagaaggatcaacatttctgtgatttttttttttctttttaacttcctgggccatgtgatggatcgtactgctaaccagccagcaggtagaatttgaggcgctgatctttctctctgcagctggacttttccgctagagactttttctccctgtcactttgggcttcaccagtccctgcattattaccacaagcacagaggactgtgtgcttcccttagctcatttctgatggaatgcaaagtagcattgtggatgagataggcattttcacattttttcaaataattttttttctgtcactgcttttggcaggctttgtagcctccaagcaagtagagaactgtattttattttcaaacagccagaaggagaatttcatgaaattacaatgattagcagtttgtagttagtgaattccaaggctgttggacatataatcagggggtgatgatactactccttcctgagggcagactgacttctggaaacttttaacatggcccagtgatttggagggatttgggagcaatgagctctttttttgttttttgtttgttcgtttggttggttggttttttatttttgagatagggtctggctctgtcacccaggctgcagtgcagtggtgtgatcttggctgactgcaacctccatttcctgggctcaagcaatcttcccacctcagcctttcaagtaattgggactacaggcacacaccaccacacctagctaatttttgtacttttgtagagatggggttttgccatgttgcccaagctggtctcgaactcctgagatcaaagcaatctacccaccccagcttcccaaagtgctgggattacaggtgtgagccactgtatccggccgtgatgagctctttgagtgaaaagtaaaccttggggaaaagaggaaaatatattggttggagagaccatgggggagagtcagacttaatttacccattaggatcatttcctgtaataagttgaaaagggatttaggctctattagagtagaactatatgaaaaaattgacagaaatttcaaagcgaatgaaagaaatgtacttcaaggactctcattagacagcaaattatcttccattagacaaggttcagctctagacaagacctacaggaagggagtatcaccagtaatcactggctttgccacacattttttacccccagtggctttgtagacacaaaacgatgccaggggtaggaccagaaacaactccactgtcagcccagtgctctctgctgcaaacatctgtgtattcctaggcaggatattggccatatatactctttgattttctatctaaggacccagagctctcctactttgtgattctggggtctctgttgggagatggacctgtatgccaaaaaagatgacgcgtaactatattatattgcatgtaagatccaaataggaggaaggaggaagaaatcaagtggagctgtgatgactagaacttgagtcaaatgt

SEQ ID NO: 701552 - DNA, 649 bp, Homo sapiens
aaagctcatattgtgctggaaagcacttctctttcttgcaatgtgatgtgtctcagacctcactgtgaacacagctcacctgggaatcatggtaaaactcaggctccaattcagcaggtctggttgggacctgggactctgcatgcctaccaagctcccagctcatgccaatgctgttaatccgtagaatacgcttggacaagcaaagctctggggcagcagttctcaaagtgaggtattgagaaccaggtagcagcagcagcatcacccagaagcatgctagaaatrcaaattccaaggccccactccagaacaaatgaatcaggaactctagggtggagcccaggaatctgcactttcacaaattcttcaggtgacgtgacgcacattgaagtttgagaaccactgctctagacagcagtgtattctccttctctgctctccttcatttataatgttttttttttttctgttagatgctctgattcgcttctaaatgagggaggaagtcctgatatacttgctacctgctcgggagaccaatgcaaaactcttcctaaaaaagcctctctaaacttctcaaagatggcagactctgcgtagttaagtggtaaaacccccggccagactccagactcaccttcatcca

SEQ ID NO: 701553 - DNA, 392 bp, Homo sapiens
taatgcktctctgacctctccatcctttagtccatcatccacagaaaatgatctttcaatcacatttttcactctggtcttcctctgcttaaagatttctgagtgacttgctcaaagtcatgcaaattgtgagtggcagagttgggatccaaattcaattgtgtggttccagaggtcaaaatttatcaccacatgagtcttctttaccaaacaacgtaaacaactgacattttgtgaagaggtattttgtaggctttcagaacccaaatatgttcaatatttcccaggcataaaaataggtattaacaaatcaatgttcattaagcatgagattaatgtggacactgggtggaactgagaagttcgggaggtagggttagctcctggcctgg

SEQ ID NO: 701554 - DNA, 1806 bp, Homo sapiens
gagagagtcaagggagttaacagtgttttaatggagatgattgtgtaatgggccatggcctttcagctgagtaaggaggaaagtgataacatgatagactgaggactgtgaagaaatagtagttttttgttaattgaaagtctcagtggggtcaaaggactatttgagagtaagtggacttaaaggtgggtgcaaacggtaggatactggcccattgggagttcagtactggtgcaattactgtgatgaccaggtcaagtggctgtggaggggtgcagaaaaagacccttggatgtgagcaggtcatgaagtggtgggtcatccagatgctggctgctcattccactggggatccctgtagcaaagtgtaggcaggtggtgacctggtggaagtgcagcctaacctgaagcaccagaattgagatggcttcctccctccctctccttccagtggtgaagtgcacagaagcagaaaagtccagttcactaggggtgtggccaaaaagagcaagtgcctttccctgtgtccattccaagtacattcagctggaccatagcataatatctgagataattagatcctgatgttgtaagaactccagagtgtaatttctcccccctggatactgatggttgacggatgactgattagagagttaaaaataagagataatatgattgacaactcgtaaataccagggattattggaagcactgaaatctccttggtgaatcttgcatattttatttctggtggagaagggagtcgggagagaggaggagatgagaaagacggagacagagcgggagggagacacccagagaaaatgaagacaacatttccatctggggtttgtgcttttctgagtgccgactccttttgatagattattagaaaactcatatttgctcataaatgtgaaaaaatagcaaatgtaaaatttgcaaatttattcctaaatgtagttaaattcataaatatttagacattttctgtaaagcttctaatttataacctttacatgaatctataatttggtataaaagcttctaaatgcagtagtaatgtcacaaatgtctataaatattcacatctcatttgcaaatattctacaaaccatggaatgaagaaattgtgagtgcaaaccatttttcaggtggatttctgtataggtaaattagtacaatgcacaaaaaaaccatctagaaatgattttgagaccatgattttagtttattgctgtataatcttaaaaaattattaagaatacctagaaaaagtatagttgtattaggaatgaataaacagattcaaatataaaaattaaaaattaagatctatgaaaaattcgaataaggttttcaaagaaactaggcagtactaagtagaatgttcagtttttgaatgaatacttatgaggctcagtgttttactctgtaaaatggtaataatacaatcttcataaagttttttttaataaccaggactatgcaagtaacaaacaacaaacactcatctsaaaagtgcttaaggaaacagaaacaaaaattcagtgactgacatgaaaatgtcagtggctgacaaacttcaagtctgtcttgatgcatgggctgaaattgggattcaacccctctctctctctctcacacacacacacacacacacacacacacacacacacacacagtctcacttttgcttaccttctcacagtcaagctttctgtcctcatctcctgactctgcttttcttagtattggcttcttttctggtgatctctcgtggctcctgacctttccagggtc

SEQ ID NO: 701555 - DNA, 1876 bp, Homo sapiens
ttcaaaagaacagaacaatgattgagcaaccctctggtaagtaaagaagtattttgagacctggctaatattctsaagttgattaaacaggcaaagccaactgcactttcttcttaagcaacccagttggaaagcacagagggtgaccggaataactaagaaacagtgagaaagaagacgagggaggggtgatggtaaggagggagaagcaaattgaagaaagagagaaaacaaaataaaatatattataaaaatgttaaaatatcaaaggaaattatttaaaatcaaaatattaaacagttcttatgcatcagaaacacagctggtagcatcttttccttcgaggctcagccagtgggcatgactgtgtggaactactttagaattctcagtattgtttaacattgaccaatagcttctgggaaggcttagaatacttggggaatcttccacagaagcagcatttaggaatattttagtctacccgaaggtaaaaaaaaaaaaaaaaaaaaaatcaacagagaacgagctgaattttggagattagtaaatatacattaaaataatatcaagtgatagcagcatagcttcaaagagcatgccgttttgagttgagcaaaaaattaacttgatcagtgtctggaagggcatagtatatatcagcatattatcatttggttgagtttcactggcaagcagagaaatttcctccttcccccctgtgaagtgctactgtggagagaagcattttcaaattgatcttactaagaatcatcagtgaacaatttgctactcgcaatcaatggtttctaacaatgttataacaggaatgtcatctcagggcacatacgtagtattcttaactgaaggataatcacacaaagataaatttagtctttttctgtattggagtatagaaatataccagtacttaaaatctcagagtgacttagagaggataggtgcttttcaaaggaaagcacatttgtgggatttttaaaataacatttttctcgcctttaaaaaagataacaggttatatgagtccatcttgaagcagaatttcatggctacaaatcaatgtggttgttggtttctcatgacttttggttagccaagtggacctcaaactatttttgactgggggcatgttctataaagtaaagagatttgtaggccacatttatcactttttctgaaaaatgttgataaaaatactaaaatacataaaaatatatacttaaatgtgtatatatatatatatactttaaaataagtgaaataattttgaagaatggggtactgcttaaagtttcataaatggacttataaatatattaatgaatcagaaatagaagtttagacaattatgtcctatattgtcaatatagacaatggcataaattataataataccaattagagtagacctacagaaatccttggttttgtggctaagaattgtttattgaccatgccttggtagtaattgatttcatggttaaaagtatgaattaattatactgaaatcttgtataatccaacaagaggaaaccaagattcagagtcagaagtcccaagttcaagacctagaaatacccataactgaaaatatgattctaggcaagttttgtaaatgcattgagcctcaatttccttaccaataattggggatacttactttattggttaatgcaaagatcaagaaagataatatatttgaaaagcattaatataaatgaacacactaagaaaataataactattataattactaacaacaagcaataatttattttatttaagaaaaatggtcaaaataacctatccaccttccaccttgttgcaaaaatgtttaacattgatgtcaaaatct

SEQ ID NO: 701556 - DNA, 1876 bp, Homo sapiens
ttcaaaagaacagaacaatgattgagcaaccctctggtaagtaaagaagtattttgagacctggctaatattctgaagttgattaaacaggcaaagccaactgcactttcttcttaagcaacccagttggaaagcacagagggtgaccggaataactaagaaacagtgagaaagaagacgagggaggggtgatggtaaggagggagaagcaaattgaagaaagagagaaaacaaaataaaatatattataaaaatgttaaaatatcaaaggaaattatttaaaatcaaaatattaaacagttcttatgcatcagaaacacagctggtagcatcttttccttcgaggctcagccagtgggcatgactgtgtggaactactttagaattctcagtattgtttaacattgaccaatagcttctgggaaggcttagaatacttggggaatcttccacagaagcagcatttaggaatattttagtctacccgaaggtaaaaaaaaaaaaaaaaaaaaaatcaacagagaacgagctgaattttggagattagtaaatatacattaaaataatatcaagtgatagcagcatagcttcaaagagcatgccgttttgagttgagcaaaaaattaacttgatcagtgtctggaagggcatagtatatatcagcatattatcatttggttgagtttcactggcaagcagagaaatttcctccttcccccctgtgaagtgctactgtggagagaagcattttcaaattgatcttactaagaatcatcagtgaacaatttgctactcgcaatcaatggtttctaacaatgttataacaggaatgtcatctcagggcacatacgtagtattcttaactgaaggataatcacacaaagataaatttagtctttttctgtattggagtatagaaatataccagtacttaaaatctcagagtgacttagagaggataggtgcttttcaaaggaaagcacatttgtgggatttttaaaataacatttttctcgcctttaaaaaagataacaggttatatgagtccatcttgaagcagaatttcatggctacaaatcaatgtggttgttggtttctcatgacttttggttagccaagtggacctcaaactatttttgactgggggcatrttctataaagtaaagagatttgtaggccacatttatcactttttctgaaaaatgttgataaaaatactaaaatacataaaaatatatacttaaatgtgtatatatatatatatactttaaaataagtgaaataattttgaagaatggggtactgcttaaagtttcataaatggacttataaatatattaatgaatcagaaatagaagtttagacaattatgtcctatattgtcaatatagacaatggcataaattataataataccaattagagtagacctacagaaatccttggttttgtggctaagaattgtttattgaccatgccttggtagtaattgatttcatggttaaaagtatgaattaattatactgaaatcttgtataatccaacaagaggaaaccaagattcagagtcagaagtcccaagttcaagacctagaaatacccataactgaaaatatgattctaggcaagttttgtaaatgcattgagcctcaatttccttaccaataattggggatacttactttattggttaatgcaaagatcaagaaagataatatatttgaaaagcattaatataaatgaacacactaagaaaataataactattataattactaacaacaagcaataatttattttatttaagaaaaatggtcaaaataacctatccaccttccaccttgttgcaaaaatgtttaacattgatgtcaaaatct

SEQ ID NO: 701557 - DNA, 1876 bp, Homo sapiens
ttcaaaagaacagaacaatgattgagcaaccctctggtaagtaaagaagtattttgagacctggctaatattctgaagttgattaaacaggcaaagccaactgcactttcttcttaagcaacccagttggaaagcacagagggtgaccggaataactaagaaacagtgagaaagaagacgagggaggggtgatggtaaggagggagaagcaaattgaagaaagagagaaaacaaaataaaatatattataaaaatgttaaaatatcaaaggaaattatttaaaatcaaaatattaaacagttcttatgcatcagaaacacagctggtagcatcttttccttcgaggctcagccagtgggcatgactgtgtggaactactttagaattctcagtattgtttaacattgaccaatagcttctgggaaggcttagaatacttggggaatcttccacagaagcagcatttaggaatattttagtctacccgaaggtaaaaaaaaaaaaaaaaaaaaaatcaacagagaacgagctgaattttggagattagtaaatatacattaaaataatatcaagtgatagcagcatagcttcaaagagcatgccgttttgagttgagcaaaaaattaacttgatcagtgtctggaagggcatagtatatatcagcatattatcatttggttgagtttcactggcaagcagagaaatttcctccttcccccctgtgaagtgctactgtggagagaagcattttcaaattgatcttactaagaatcatcagtgaacaatttgctactcgcaatcaatggtttctaacaatgttataacaggaatgtcatctcagggcacatacgtagtattcttaactgaaggataatcacacaaagataaatttagtctttttctgtattggagtatagaaatataccagtacttaaaatctcagagtgacttagagaggataggtgcttttcaaaggaaagcacatttgtgggatttttaaaataacatttttctcgcctttaaaaaagataacaggttatatgagtccatcttgaagcagaatttcatggctacaaatcaatgtggttgttggtttctcatgacttttggttagccaagtggacctcaaactatttttgactgggggcatgktctataaagtaaagagatttgtaggccacatttatcactttttctgaaaaatgttgataaaaatactaaaatacataaaaatatatacttaaatgtgtatatatatatatatactttaaaataagtgaaataattttgaagaatggggtactgcttaaagtttcataaatggacttataaatatattaatgaatcagaaatagaagtttagacaattatgtcctatattgtcaatatagacaatggcataaattataataataccaattagagtagacctacagaaatccttggttttgtggctaagaattgtttattgaccatgccttggtagtaattgatttcatggttaaaagtatgaattaattatactgaaatcttgtataatccaacaagaggaaaccaagattcagagtcagaagtcccaagttcaagacctagaaatacccataactgaaaatatgattctaggcaagttttgtaaatgcattgagcctcaatttccttaccaataattggggatacttactttattggttaatgcaaagatcaagaaagataatatatttgaaaagcattaatataaatgaacacactaagaaaataataactattataattactaacaacaagcaataatttattttatttaagaaaaatggtcaaaataacctatccaccttccaccttgttgcaaaaatgtttaacattgatgtcaaaatct

SEQ ID NO: 701558 - DNA, 1876 bp, Homo sapiens
ttcaaaagaacagaacaatgattgagcaaccctctggtaagtaaagaagtattttgagacctggctaatattctgaagttgattaaacaggcaaagccaactgcactttcttcttaagcaacccagttggaaagcacagagggtgaccggaataactaagaaacagtgagaaagaagacgagggaggggtgatggtaaggagggagaagcaaattgaagaaagagagaaaacaaaataaaatatattataaaaatgttaaaatatcaaaggaaattatttaaaatcaaaatattaaacagttcttatgcatcagaaacacagctggtagcatcttttccttcgaggctcagccagtgggcatgactgtgtggaactactttagaattctcagtattgtttaacattgaccaatagcttctgggaaggcttagaatacttggggaatcttccacagaagcagcatttaggaatattttagtctacccgaaggtaaaaaaaaaaaaaaaaaaaaaatcaacagagaacgagctgaattttggagattagtaaatatacattaaaataatatcaagtgatagcagcatagcttcaaagagcatgccgttttgagttgagcaaaaaattaacttgatcagtgtctggaagggcatagtatatatcagcatattatcatttggttgagtttcactggcaagcagagaaatttcctccttcccccctgtgaagtgctactgtggagagaagcattttcaaattgatcttactaagaatcatcagtgaacaatttgctactcgcaatcaatggtttctaacaatgttataacaggaatgtcatctcagggcacatacgtagtattcttaactgaaggataatcacacaaagataaatttagtctttttctgtattggagtatagaaatataccagtacttaaaatctcagagtgacttagagaggataggtgcttttcaaaggaaagcacatttgtgggatttttaaaataacatttttctcgcctttaaaaaagataacaggttatatgagtccatcttgaagcagaatttcatggctacaaatcaatgtggttgttggtttctcatgacttttggttagccaagtggacctcaaactatttttgactgggggcatgttctataaagtaaagagatttgtaggccacatttatcactttttctgaaaaatgttgataaaaatactaaaatacataaaaatatatacttaaatgtgtatatatatatatatactttaaaataagtgaaataattttgaagaatggggtactgcttaaagtttcataaatggacttataaatatattaatgaatcagaaatagaagtttagacaattatgtcctatattgtcaatatagacaatggcataaattataataataccaattagagtagacctacagaaatccttggttttgtggctaagaattgtttattgaccatgccttggtagtaattgatttcatggttaaaagtatgaattaattatactgaaatcttgtataatccaayaagaggaaaccaagattcagagtcagaagtcccaagttcaagacctagaaatacccataactgaaaatatgattctaggcaagttttgtaaatgcattgagcctcaatttccttaccaataattggggatacttactttattggttaatgcaaagatcaagaaagataatatatttgaaaagcattaatataaatgaacacactaagaaaataataactattataattactaacaacaagcaataatttattttatttaagaaaaatggtcaaaataacctatccaccttccaccttgttgcaaaaatgtttaacattgatgtcaaaatct

SEQ ID NO: 701559 - DNA, 1015 bp, Homo sapiens
tgacaactttgttctgtctctcctggcccctggctccctgacctcagcctccttcacttggctatctggaaagcagttactttctctcctggccccccgttttctctctttggcatgtgggaattaaagacaaaaggtctcaaaatcactttgaactccatggagggtgccaaataatctgaggacattattagtataagacaattcctttgaaaatggaaattgcstatcacacaatctctcaaacacagggtggaattaatgagcaatttgctcaagattcacaacttcaaaatgatcttccaggtggccaaaggaaattcacatttacacttcaatcagaaatttttttgtagaatgtaaggggggagggtttaattttctgagatcacaaatgcctatccccatcccaaggagaagagagcccgtgataaagaccgccctggtatctgtgaactctccagctaattagaaaagtgaatctaatttcatggatttcagctcctattaatttatcctaagcttgttggtaatgaagccatgtgtttgtttcttaagaaggaaacatcagagaggaagagaatgggtgtgaggctgtgctgtttattcccttaccttcaatctattaattgaggaaataacatatgatttaatatatattacaatgtcatcaacacagcacttgctttagctactgatggagccctgtgtggttatctcacataggcttacagtgcctgccacagctaagaaagaaggaataactgacagggaagtgaccaacagggtctgctaccttcctaatttctactgcttcattctatcctgtaatattcagcaaacatctattgaacaccttccatgttccaggcaagctaggcttgaacaagactgatagggattttagaacctatgtacgaccatcttaaacacataattattccaaatgattatttacaattgtgataaggactttgaaaaagaagtagtgtgttttgtacttcccctttccaca

SEQ ID NO: 701560 - DNA, 1025 bp, Homo sapiens
aatccaatgacaagtgtccttataagaagaggaaaagacaaagacaatggaagaaagcccgaggaagaccatgtgaaggagaaggcagaggttgggatgatgcagccacaagtcacggatcactgaggattgccaacagccactagaggctagaagagaagcagggaacaaacggtttctccctcagagtctccagacggcactgtgcagagccttgccagctctgctgacaccttgatttttagtcgtctggcttccagaactgtgagaaaataaatttctgttgttttaagccactcagctcgtgataaattgttatggcagccacaggtaactaaaacatatcctcagtgctcagcccagatccagcatggctctgtgaccagcaacccgcaagactagaatccaaagaagggctctccsgagcatgggatgccagaccttcccctttggctgcttaacacagaggaaactgtggctacaataaacagagaggggtctttgtaaacaggcaaccggttggctgcccaaagtggacaaccttttcaggattgagaaatggcagtcttcttgacattttagaaaatcttttcctgggggatttggcttcacttcctgcttggatttgaagcctgcaaatacatttacaaagtcaagcatttccctggtggctcccaggctcttttcagcagggagagggtagtggggtgtcattggtgatgttttctgccaagaacgaaagcaaaatttctcctgttcaccaacctccttgcccaaagcaaatctgaagaaggctcttatgacgcacctttcaaaagaaaaaaaactttttagaaacgtaagatttgtttaatgcttttaattaaccagacatatagttctcttggcaggtttgtggtagggagaataatggctccccaaagacatctctgtcctaatacctgtcctaatatgttaggtcatatggtagaggagaattaatgttgcagatggaattaaatttgccaatcagctgcccttaaaat

SEQ ID NO: 701561 - DNA, 1053 bp, Homo sapiens
tcctggcagggcagggttcctaaggtccttgctcccctgccctggtgacttgcctctggacatgatcccatttagcagtactccttacaaataggctcctacggggaaacaccggtctctagatgtcatctcaccttccttgcttcagaaggaaggacacgaaacctctacagaggcatccaagactgaattccagccaggcacagtggctcacgcctgtcatcccagcactttgagaggccgaggcaggagggttgcttgagcccagaagttcatgatcagcctgggcaacatggcaaaacccagtctctccaaaaaaaaaaaaaaaaaaaaaaagcaaaaattagccaggcatggtggcacgtacctgtggtcccagctactcaggaggctgaggcaggaggatctcgaccccaggaggtagaggctgcagtaaactgtgaacacactccagcctgggcaacagagtgagaccccatctcaaaaacaaacaatcaaacaaactgaattccattttggagttgtaagcccaactactgatttactgtggatttgcagacatgtcacagaacaggagaaaagataggtcttytatttaatgtaaactcacccctcttgtctgtggtagttggttggataactcaacatgcattctaatctcctttgccttgcccacctccactccagagactgggaagatgaaatattttctttcccagctttccctgaagctggaggtgagaggcctataacatagttctggccaattaaatctgaatgcaaatctgttggggcttctgagaaagttttgccttcctaataagagacaagtatctctggagccatcccttcctggtcctacttgcctttgacatagtcataacgtgactgttggggagatgcctggagaatctcagaaaagctggccctgacacaggggaccacggagccaatgtggacagtccccacctctggacttcttgcattagggaaaaaatctgaaccaatacactggggaaaaatagtttcaacttctaatacaaggagttaata

SEQ ID NO: 701562 - DNA, 1335 bp, Homo sapiens
gagctggtcatatggctctgcctaactgctggaagacagagaaagaagcgttgtccttttcatgccaaaagaagagcacaactgggtacgggcatgcactggaagtctccccaacaagggcccctccaattacacataaggtactcagtatgggtcttaagtgctcaataaattgggcaaagtggggaggtggggcaaaaaacccagagagaaggaagagagaagagaggaagaagcacgaagaaaatttacaaaaagaaattagatccagaacccaaagcaagaaggccccagggcccagccagtggttgctggagccagctcatgtactagctcatgagtgtcagttgccaaattttcaggaatggaagccagttattaaatagaacaatgattaaaaattaaattatatacacttaaaatcttattgaagacacaggtaataaatacacagatacatcacatcctaattctctgactacattttactattagctgtgttcttgaggttatttccattgattaccgcatggtgaaccctacttcccaactccatgcccagcgacatggcttggtagcctgtgggagtatttactcctgggaatcaggaaatgctgcaaaccagggcttttattccctagagagctagtgaaacatwtatcagccagggagtggccttccttccctggtgcatctaaactgagagttgcagtgaagctggtaagtgtgtcttgacttctccagagcagtgctggggcaggacatttccatttgtcaccagcaactggttgggagcaggtagtttagggagtgctgatgggtgagcatttccatctggagttcctatgggaatgggctacagggttagcaaccctaagtcatagcattttgcaaacacagacattcccttccaagactgcaaagcatggccctcgctcagaagcctacatcattgttatgttccaaggaaccagaggctggtgcagaatagtaatcatcacctgccaggagcctattgacaggaggactgcctgctgcctgtaactcctggtaacagggaggcccttctgggagctatccttgcactggctcctcaatgagatggtgatgtctttctctctctcaaagcatttttactgggtctctaagacagtagccaccagaaccagtgccaaggctgacagtgtgaactgcgagaggcctgggtttatttggccaactcagaatctaaatgtgcgagcatgggacttctttttatagccactgtaaaaattctccttatgctcactacttcacttttcccttaagccccaagccctctccccaccctgtctg

SEQ ID NO: 701563 - DNA, 612 bp, Homo sapiens
taaagattatcctgctttaatagttcagactagaggagagagaaaccatcttagttcctgatgacttcctattgccctattctggttgtacctcttcccccaggggtccatgatatttttggattccctctaacacttgtttgcttaggtgactgtgagtggttttctcttatttacaaccaaatgactctgaaaacactaatccactggtcctgatatttattgagacacattagaggccagggtatcaaggttatagcaatgaacaaaatagacaaaatatctccctcaatattctgattaggggagatactcagtgaacaagtacatatgtagtggggtcacgtggtgctaaatgasatggagaccaatcaggcaggggagggagatggcaaatgtcaggggtgattggtgggttggagttttaaatagagtagttagggaaggcctcactgggatggcaattgagcaaagttctttaggaagtgaaggatcctcattgctatctaggggcagagtggagaagtgtgcctggggagttaggaatggcaaggtggcccatttagctggcgtggagcaagggaggggagagtagtaagatacagaatggtg

SEQ ID NO: 701564 - DNA, 1095 bp, Homo sapiens
cttatttatttgatacttctttatagaaattatgtttaaactgttttgcttatctttggtttcattacctttatatggtaacattcccagtagtaggacaccagtagaacaaccatttctatgcatgtgagatgtcacacaaatatatactgtttcttgagttaacattgggacatgccttttagaggtgtggaagctgatttaaacaacttactcaacataccaaggagcctaacataagtktccataataaagtatattattcctcattcgcattgctctatgcaatttagccgtcaaatataactcagagataagtaacctaacagaaagataaatattactgtagagaagagcctggtcccattttacatagaacacagggtatccaaagatgtagttgcagcttactccaatccagttattattgttcaacgttgcttaatgctgattcacttgaggtcaataagcttaacaatttttttcaactttctatctatagtacagtctaaaattagaaaaaagaaaatgctcacgtcatattaggaacaatggacatatatacaattgtaataggagatagaatacaaaactattgcgattaaaccacaaagtactataagatatatgtatatattaacttttatatgtataaaatgtttctgaaggagtacacaagaaagcatgatggtgattctctgggaagggccaacacagtagtgggaaatagggtgagacggaaacttatctttcaccgtttacgtttttatttatttttttttcaaaaagaaaaataaagcaaattatttccataggaccgtggaggagaggcagttgtgttctgatgaggaattgggaaggcttcttgctagtgcagtgacatgagcttttcctcttggagaggtgccacatcctagctaaatgacatattttgtgatcctatggaatcctgtaacagtaaactaagccatagggcttttttagtatcttaagcaagtatgtgtctgagttgtagctagtaggttaaattgtgtaaagagttaaacggtctgtatctcataaccttcacattaatacagaaacatgacactgaaa

SEQ ID NO: 701565 - DNA, 1095 bp, Homo sapiens
cttatttatttgatacttctttatagaaattatgtttaaactgttttgcttatctttggtttcattacctttatatggtaacattcccagtagtaggacaccagtagaacaaccatttctatgcatgtgagatgtcacacaaatatatactgtttcttgagttaacattgggacatgccttttagaggtgtggaagctgatttaaacaacttactcaacataccaaggagcctaacataagtgtccataataaagtatattattcctcattcgcattgctctatgcaatttagccrtcaaatataactcagagataagtaacctaacagaaagataaatattactgtagagaagagcctggtcccattttacatagaacacagggtatccaaagatgtagttgcagcttactccaatccagttattattgttcaacgttgcttaatgctgattcacttgaggtcaataagcttaacaatttttttcaactttctatctatagtacagtctaaaattagaaaaaagaaaatgctcacgtcatattaggaacaatggacatatatacaattgtaataggagatagaatacaaaactattgcgattaaaccacaaagtactataagatatatgtatatattaacttttatatgtataaaatgtttctgaaggagtacacaagaaagcatgatggtgattctctgggaagggccaacacagtagtgggaaatagggtgagacggaaacttatctttcaccgtttacgtttttatttatttttttttcaaaaagaaaaataaagcaaattatttccataggaccgtggaggagaggcagttgtgttctgatgaggaattgggaaggcttcttgctagtgcagtgacatgagcttttcctcttggagaggtgccacatcctagctaaatgacatattttgtgatcctatggaatcctgtaacagtaaactaagccatagggcttttttagtatcttaagcaagtatgtgtctgagttgtagctagtaggttaaattgtgtaaagagttaaacggtctgtatctcataaccttcacattaatacagaaacatgacactgaaa

SEQ ID NO: 701566 - DNA, 1095 bp, Homo sapiens
cttatttatttgatacttctttatagaaattatgtttaaactgttttgcttatctttggtttcattacctttatatggtaacattcccagtagtaggacaccagtagaacaaccatttctatgcatgtgagatgtcacacaaatatatactgtttcttgagttaacattgggacatgccttttagaggtgtggaagctgatttaaacaacttactcaacataccaaggagcctaacataagtgtccataataaagtatattattcctcattcgcattgctctatgcaatttagccgtcaaatataactcagagataagtaacctaacagaaagataaatattactgtagagaagagcctggtcccattttacatagaacacagggtatccaaagatgtagttgcagcttactccaatccagttattattgttcaacgttgcttaatgctgattcacttgaggtcaataagcttaacaatttttttcaactttctatctatagtacagtctaaaattagaaaaaagaaaatgctcacgtcatattaggaacaatggacatatatacaattgtaataggagatagaatacaaaactattgcgattaaaccacaaagtactataagatatatgtatatattaacttttatatgtataaaatgtttctgaaggagtacacaagaaagcatgatggtgattctctgggaagggccaacacagtagtgggaaatagggtgagacggaaacttatctttcaccgtttacgtttttatttatttttttttcaaaaagaaaaataaagcaaattatttccataggaccgtggaggagaggcagttgtgttctgatgaggaattgggaaggcttcttgctagtgcagtgacatgagcttttcctcttggagaggtgccacatcctagctaaatgacatattttgtgatcctatggaatcctgtaacagtaaactaagccatagggcttttttagtatcttaagcaagtatgtgtctgagttgtagctagtaggttaaattgtgtaaagagttaaacggtctgtatctcataaccttcacrttaatacagaaacatgacactgaaa

SEQ ID NO: 701567 - DNA, 2382 bp, Homo sapiens
gattttaagcctaccttaacattttcccttattgtaaagagaactttcaaatagttgtttttaacactaagagaaaatttaaaagtcatagggtgagattttcttagctttcaactaagatctctttgtgcactgtcttcataaattttacaatttttttaaaggtctaaaaatttagccaccctgatatttgggggatctgtataagcagttaggctatgaatattgataatgacctatttatatttactgacattgctaagttaaaacatctgattctattaattttaagatgattatatactgttaattttaagatgattataatggaagacagatacagccacaatgttttactagatacatttaaaaaaattccagaaatacattttctttttattattatactttaagttctagggtacatgtgcacaatgtgcaggtttgttacatatgtatacatatgtatacatgtgccatgttggtgtgctgcacccattaactcgtcatttacattaggtgtatctcctaatgctatccctccccctctccccccaccccacaacaggctccggtgtttgatgttccccttcctgtgtccaagtacattttcaaatgtgctatttcaaaaacaatgaatatatttccatattatccttaaatttcaggagtcaaattcagattaatttcctaaagagaaatatttcattgagagtggcagagaaaacattagtagaataggtgaactaaaattcacataatcgtcttgttcttaggtaattcctaaatacctttaagataaaatccaaattctttgattagaaaataagaatttttccccttcatcatatctttattagtatccttccatccctgaatagtttacactctktcacttccttttttttttttttcttttttcttttttgagacagagacttgctctgtctcccaggctggagtgcagtggcttgatcttggatctcagctcacttcagcctgcgcctcctgggttcaagtgattctcctgcctcatcctcctgagtatctgggactataggcacacgccgccacacttagctaatttcactctcgtcacttctaagggcagttcctccctgcctggaatttcttttccgaactgcccccaccacacatgcacacacacacccctccatctggcaaatgacaaggaagccctctttgactcccagctcagagtgatattatctagtgtgtatttggccagctttcacaggttgaatgctgtttctctttgtgttaaataaatcctttgacaggattaatttatttctaggtctgagggtagaaactgatcataggagaggttggagtgaagtttgccgtgtgtatgtatgtgtgcaatgtgtatgtgtgtgtgcacacttaacagcattttgcacttagttatagataatacatgaaagtgatgttactcacagtaaggtcaatgaacccagcagcactggactcatcacctgggagcttgttagaaatgtagactcttgggcccgtttccagaccaactatatcaaaatctatattttaaccagatccccaggtgatttctgtgtatgttaagatttgagaagaactgttttggttatgactggctccataactgaaagaggaatgcatattaaatgttaaacatgaaatactctgaataattagagacttcagtagcacagaaatagtatattgcttacaatttccttactgtaggattatggtgccaattactttcatgtagtctcttttaacagtagttaaaatagagactaaatgaagaagaggtctttgtggaagtgggatgccattataagccacagactttaatgtgctagaagacattatggtctatgatgcaaatggggagtatttaaaatataattataacaacacatggcaataaagttgcacagtaattataaaggagtaattactgtttgcttgcttagtggagtatttctagtcttccaaactttgtattaaacatgcaacatacaatgcataaactgatataatgatcagatggcttataggatttggtgttttaagcaagcaaacaaaacaatgacaaagattttgcttatcaaaattaaggtatgagaatgtattttgattttctgtttacaatttaaaatacgtgcagtttgataagtcactaaaatgttctttaatatgctattgatgagaagatattgacatctaagatatcgacagcagaattcctgctttccttacagaagctgaccacttttaattttaacattcaatttatttaagttattctagtgtttgtattggactgtggtgatggttttaaatatttctttattgctataacattactggtct

SEQ ID NO: 701568 - DNA, 1990 bp, Homo sapiens
aaatagcagaggctgctccagactataataagtggggagaactcagttgaaggtatcttaatcaatctagcttcaatatgtcatcttttcatttaacagagacacactgcaacacagaatagattttacattattagctagtctattaccttttctatatgacaacagagttgatgttggggtggaccctccatgacttttggtattaataagtgatacaataaactgaccaaattcttatagatatgttaatgaaatatggttgttgatgtctggagattgtgaaggactggggtaccaagcctggttttactctttgatttaaatttctactttgttgctatccagtataacttgagatcctactgtagatttatataagtcctaagaagatagttttacaactgtgtttaacctttttaatgtattttcattcaaggcagttaataaaaaattttaatttattatacacagttaaaaaaattaccaagattaaaaggaaataatattcctaaaatactttggactccgattaaatgtggaatctttgaacacttttaaagtgtggaatttttaggatatagatatataaaaagtagtaataatattgtttttttatgtaatcagattaaaaataatacaatgaaatacaatctgtttactgcaatttccactaagcagtcaaatttagagtctgcattcattacagctggagagaatcaccctgaagagaaaagctgttgcatcaaattatgggaaatgtgaacaattccaagggaattagagtgttctttccaaaaacagtttataggaaggatcaggatcagagttttactaytgaaataattttgttcttctttgttttttttctttctattgtaaatctcaaggaaatgtgacataatttatttttagtatgtttatatatgtgcctactggttattttgaaccaagagaaaaaatctttgcatttctgggaacaaaaaatattaacacacctagcactcacataatttgctgagtgaatcaataaatgaatcaatgatatctttctaaatgccatcttttagagatggttgacatctgacaaactgaggtgataaggaaaagtgcttccccccagctcctaaccatagaatatttggtaaaaattaaaacaaaagtaagtcttaaataaaaagtttaaacattggaaggaaattctcagttaacaaaattgaagaaaaacaccctaaaatgagagagatgaacaaagctaagctaaatggccgaagggtgcacctaatctaaatggtctagaagactggggcttgacatgagagctagaaggagaatttactctgcagttagcaattcacaggatgataacaaaggagaacttcagagtgacagctctacctaaagagcaaacagtctagttttggagtaaaggaacaaaaggaccctggtgggatgtttctaaagaaaaagaaaaaaaaaatcagtggatagatcacccaatgtgttgagggaggtttcatggctctagtgaaatgtttggatctaatctagtaatagccattagcagactaatgggaaggggagaatcattcattaactcaggtatcaacatctctgaaaaaaagaattacacaaaaaggtgaatttttaaaaagtttttgcacagcaatggaaacaatcaagaaaatggaaaggcaacctacagaatggcagcaaataagctgagtgcagtagctcatgcctgtaatcccagcgctttggggggccaaggtgggataattgcttgaggacaagtttgaaaccagctgggcaatataatgagaccccatctcaaaaaaattttttttaattagctgagggtgatggcacgtgtctgtagttctagctactggggaggctgaggcaggaggatcgcttgagcccaggagcttcagccactgcactccagcttaaacaacagagtgagaccctgtctctaaaaaaaaaaaaa

SEQ ID NO: 701569 - DNA, 1990 bp, Homo sapiens
aaatagcagaggctgctccagactataataagtggggagaactcagttgaaggtatcttaatcaatctagcttcaatatgtcatcttttcatttaacagagacacactgcaacacagaatagattttacattattagctagtctattaccttttctatatgacaacagagttgatgttggggtggaccctccatgacttttggtattaataagtgatacaataaactgaccaaattcttatagatatgttaatgaaatatggttgttgatgtctggagattgtgaaggactggggtaccaagcctggttttactctttgatttaaatttctactttgttgctatccagtataacttgagatcctactgtagatttatataagtcctaagaagatagttttacaactgtgtttaacctttttaatgtattttcattcaaggcagttaataaaaaattttaatttattatacacagttaaaaaaattaccaagattaaaaggaaataatattcctaaaatactttggactccgattaaatgtggaatctttgaacacttttaaagtgtggaatttttaggatatagatatataaaaagtagtaataatattgtttttttatgtaatcagattaaaaataatacaatgaaatacaatctgtttactgcaatttccactaagcagtcaaatttagagtctgcattcattacagctggagagaatcaccctgaagagaaaagctgttgcatcaaattatgggaaatgtgaacaattccaagggaattagagtgttctttccaaaaacagtttataggaaggatcaggatcagagttttactactgaaataattttgttcttctttgttttttttctttctattgtaaatctcaaggaaatgtgacataatttatttttagtatgtttatatatgtgcctactggttattttgaaccaagagaaaaaatctttgcatttctgggaacaaaaaatattaacacacctagcactcacataatttgctgagtgaatcaataaatgaatcaatgatatctttctaaatgccatcttttagagatggttgacatctgacaaactgaggtgataaggaaaagtgcttccccccagctcctaaccatagaatatttggtaaaaattaaaacaaaagtaagtcttaaataaaaagtttaaacattggaaggaaattctcagttaacaaaattgaagaaaaacaccctaaaatgagagagatgaacaaagctaagctaaatggccgaagggtgcacctaatctaaatggtctagaagactggggcttgacatgagagctagaaggagaatttactctgcagttagcaattcacaggatgataacaaaggagaacttcagagtgacagctctacctaaagagcaaacagtctagttttggagtaaaggaacaaaaggaccctggtgggatgtttctaaagaaaaagaaaaaaaaaatcagtggatagatcacccaatgtgttgagggaggtttcatggctctagtgaaatgtttggatctaatctagtaatagccattagcagactaatgggaaggggagaatcattcattaactcaggtatcaacatctctgaaaaaaagaattacacaaaaaggtgaatttttaaaaagtttttgcacagcaatggaaacaatcaagaaaatggaaaggcaacctacagaatggcagcaaataagctgagtgcagtagctcatgcctgtaatcccagcgctttggggggccaaggtgggataattgcttgaggacaagtttgaaaccagctgggcaatataatgagaccccatctcaaaaaaattttttttaattagctgagggtgatggcacgtgtctgtagttctagctactggggaggctgaggcaggaggatcgcttgagcccaggagcttcagccactgcactccagcttaaacaacaragtgagaccctgtctctaaaaaaaaaaaaa

SEQ ID NO: 701570 - DNA, 601 bp, Homo sapiens
cgaagaaagagagaagggagtgtcccacctcagcmatgtcctaccgtggcctgaggacacggcaggagctcagaggggctaagggcagccaatagtgggccaagctatgacctagagagtcaggatggactgttaggggaactgtgtagagtccaagggcctgggctattgtgaggctagtcgggccactgttcagtctaatgccatgatggagggtttcataaggtagctaggaactcccctgagggctccatcatgacccaaaaagccctcataagaagatatcagactaatggacaccccagcctggcagggcctttcatcagttctttcattcatcagttggtttcggaagtcctcctatgtgctccttctacccttgcttccctctgccccgtagcagccagaatgatccttttaaaatgaaataaaactaccttgcttaagcaacccatcccattggtatggaataacccaaggtcatgcttgatctagctctttcctccctctctaactcaaccagatgcacaggccgtctttggatcttcaaatagacaaagctcattaccatttcagaatgtttgcatttactgttcctcct

SEQ ID NO: 701571 - DNA, 644 bp, Homo sapiens
aaagttctttcagctctcaaattttaaaaaaggtaaatggaaacatgcaacataaagggacaagaaaagtgactatggtttttgtaagtatttattgaagactattgagagaatgaaaatctacaaataatgctcatcatcattggccattagagaaatgcaaatcaaaaccataatgagataccatctcacaccagttagaatggcgatcattaggaaacaacaggtgctggagaggatgtggagaaataggaacacttttacactgttggtgggactgtaaactggttcaaccattgtggaagacagtgtggtgattcctcagggatctagaactagaaataccattcgacccagccatcccattactgggtrtatacccaaaggattataaatcatgctgctataaagacacatgcacacgtatgtttattgcggcactattcacaatagcaaagacccggaaccaacccaaatgtccaacaatgatagactggattaagaaaatgtggcacatatacaccatggtatactatgtagccatagaaaatgatgagttcatgtcctttgtagggatatggatgaaactggaaaccatcattctcagcaaagtatcgcaaggtcaaaaaaccaaacactacatg

SEQ ID NO: 701572 - DNA, 613 bp, Homo sapiens
ggcttatattctccatcttgcaaagcaacagagatttattaggggcacttacaccattgtctgaagaataaagaaaagtgtatttcgattacctttttttttttttttgagacggagtctygctctttcacccaggctggagtggaatggcgcgatctcggctcactgaaacctccgcctcctcggttcaagcaattctcctgcctcagcctcccaagtatctggaactgcaggcacccgccaccatgcccagctaatctttgtatttttagtaaagacgctgtttcaccatgttggctagtgagaggtgacagcgtgctggcagtcctcacagccctcgctcgctctcggcgcctcctctgcctgggctcccactttggcggaacttgaggagtccttcagcccaccactgcactgtgggagccactttctgggctagccaaggccggagccggctccctcagcttgcaaagaggtgtggaggcaggcgctggcgggaacctgggctgcccgtggcgcttgcgggctagcgcgagttccgggtgggcgtggcctcggcagacccggcattcggagcagctggccggccctgcccgcaggggcaatgaggggc

SEQ ID NO: 701573 - DNA, 654 bp, Homo sapiens
ggtacatattttatgaaattgtgatatgcctttaagttattattgcttgaagtaatcatccttaaacacgtcatctaaatgtctcattcatgatgtctaccacctgtctcctaatatctaagtaacaagcaaggtgattttaagaatgatatgtccttgctatataatgttatacttttacttattagggtcacaaaatgtaattaaaggtgggtaagttagaaaattctctgtggtggattgttttatctttcctaactattctcttccctctttgataatgaactatgtattcaccccccacccatcgctttgccatgtggattgccatacttcttgtatggttgagtacactttctgactacttgtttagttttcaccatatgacttgtgggaaccaatgaaatttgagcaaaagagatggagttttacatttagccaggagctttaagaatatcgtgggttgctcagtgctcttggtctttttgatacatcatgaaaagagtatgtcccaagtagaacmtgctccttcagcccaatctaaaaacgaaagtcttaggcagcaaaagtgtagcctggcagccagaattgatctgcaactgaacaagcaaccagtgagatataattccttttgttgttttataagcttttgat

SEQ ID NO: 701574 - DNA, 625 bp, Homo sapiens
tgttggtcattgtccttagcaaagtatttgcagaggtttcccatggcctaagatgaatggactctcctgtagaggctttgcatttgcttctatcaggagaccagagaagcattgccacttaagagcaacctcagattaagttcaagagtgagcttttctgacttagaaggctctgtataaatccaaagtgaatatttttgtagcaataattgctcaggaaccttattttactttcttctcttttttcctttcttcttctttttttaaatttcttctgctctgcttaacagcaaggcaagctgcttgacaattctttggtttgggataaaggaggacatatttacttctagctgatacttatmcaaaggcatatttttgggaggctttagattattagggtgtcaaagacaccctctaagaatttccgacctgaggaaacacttggctaccctctggttccttagaacctaagtttaaatgtgtgcttttggaaaattcctcagggcagaaacttactccatacgacctacatttcttatacaaagaaatatccacttatatctctgtgtttaagcattttcctgaaatggtttgtgtatacaactttatggtttttagttcctca

SEQ ID NO: 701575 - DNA, 1041 bp, Homo sapiens
cttcctaactctcattgacagaattaggttaaagtatacacacactgcagagaggatatttccatcattaatctttataatgcttaatttcaaagagattaacatagaccataaaattccctgtaatttatatraatataattcagaagcatattcaatacaattaatctccatatcagagtaaattgtggtaagaagatatatctggagaattttggatttgaaaaggttaagtaatattttgaaggataaagtttaaatttattgagtttcctgaaacattgggaaacagatatattttaaattaacttagccaaaagaaaatcctactttaattatatcagaaattcttgacagatctgccagatacaaatgggattttctgctactaagtctacaaaaatctcttaaggaattatccgagtctgttaaaaacatatcaaaacattgatataaaaatccttgatcattacaaaacaatatctgggtcatattcatctagtaggaaatgtctgaaaaacatcaatactgtaaagcctgtgtattcacaaagtactagggattagaacccttaaaggtaagctcttacacttagcgtttgtaaaactgaaactagtgactaatgtatgtgaattatggctaacagagaaaaatcatggtaaataagagctgaggaaaaagtttcagggctgattgttaatcactatggccacaaatgatcatgaaacagaataaaacaaaaattatggttgggcacagtgactcatgcctgtaatcctagcactttgggaagctgaggcaggtggatcaattgaacccaggagttcaagaccagcctgggcaacataggagatcccatccccaaatattatgattataggttaataaaaaaattatttttatttctgcaaaggtcatctttgataaagaactttctatttatctgtttatggtgaaatagtctctttcctactttatatgttgttatgataataaaacataattatgtggaaatactttgcaaagttagaagtcttaaaa

SEQ ID NO: 701576 - DNA, 676 bp, Homo sapiens
aaaatgagaaaaaaaggaaaaaacctaggagtccataaaaaatactaaaaatcaatggagagtaaaaataatctgacagtccaaaggaaaagcatagctctgaaaattgtctactttaggataaaatgaaaacgtccagaaatcactggggatacactctaccaaccagaaaaaaataaaaartattcaggaaaggacaggctaaaatgtaaagaaaataggatgaaataagaaagaaattaatgaaaactaaaaatgcaacagcaaaaccaaaactcataataaaagtaggaaaatgcagaatttattctgcagataatcaaatggtaatataaaagactaacattaaactacagaggaaaaggatacagagcagaaatcagaaatctgacatatacgtgcatgttcatcttagtgctattcaccatagcaaagacatggaatcaactaggtaccattagggtgaggtggataaagaaaatgtggtacatatacaccatggaatactgtgcagccataaaaagaatgacatcatatccttttgcagtaacatgaatgcagctggaggccattactctaagcaaattaactcaggaacagaaaaccaaatactgcatgttgttactcataaatgggagataaacattgggtactcatggacataaagatgggaaca

SEQ ID NO: 701577 - DNA, 632 bp, Homo sapiens
taaatggaacagaatgaaacataataggaaaatgttccctaggtggaaaactattcgtgtatgcgggatggaaaagttttttaatacacctaccattaggtcaatcttagcaattttcttcattaagggacacagaaaaatgtctataaacattcaggattaaaatacataaacctaaaaaataaaaatagagagactatagacttatctgcaatagttactgaagccagatattgaataaaccaaataaagcaatatrgagagatatttaaaagtaaaattgctacccagaacatttatatgcagttaacttacatatctgaatgactaaaggtgggtttgcaggaggttggagaactgcttaaaatggtggagactctatcatgtttcaaagatgataagaaaaattcatttcaagaggaagaggtcaattaaattagaaatggcataagtttccagagtggtgagagggaatagaaaataaacataaaggaaaagaaaacttccttattttcttgcagttttaaccgtttaataggaagaaaggtttcagctataactttttaacaggaagaaagtaaagtgagttctttctgatgatatattttccctctgaagtacaaagcaagatt

SEQ ID NO: 701578 - DNA, 632 bp, Homo sapiens
taaatggaacagaatgaaacataataggaaaatgttccctaggtggaaaactattcgtgtatgcgggatggaaaagttttttaatacacctaccattaggtcaatcttagcaattttcttcattaagggacacagaaaaatgtctataaacattcaggattaaaatacataaacctaaaaaataaaaatagagagactatagacttatctgcaatagttactgaagccagatattgaataaaccaaataaagcaatatggagagatatttaaaagtaaaattgctacccagaacatttatatgcagttaacttacatatctgaatgactaaaggtgkgtttgcaggaggttggagaactgcttaaaatggtggagactctatcatgtttcaaagatgataagaaaaattcatttcaagaggaagaggtcaattaaattagaaatggcataagtttccagagtggtgagagggaatagaaaataaacataaaggaaaagaaaacttccttattttcttgcagttttaaccgtttaataggaagaaaggtttcagctataactttttaacaggaagaaagtaaagtgagttctttctgatgatatattttccctctgaagtacaaagcaagatt

SEQ ID NO: 701579 - DNA, 632 bp, Homo sapiens
taaatggaacagaatgaaacataataggaaaatgttccctaggtggaaaactattcgtgtatgcgggatggaaaagttttttaatacacctaccattaggtcaatcttagcaattttcttcattaagggacacagaaaaatgtctataaacattcaggattaaaatacataaacctaaaaaataaaaatagagagactatagacttatctgcaatagttactgaagccagatattgaataaaccaaataaagcaatatggagagatatttaaaagtaaaattgctacccagaacatttatatgcagttaacttacatatctgaatgactaaaggtgggtttgcaggaggttggagaactgcttaaaatggtggagactctatcatgtttcaaagatgataagaaaaattcatttcaagaggaagaggtcaattaaattagaaatggcataagtttccagagyggtgagagggaatagaaaataaacataaaggaaaagaaaacttccttattttcttgcagttttaaccgtttaataggaagaaaggtttcagctataactttttaacaggaagaaagtaaagtgagttctttctgatgatatattttccctctgaagtacaaagcaagatt

SEQ ID NO: 701580 - DNA, 533 bp, Homo sapiens
gaactagaagatccaaaattttaattgttgaaatgctattcaattgctactttaattgttcaaaatgctcctatttacttgcatatccctgagagtatgaatattcacaatagactgtagttcttcataaatgctataatttcaatgtttcttatttattaaccatatttttgataccaataatgagtaagcagtgcgaagaatgttaatctttaataataacttccaattgcaaaaattcctaggaattctgaaatctttttctcaaatcctgaagataaatatctgttggaatttgaaaacactaggagaaagtctagaatggcaatttaaaaaaatactgagtgtcatgactayacaaacatgtagtatataataattcacttctactatcacttatctctatttgaactactaggtcattttatttgtatagtggacttcattggagccttttaaaatggttttggtccatagaagttaggccaatgctcacgttaagttgggattttaccaaacaaagataattataa

SEQ ID NO: 701581 - DNA, 648 bp, Homo sapiens
tagctgagggaaagagctgtcagtaaacagaactaagaaaccaagggaagataggacagacaagggtttccaacacttcagaaaggtctagaaagaggatttgatcattgaactgagcattatgaaggtctccagtgaccaagagaagaacaattctggtaggcatccatgaagaaatgattccaatgtggttttatgttaacaacatattttcataactttttttatgcaaaggcactaacttgtttcaaagcctactcaatttttggaaaaaaatttgttaaaaagataaaaaatagaaatggaaacacacaaaagtagttttgaaatcmaaggaaggaatggtttttggcctttaatttgatagagctatttgcaaagctcttaacagtattctctcactataacagataaataaagttaatagaacataaaatctattcataactagaataggcattctctcatatgttacagaaaattctcccctacagtgccaggaaaggatctcccgtctgagaatgcaaagcatgctttttaaaacactagcagttttctgtaaattggtgttgaagttaagaatccattgatatgttataaagaaaggaagtcagaacactttgatagtctatttcagttttcaaaaag

SEQ ID NO: 701582 - DNA, 1093 bp, Homo sapiens
gatttattcctatgtccataatcttatatggacaaccaatcttattggttaaatttctataacatgttctaatcttaaatatcacatgtatttaagccaagtttgatttgtatttacatgtttcacaggaagttcaagtgtattagccgtaggaggtaagacaggttcagggcctgagtactgtaggcttgtgaaaaagaagcctaaatatttcaaaagtaggatacattttaaaagacaactaaatattaactgactttcactagtaacctgggaaaaaaggattaaatttttttccccaagagtatatcttctcttttatccattctgaaatgtggaattaattcttatctttaaagaaatgaaattttttaataggtaatttcagtgtttaaaaaacyaatacttacagctttctttcctagttcagtctttgacaatgttaaggatcctgcaagatagcatccaggtcctgcccctttaggtattctaaacaagagaattcaaagagaaaaaaagcaacaaaagagaaagtttcacaaagacaagtaaggggaaaaacatgaaaacaattccacactgaattcattcccatagctaagacttcaaaaatcaaaggaagaaataacttcagccaaaaaaaaaatgactacatcctctaaatttagcctagatgtcataaactgacattaaaaggactacagtgtataagatgggcagtaagtataagcaatgttatcacttacttatcatcaggtaaggaagtaacaaagaatggctggttatatttgggtggtaatgtcaaattgcttgatttcttcttccctagaagtgcaaaactatgattttcatgaatatctaagctcaaggtattagacaatctatgagaaacaataaatggaaggtctttaaggcgttccaaatcactgatttgctcatggcgaatctgtagtcgaattgtataatctcctttctccagtttcaaagaatactgaaaaagaaaaacaacatttgggaaaagttaagtttaaccaagtcaacggaaatcactgaaagaggataaagtgaaagttaccattcacagacttgttca

SEQ ID NO: 701583 - DNA, 609 bp, Homo sapiens
ttttggcacttgagaggctttagtatataaagaagtagagatataaaatgatagmaagaggaaaatatgtcatcctagaggatacctaacagcagggaaaccaaaaaatgcataattacgagtcttgaggaagtcataagatgaaacatagaaaagaataggaatttatttgggggaaggcttttttagggaaaatttaaaatcacatataacaggcatgggagtcaaacatacaactttaatttttaaaaaaacttcccccaaatcagagaaatcatataaagttacaaagctgcaataaaaccaaattttttaaaaaactaatatatcaaataattttcagtaattattttatggaaatgacagagctttacacatcatgccaatgatgcctcagaattaattcaggaaggtagacttgtgtttctatcttaaatactagaaatgaaattggagggtaaagaatctgcctggagttggagaattgggaatatagccttgtttaagtcatacagaagggaatcctctttttaataaaactacgatgttccaaaagttggtattttctgggggatggagaatacagtagaatatattggtgatttactg

SEQ ID NO: 701584 - DNA, 609 bp, Homo sapiens
ttttggcacttgagaggctttagtatataaagaagtagagatataaaatgatagaaagaggaaaatatgtcatcctagaggatacctaacagcagggaaaccaaaaaatgcataattacgagtcttgaggaagtcataagatgaaacatagaaaagaataggaatttatttgggggaaggcttttttagggaaaatttaaaatcacatataacaggcatgggagtcaaacatacaactttaatttttaaaaaaacttyccccaaatcagagaaatcatataaagttacaaagctgcaataaaaccaaattttttaaaaaactaatatatcaaataattttcagtaattattttatggaaatgacagagctttacacatcatgccaatgatgcctcagaattaattcaggaaggtagacttgtgtttctatcttaaatactagaaatgaaattggagggtaaagaatctgcctggagttggagaattgggaatatagccttgtttaagtcatacagaagggaatcctctttttaataaaactacgatgttccaaaagttggtattttctgggggatggagaatacagtagaatatattggtgatttactg

SEQ ID NO: 701585 - DNA, 632 bp, Homo sapiens
tctgttgccctctttgtctagctttacaccaataccacactgccttaattactgtaactttattataagtcttgattctgtagtataagcagtctaactttgttcttggctatcttaggttctttgcatttccatataaattttaggatcagcttgtcaatttccacacacacaaaaaaaaacctgctgagttttaattgagaatcaatggaatctaaagattgattttaggatagctgatattttaacaatattatccataatgatctatttatttaacacagctttcatttctgtcagctatgtggtagttttcaagtttctattgcagaagttttgcacttttcttggtaaaagtattcttatgtatttgatgctttcaaaaactaatgtaaatgatcacktttaggcttatttttaatgcgtttattgccctaagataaaaatgtaatggatttttttatgttaatcttttatctagtaactttgctaaattgagtagttttagtaatttgtttgaacatcactttgggttctcggattacattttcttttaactttaccagtagtagtcctactgatttgacattatgtctataagtcaatctctacctcttacttttaatttgctg

SEQ ID NO: 701586 - DNA, 1116 bp, Homo sapiens
ttcaatgacatttatagctgtttttcattcagcaatggcagactaaataggcaaatggacttttttatagttatagtctagaagctgctttgaaactgcttttattggaagctctttttaaatacactggattgaatatcatctaatcaagtgatctacattttatgatggaaaagttttaagccattttagaaaaaaaaaatccccagtttacaagggcatttaaatgtaaataaaagccaaaagtgtttttcaaaatggagaacattttagtaaaactatttcagcctaaagcatttaaatctatatttygcttccagatctacatgttctaatacacaaagcaaaagaaatataagagcaaaaaattaaagaggctagaagttttcagcttgaagggaggaaaattaaggaaaaatgtaattgaaattattgcattttaaaaagttttgaccaagagaacggagacacatcattttctttcttcatttacttcaataatactttagaactttaagaatgtaaagaatctatgaaattacaacatggaggtcttcagtcgaatagaaggcaccatttgctgttggtgagagtttttaacatgggttagagagttgacagaaattttaaatcctctagtgaagtctttcgaaatatgacagattcattttttccaattggctagagttactcagttgtaatatctccaaatccgttcccatcctcttcaaattcttctagctcaatttgctgtttggcaaagtttgttaatttctccaaaagtgagttttcagcttaagggaggattagttggagaataattcttcctatttcttatgttttgtggtcagaggaaaagttggctatccttcaaatccattgaaatccatcacaatcaaaagaaacattggcaagtggttgtgtttctcaatacttcttgtacatttttggggggatgtatctcataaaaacaattctttcattgctcatggtcttaatttttttccccagtccatagataaactgagataaaaaatcagccagggattagggaacatcatgcaactggtgacactgtgcagaagatccagactcaaccaaaataaaagataacct

SEQ ID NO: 701587 - DNA, 1116 bp, Homo sapiens
ttcaatgacatttatagctgtttttcattcagcaatggcagactaaataggcaaatggacttttttatagttatagtctagaagctgctttgaaactgcttttattggaagctctttttaaatacactggattgaatatcatctaatcaagtgatctacattttatgatggaaaagttttaagccattttagaaaaaaaaaatccccagtttacaagggcatttaaatgtaaataaaagccaaaagtgtttttcaaaatggagaacattttagtaaaactatttcagcctaaagcatttaaatctatattttgcttccagatctacatgttctaatacacaaagcaaaagaaatataagagcaaaaaattaaagaggctagaagttttcagcttgaagggaggaaaattaaggaaaaatgtaattgaaattattgcattttaaaaagttttgaccaagagaacggagacacatcattttctttcttcatttacttcaataatactttagaactttaagaatgtaaagaatctatgaaattacaacatggaggtcttcagtcgaatagaaggcaccatttgctgttggtgagagtttttaacatgggttagagagttgacagaaattttaaatcctctmgtgaagtctttcgaaatatgacagattcattttttccaattggctagagttactcagttgtaatatctccaaatccgttcccatcctcttcaaattcttctagctcaatttgctgtttggcaaagtttgttaatttctccaaaagtgagttttcagcttaagggaggattagttggagaataattcttcctatttcttatgttttgtggtcagaggaaaagttggctatccttcaaatccattgaaatccatcacaatcaaaagaaacattggcaagtggttgtgtttctcaatacttcttgtacatttttggggggatgtatctcataaaaacaattctttcattgctcatggtcttaatttttttccccagtccatagataaactgagataaaaaatcagccagggattagggaacatcatgcaactggtgacactgtgcagaagatccagactcaaccaaaataaaagataacct

SEQ ID NO: 701588 - DNA, 1116 bp, Homo sapiens
ttcaatgacatttatagctgtttttcattcagcaatggcagactaaataggcaaatggacttttttatagttatagtctagaagctgctttgaaactgcttttattggaagctctttttaaatacactggattgaatatcatctaatcaagtgatctacattttatgatggaaaagttttaagccattttagaaaaaaaaaatccccagtttacaagggcatttaaatgtaaataaaagccaaaagtgtttttcaaaatggagaacattttagtaaaactatttcagcctaaagcatttaaatctatattttgcttccagatctacatgttctaatacacaaagcaaaagaaatataagagcaaaaaattaaagaggctagaagttttcagcttgaagggaggaaaattaaggaaaaatgtaattgaaattattgcattttaaaaagttttgaccaagagaacggagacacatcattttctttcttcatttacttcaataatactttagaactttaagaatgtaaagaatctatgaaattacaacatggaggtcttcagtcgaatagaaggcaccatttgctgttggtgagagtttttaacatgggttagagagttgacagaaattttaaatcctctagtgaagtctttcgaaatatgacagattcattttttccaattggctagagttactcagttgtaatatctccaaatccrttcccatcctcttcaaattcttctagctcaatttgctgtttggcaaagtttgttaatttctccaaaagtgagttttcagcttaagggaggattagttggagaataattcttcctatttcttatgttttgtggtcagaggaaaagttggctatccttcaaatccattgaaatccatcacaatcaaaagaaacattggcaagtggttgtgtttctcaatacttcttgtacatttttggggggatgtatctcataaaaacaattctttcattgctcatggtcttaatttttttccccagtccatagataaactgagataaaaaatcagccagggattagggaacatcatgcaactggtgacactgtgcagaagatccagactcaaccaaaataaaagataacct

SEQ ID NO: 701589 - DNA, 613 bp, Homo sapiens
tgggcactttcatctggtgagaacctaaggctgcttcctctcctggcagaaggcaaagggaagcctgtgtacgcagagatcacatgatgagagaggaagygagagagagagtggggaggtgtcaggctgtttttaacagccagctctcctaggaactaatcgggtgagaacacactcatcccggagggagggcattagtctattcatgaaggatctgcacccataacccaaacacctcccattaggtcccatctctgacactggagatcaaattttaacatgaagtttggaggggacaaacatctaaactatagcggtcatcaagatagcatggtgggggcactgcactacatggattacaaagagaggacaacagagtccttctctcttttatttatttatttatttatttatttttgagatagagtctagctctgtcacccaggctggagtgcagtggcgcaatcttagctcactgcaatctccgcctcccaggctcaagcgattctcctgcctcagccacccgagtagctgggactacaggcatgtgccagctcgcccagctaatttttgtatttttagtagaaatgaggtttcaccgtattggccaggc

SEQ ID NO: 701590 - DNA, 613 bp, Homo sapiens
tgggcactttcatctggtgagaacctaaggctgcttcctctcctggcagaaggcaaagggaagcctgtgtacgcagagatcacatgatgagagaggaagcgagagagagagtggggaggtgtcaggctgtttttaacagccagctctcctaggaactaatcgggtgagaacacactcatcccggagggagggcattagtctattcatgaaggatctgcacccataacccaaacacctcccattaggtcccatctctgacactggagatcaaattttaacatgaagtttggaggggacaaacatctaaactatagcggtcatcaagatagcatggtgggggcactgcactacatggattacaargagaggacaacagagtccttctctcttttatttatttatttatttatttatttttgagatagagtctagctctgtcacccaggctggagtgcagtggcgcaatcttagctcactgcaatctccgcctcccaggctcaagcgattctcctgcctcagccacccgagtagctgggactacaggcatgtgccagctcgcccagctaatttttgtatttttagtagaaatgaggtttcaccgtattggccaggc

SEQ ID NO: 701591 - DNA, 1446 bp, Homo sapiens
agaagaaaatcctagacatctcattctatctacaaatgtctcaatgtatattctgagagagaaggactcccaaaaataattttaaaaaataaattttgaaattattactaaaatttcctaaaatataaattggcaatctgtttttagagtgatgaaaatgaacaagaacaacaatcagacacagaagagggatccaataagaaagaaactcaggtaaataccattactttttgtattgagaagtattcatattttttaataattacttttaaattgcgttttattatgtttattcatgcaaagcagttattgcatactctacctacatgctgggtatgcaatatcagtgtttgcctggggatcaggattaaaaggactgggaagggtcacaaaataatgttttggaggtgatgaaaatgttctgagtcttgatcctagcagtggttttatggatatacagaactgccaaaactcaccaaattgtacactctaagtggatgtaatttaatgtatgtcatttaaccttcggagttaaaagaaaaagcaaaaaaagaaatagtacccttggccaaaggaaaatatctaaaggataatcagaagtagtggaaatccagaagtagtaggctcagattttatttctgtagattttatttcaaagttatgttctggagaatataggcatcttttaactttcttttacatatatttagaaatttagagtctccaacagatttttatgttgagaatctaaaagacatttttttcctctcagtactgatgaaggacctaaagcaagtttgaatgacaaggctgcacagccagcaagggttgaaagttcccccgacccccttcctgattgtttggctgtgtagaaagctaaaaaatattcaaaatatttctgttcatatgaggatagagctgaacaacacgagtctaaacctggcactgtctagcatgaaatagcattctggtcatattaatattattttcttcattttgagttgaagttccttaatagagctattacatttctttttagtcagcaaggatctacagtaatgtgaacaaaagttggttacctgtgctaggtgacggtgaacattattttagggccaagtttgcctattttgaccccacaattttattttatctttaggtggccagacaatgaggagtgaattggttctgaggttaaattatttgcaggcctaaagctttaactgttacctaaattttttggttatcagttatcagaactccccaatttacctatgtcccttctttattaaacaagaggggaggaaattagtaaaccatccccatctgacacctctcattgccttatcacgcagactccagcccccaccaggctggagtggaagggagattgtctrgcttttaaagttgtaattttgaagcatattgatgtatactgtattttaagtt

SEQ ID NO: 701592 - DNA, 568 bp, Homo sapiens
ttataatgtctgtcatttgctagttgtaccttgcaatagctaccattttattatgctttctgcaagttttaaaaattagtgttctgagtcatgttttcaaaatggacataataattgctaaaatattgttttaataaatttaatattattatatcctgttagaatatttaactgttactgaattttatctccaggataggcagaaataataaaatcagttctctgttatactaacggttgagatgaaaggcatggataacaaactgtacttaaagtagtatttatttttcaaatacaatcacaattttaaatatttaatttttcttatgaaagtaatatgtttattacagaaactttaacaaaagaagacaatattaaattatctgtaatctgtcatgcagagatagctgatattttgatactttttttttctaayatacacatgatgcagacacattcatactctgacaagctcacctaacctcctttttctgcttgtcaaatgcagataaattacaaagtagctaatccactctctataatcatggtattaatagtaactgctaac

SEQ ID NO: 701593 - DNA, 628 bp, Homo sapiens
ccatgcatggaagttttgggaaagctaatctttaaacactatttttaattttatttcctgttagtaccacttcactttgtacctggatattatgtgctgttccccctcctttatccagatacacagctagaaagactggtaatgatttggtgattctaatacagagtagaacgttctgttagataatcatgtactcccaatctttgcccaggatcctgggaatcttcaggaagtgtcaaaaccagtcccttacaaaggaaactacagataatgccaggtcaaggaaacaaaatgcctttatatcctgttaactttacttatacattgaacatgtgcttgtaagcagtatccaattataaaccctccatttatttttagaccaatgttctttaggacatataaagaaagtctcaagatttcccctctctcactcttcctgctaaaaatctgctgatttgaccccaatacatcatttgaaaagagacaggtgctgaggtttgatatstttccagtctttaagttttacctaccttcctttactcttaatttgtttgcttcaattgctttcatttttaatcacatcctcttctcacctgcaatagtctgttataatatatgtccatctctt

SEQ ID NO: 701594 - DNA, 1149 bp, Homo sapiens
ttgaaagaataattgttataagaattacgtatttcaggttttctctagtaattggaaggtatgaatttaaatctgacttatttcctaactgatcaaacatggactataatttatgaaatattttcaaaataaacatttaactatcctattcaaacttgaaatgtcacttcaattttagtttgactgagggttatagatggctacatttttttctcccaggcaatttttctattttaaatgttattagctgcccatattaataatgtgaaaaggcagagacaggataaccttaaaactcatacatcattttttcttaagtgtttcaaaggttaatacctaaccataaaggttaatgatacaaggtcagctgtataacatccacatgaaaccacatgaccgctgtagcgtttcataccattgacatgttgctgttttgtggaatgtatttgtcagttacaagagatgacatgcttgtttggtgccatgtaccctttatgaaaaaatgaactggctcaagtatccatgccagtcatgtactccgaataattacaaactacttcacactctaaatatttagatcactaggaatttcaacgttagaccatcacctttcccccgactgcacatcagagcagaaggctttctgactgcctgtccttgaacataacactaacacaacatatgaaactgattaggaggactgaggtgtttgaaagaaaaaaactttgatttttataaagattggcatgaagatcattcttctcagttgaaatttactttgataaaatacacccccttctcaactgcagttgccaagtataaaaacaaatgcctactttcttctgaatcacttttttatatttgtctcatgtatttttcagattttcacatcagtgtaacacaggtaagaataaaagcatagaattaaatccgaayatttacctatgaagaaacacttaacaggccagtactaaaacttggagctcataaaaggggaaacatgtctttctgtcgttgagtataatttagtttcaaaagatggttttttgggtttgctatgcaaaatcctctagcaacagtcacagtttctcagtactggtgttttaaagttctttgctttgggtagtgcctcgttgcaggtttaggaga

SEQ ID NO: 701595 - DNA, 590 bp, Homo sapiens
ttccacttcagtcctatcaaggtactcacaggtatgcataaaccaaatatacaagaatttaatgacagcattatttgcaaacagtgaaagattctgagcaatcaaaaggttcattactacaggcataggtctataaattactactgtatggaatactatgcagccattaaaataatgaggaagagggagagtgccctgtatgcactgacatrgaaaggtttcagtatatggtaaaaagcagctcatcttagaacagattttatagtatgaccccacttgtgtggaaatattttgtgatgtgccactcagtgtatacgtattcatgagtgcatatacaagtgtgtgagaagcaatgtaagtaactgttcacaaggaccccccctttaagaaggcagagggatcgggggatatagagtgaaggatgatttttgctttttcctctatatatataccattctctgaattaggtatgatcattccagggtatgttccttggattttttacactgcttccttctatccttcctgagaatcagatgtgtcctctttaatcagaattgaataaaacagtctgggaaaggttaaggtga

SEQ ID NO: 701596 - DNA, 572 bp, Homo sapiens
aacattttaattaggggagaaaactattgttatatataactttagaacatttttctttttttaaaaattatgctttaagttctagggtacatgttcacaacgtgcaggtttgttacatatgtatacatgtgctatgttggtgtactgcacccattaactcgtcatttacattagatatatctccgaatgctatccctccctcctccccccaccccacaacaggccctggtgtgtgatgttccccttcctgtgtccaagtgttaactttataacatttttcataccaggaacttttttttcttttacactagaacatgggagtgatactcccaagtttttgtcccccatcccaaaatgacaggggaagtaaaattmttttcacaaaaagtgtaccttttttaaaaagaacagtaagccagcattagatgacttattctaaaacaatcttcttctttaactgggcttttctgcagattttctaagaggaaaagttgatgtttaactccacatgttccttttttacgttcacaattttttttcacatttcctttctgataggagtagtattttat

SEQ ID NO: 701597 - DNA, 1387 bp, Homo sapiens
gactgtttccttcacttcatgtaataggaagaaaatgaacactttacattctacagtggatttgaggaaagwtttctgattttacaatgctgaattgttaaaacggcatggcacatgaatgatctcatgtcactagtacaaaatgaaaatccccgcaggcaattgcttttcctaattctgtttgattttctgagcacagataccattattcaaagcacatatgaaatcatgcacctgggcatataaatttggcatggagtctcctataggcctgagcttgaaaaaggttttggcgaattagcattttcccagcagtagacttaataaccctagagaaggctttgccaaccctactgtccatcatggagctcggttcttttaaaatgtcacatcagggaattagattttattataaaaattctactctactgacaatgtatttgaaaattataatagacaaaaaaccctaatcatgtgttatgagatgatttgtaaggtttctgttaagtttctcttttgggtttttctgtttgtctggcattgcaaataagcagtaccagaaacaaacaaacaaacaaacaaaagtcttagacagtggcttgctgtagaaaaataaaatccaatatgcatgaaatctagagaggaaagttccttccaccgtcctatgcttgttcttatgcatcactcattcattcattcttcatttggattttactgttgcttccatgagaggcacagtttcatggcttatgatggtgcgtgtcagaatttggaaggacacattgaacatctttctctggtatttcctttccttgtcattctagtatcatatgttcacatgcccatgtgcttgtgggatcagtgtcctcataggggaaataggacctgcagtgtgccaggggcagagggaggcaatagggggctgcaattgagccatgacactctgccatccagctgcgaccccacacaggccaaggctgtgattccttcaggcactttgaaccaatactcagctattgaagaggatagtcaacagagtgcttgaattttccagaatgattacctgaattacttgctttgaatcaccactggaaattctagctatgtgccttttatgtactttcgtacttatcacccatccatcctcttgacaagtgttggttgagtgtccactgtgtgccaggcatgttctaggtgctggagatgcaagagtggaaaacaaatcatggacacagtccccatccttatgctacagagatgctgggttagtgggaagaaaggcagtaaataaagaataacaaaaatataagaattacaaactgcaggaggactctctgagaagaaaaactgtgtgtgctttcaatgactgtgccaggggaatctgttt

SEQ ID NO: 701598 - DNA, 658 bp, Homo sapiens
ttccagggcataaatgaactgatggtttcagggttgcccctgtgaggtatttcaagtgccatgaccatctgacactggattgaagataaactcccctcctgtacactaattcaacagctagtgcagacagaggctgctggctccttggcagtctcagagtcatcctcagcacagtgctccaggcaaactccactgatcaattggaattggcactcaagttgaaattgttttcctgtctttgtttwaatctgtatttgtgtggtctaggccctggcttctagggtggcctgagtcagggccctgggttggctaacaaatagatggaaaagattggccgcatgctttaggtcaccaaatttggccaggaaactctctttaaatatcctagccagttcatcagggagggccaggccaggccttcttgacatcaccacaggtggggaacactctccgtccaccgcccatcagaaaagtgagcttgttctcagctcagtgttgtgatctgctgctgagagccaggccaggtgattatgcagctggcacgcagaccacacttagaacaggagcctcccaccacctcttccctacaaggtgctacaattgcttcctgagcagtggctgtagtcccaggccataggacacacatatacttcctgtc

SEQ ID NO: 701599 - DNA, 647 bp, Homo sapiens
tggcctgaccccctgtattaagaacttactgtttactttgaatacattttagaaattttcagtgcctagtaacttctctctgcaaagggaaattaataaacccttccttccacgagaggagtagtttagggtgtgactgggtgagcctgtcttcaccttgattcctgtgcgtaacctgcagctcacccctgctctgtcacagmgtcattttggggtgtggttagttgtttgtctattctgtcctctctgggagactgaactccttctttagcggttggctgggcacactgtggacagggaaacttcctgagcaaaaccagaagtatttctatgacttggtgtttgaaacaaagacagcgctttgttgagaatgaaacatcctctttgggattgagtctgcttttctcaagggttactttgagctcaaatgcttaatcatccttcctccaggtgccagagataatttttccagaaagactttccaggcgtttcttccccaccacccacagtctggatcaaatgcctccttcatgtgcctcaagcaccccaaatttcctttgttccagcccatccagagtcagaccaaacttttagatggagcacagtcctcagtacagatagaagtctgcccaaggcttctgacatca

SEQ ID NO: 701600 - DNA, 649 bp, Homo sapiens
tttaaacatatatcatattggttctgtctctctggagaaccctgactaatacagagtgtttttgtgggaaagaagtgagagaaaaacagaatacatcaaagacaggaactttcaaattagtgttgctaagtgtacagaggtacttcttctgaggtaaaactttcccatcatcagaaacttgaaagcctaaagaactttgctcaatatattgtgtaggggatttggatatttggatttaatatcaaggccacttacacatgtaagagtctaggaattcatgattctaaatgataggaaactacttasaggtctttggctggcaattatgaattagattaagttcaaagagggaaggtttttatttttcttcttgcatggctacaagagcagtttcaaacacatgataataacagttctttgtcttacaagatgaaagtttgattctactctccattctctattatcaagagtaattcaattaaaattttatttcaagctcatcttctatcagagttttgtctttggtatgcttgcattctaatatatcctatataagtcattcaaactggtgagcatctcatttggcaaaaagaatgcagttgtgtttttcataaacagcagtttggaaaactgggtacagagaacaaac

SEQ ID NO: 701601 - DNA, 1141 bp, Homo sapiens
tgcattacaatatatgacaaagtcacagctcaaatctaaaaaagcacttgaactccgagtttataaagaaatttaaaataataagatatacaatccaatttaaaacatagacaacaagttaaatagtttgccaaaggtgtaccaatgcaaacagggacatgaaaagatgctcaacatcattggttattagaaaaatgcaaattaaagccatattgagataccgccatagacctgctagaatgggtaaaattaaaaagattgagaataacaagtgatcgtgaggttgtgatacaactgaaagcctcttatgttggtgtccaagaatgctaaaatgatacagccactttgaaaaacagcattggcagtcttttttcttataaagataaacatatttatcatatgatttaacaattccacttctaagtatttaccaaaataaatacaaacaggtttaaacaaagacctgaactcaaatgttcagagaagctttattcataacaacccaaacctggaaacaaacgtaatgttcatcaaataacgaatggataaatactttaatattcatataatggaatgctacccagcggtaaaaaggagtgtactgcaaataccggagacaacatcataaatttcaaaagtatgatgctaagtgaataaagtcaggtataagacatcacatactgtatgattccatttatattacattctataaagrcaaacttatagggaaagcaaacaaattagtgattaccagaggctagggagttgggggagcaggtgttgaccacaaaggaaaataaaggaacttttctagatgataaaaatgttctgattcttgatgatggtggttacatgactgtatatatttatcaaaactcatcaaactgtacatttaaaatagtgggccttattgtatgtaattatacttcaataaacgtgaccaaaaaaaggtagaaagttagtcagtttactctatgatagtaggtaagtgttcagttcctctctgaagttgttgatggtatattttgatattgggcatatttcagtgcaattcagcttatttgaaatttgaagcactgaaggagataagattatttacactctaaatggtatgttattggaaaagtacagtatgtgaata

SEQ ID NO: 701602 - DNA, 654 bp, Homo sapiens
tgctacatttcctggggattttttttwaactgccttaattgcactaaattctctaaataattactgaaaaactatattagactcaaaaaagatacataacatggtccttactcaatgtaccttataaggggtagctagaagtagactggtatgatatttattatgatagaatatgaaaggcaccaaacaaccgtatgaacaaagtgctcagagctcggaggttgtgaagaacacagaaaggatgatatttgagctaagccttagtgtgtaagtagcctttcaccaggcagagaatgcagcaaaggcctttctataaagaggtgccaccttcatataaaataataatagcaactgacatttattgagaacttatttgctaggcattgttataagcacctgttatgttttatctcatttaattctcgctctaaaaaactctgtgtaatgggtgctgttataatcctcagtacatagatgaagaaacccagctgcgtgcacgtgtgtggaatactcttgggtagcatgagcaggtcaggcaatggcaaatggcatgatgtgacctcgagtcaacatcggaggcatcaaaggtaggttggatccaggtgatgaagtgccctcatcacttagccaggtggtaagtgcttttattacatg

SEQ ID NO: 701603 - DNA, 654 bp, Homo sapiens
tgctacatttcctggggatttttttttaactgccttaattgcactaaattctctaaataattactgaaaaactatattagactcaaaaaagatacataacatggtccttactcaatgtaccttataaggggtagctagaagtagactggtatgatatttattatgatagaatatgaaaggcaccaaacaaccgtatgaacamagtgctcagagctcggaggttgtgaagaacacagaaaggatgatatttgagctaagccttagtgtgtaagtagcctttcaccaggcagagaatgcagcaaaggcctttctataaagaggtgccaccttcatataaaataataatagcaactgacatttattgagaacttatttgctaggcattgttataagcacctgttatgttttatctcatttaattctcgctctaaaaaactctgtgtaatgggtgctgttataatcctcagtacatagatgaagaaacccagctgcgtgcacgtgtgtggaatactcttgggtagcatgagcaggtcaggcaatggcaaatggcatgatgtgacctcgagtcaacatcggaggcatcaaaggtaggttggatccaggtgatgaagtgccctcatcacttagccaggtggtaagtgcttttattacatg

SEQ ID NO: 701604 - DNA, 1352 bp, Homo sapiens
aatcctcgcccctgtcagacaagctatcattccattttcacctccaacctgcaaatttcaaaatcgatcctttttatatgtgccctggatgttgcaggtgcaaaaacatttcagaacaaatgtgatctgatcatttgcctatatatagagatcttaattatcacatttatccattttatttcttttgaaaggtttttagaggttgtatatcaatgacatcccttccgaaggatttgcatttgaaaggctgttgttcaaatttaattcacatttgacacaatgttttctcttgcagagcattacagaatatctgaaaatcagtttttagcagtctctattctacatccctctgatcatctctctttttattaacagtatattctaagtgaatttcatgtgtgttgtggaagtgaaaaaaatcagaaaatgttcatatcctttattcagtcccattttgatttttaaactgctcttctgtattgtctctcccatggggagtactgccaaaaggagcctgcaggacagtgtctctgggcttcctgggactacgggggtccagaataagaatcgacccgaagggagcacagtgtgttgttcatagagagtcatgattaatatctacctctgactctttgctcttctcctgtgagagcaagcctgtatgaaatcactccacatgcctggatggtttgttttgcacgtcaagctccaacagctctcagtgaaaaaccaagattacatcctcaaacccaggctgaagagagggctgtctttaagggtagcagaatgttcagatttgctcctggcaaatcctgttatcttagggggaaaaaaaattgagggtattgatgaagaggcccctttctttaagagggctgtccagtaaagagatgagagacagctggaattagcagctatttgttttgtatgcttttgtatgttgtttttgtattggaacacattttgttcccatagttagatattttttatttatttacttatttttttacccttggacgagaaataccgaaatccagatgcaaatgcagggtacaaagtaaactgcagaatggtatgctgtctctgtatcattgctcgttttataggttttgtcagtttctgaaaaacggtgaaagataattggcctgagatgtaaagccacactcggctgttccaaggaacaaagaaagacagctttagcccacaaggccatattttgtgaaacatactcttcctttttaataatgagcygatacacagtgcttcttctcagcactgaaaaatctgtagttttccccctgcaatgttgtacaaggcatttaaactggtgccatttgtaatgctgtggtcgg

SEQ ID NO: 701605 - DNA, 1750 bp, Homo sapiens
ttaatctctgcatttcagcacttggaaaaaatataacatccaaatgcaaatatatggaaatatctagaagtgtccagatagaagagaaagccttttttttttttttaagctcttgagcccttcatatttgtactcttttattgcttcatggcatcaccatgtaagtctttcctttattttccattttattttctgggaaagactttcttgagattctgatatgtccactttctagtaaaaatatacacatgtgcttgcattcttgtacatatgtttctcaaagtactgggaaggaggtggaatgagtcatggtgcctgaggtgtgaagccacagaagaaaaatattgcatattcctagaaagtccattttacttgaagatttgggaaaatagtaaaagaaaaattgatacattatggagtatgtaaacatttctatgcatgaaaaaaagggactccaaaataaattatgaccttgtggcagaccatctttcttcctcctttcccaccttttccccctatttcatctctcctttccattttttttctatctttaggggcttttcatgaaagagcttgataaagatttccagcctacttcttcagttccttccacacttttcatcttcagatgaagacacaaaaggtctactgccgttgtaggatgcaaatttacagagatcatccttaatttaggaaaagtggaagggttatagcgcaatactttcagttcaacttggaaagatttttgtttgaccacacttttttgtgtgtgtgaagtgaggtcaatgtttacgtttttgaatttaaatatgccatacattttatgtggatattttatttgatttgatttttaaaatattgggagatcagatatttagaatggtttcttacaagcctttgccaaagtctaccagcttagcattcattcakttactcatatattcattttttgagcaaatatttactgagcttcattctaatgtgaataccacactaagttttagaaatacaaagttggcatagtagatgcctgcaaggaactcaaagtcaagaggtgagcaaatgaacaactagtaatcccattaagaagcacttttataagaaacatgtacaacgtgcagcagggtggggcaaggtatggagaagagataaccgaagagtggagggatggggaggtgggaggtagaagggtgaaaaaaatagctgggaaatgaaggaagaaattccaaagaggtctcctttttcttccttgaagaaagggcaatgggttaaataaaggatagtcatttatatttatgttttaaaataagttgatattccataagctgcaatgttaaatatgctggatacttatattgctctaagtaaatttggcagctgtctttgtacagttgtttgaaggaaactgggaggaattatttacataaagaacaagattcaagcaatgcctcccacctgatggccaaagggcctacaattcacccaagaattgttttattgagtaatcacatcagaagacaagccattgtttggtacattaactgtagcatcaatgcattgtataatgaaaaggtagctcttaattcatcatatttgcctccaatgcatctagcaaggttttgaggaaatggtggacacagtacagtcttggagatggcttgaaattttgtttttttttttcttttttggagatggagtctcgctctgtcacccaggctggaatgcagtgtcacaatctcagctcactgca

SEQ ID NO: 701606 - DNA, 2329 bp, Homo sapiens
  misc_feature 1502, 1503, 1504, 1505, 1506, 1507, 1508, 1509, 1510, 1511,1512, 1513, 1514, 1515, 1516, 1517, 1518, 1519, 1520, 1521,1522, 1523, 1524, 1525, 1526, 1527, 1528, 1529, 1530, 1531,1532, 1533, 1534, 1535, 1536, 1537, 1538, 1539, 1540: n = A,T,C or G
  misc_feature 1541, 1542, 1543, 1544, 1545, 1546, 1547, 1548, 1549, 1550,1551, 1552, 1553, 1554, 1555, 1556, 1557, 1558, 1559, 1560,1561, 1562, 1563, 1564, 1565, 1566, 1567, 1568, 1569, 1570,1571, 1572, 1573, 1574, 1575, 1576, 1577, 1578, 1579: n = A,T,C or G
  misc_feature 1580, 1581, 1582, 1583, 1584, 1585, 1586, 1587, 1588, 1589,1590, 1591, 1592, 1593, 1594, 1595, 1596, 1597, 1598, 1599,1600, 1601: n = A,T,C or G
tgcaagagaatgttctggttagatgttacatgcatatatttagtgatgaagtattatgatatctgaaacttacttccaaatagttcagcaaatattataaacactttaaatacataatatatatttcaaagaatcagtcaatattatcaatattatatgtacatatatgtagtgaaattacaaaatactaattgtatataggaaatgggtatatgggtatttattacaacattcttgtctatatgttttaaaattttcataataaaatattggaaggaaaacagtttattgyatctggtatactaacaatgaataaaataagctgttaattaacaggaatctattacttaacgcatgaaaagtgttctgaaaagtgtgaaatgctaatggaagcttcttttccatttatgtgcctcataattttagaaatactttatctccatttgtaatggtcatgacaagaaatttccaaccttgcagatcggattttgagtggttttcatttccttgtaactgtccaaattttgcaatttcataaaataagcatattgtactcatattcagaaatcattaaagcctgacaggttctttttttgtttttttattttttatttatacacaataatggtacatgtttatggggtgcatgtgatattttgatacatgcatagaatgtgtaatgatcaaatcaggatatttaggatatccatcaccttaccatttgtttgtgttgggaacatttcaaatcttgtcttctagctattttaaaatatacaataaattattgttaactatagccacctgactgtgctatcaaacactagaatttattccttttttttttttttttttgagacagagtcttgctctgttgctaggctgcagtgcagtggcactatctcagctcactgcaacctctgcctctcaggttcaagcaattctcctgcctcagcctcccaagtagctgggactacaggcgtgcgccaccacacccagctaatttttgtatttatagtagagacagggtttcaccttgttggccagaatggtctcgatctcttaacctcatgatccacccacctcagcctgccaaagtgctgggattacaggcctgagccaccacgcctagtcgaatttattccttttacctaactacaggtttatacccattaagcaatctctcttcattgacccctcctcctccccagcttctgataattatcattctattctatctccatgagatcaatttttttaaccctcacatatgagaacatgcaatatttgactttctgtgactgtaaatcttaatagttttaacaaatcacctgatgcttcctcgtcttcattgttagctgtgttttcaatatatacagtaacactttttaatgcagtgaatcacgtcccatccctgtattactgaatcacaatctatttgagggaactgcgaaattcttaaatccccacccaagaacctacagggaaaattttttgagaaaatnnnnnnnnnnnnnnnnnnnnnnnnnnnnnnnnnnnnnnnnnnnnnnnnnnnnnnnnnnnnnnnnnnnnnnnnnnnnnnnnnnnnnnnnnnnnnnnnnnnncctggatggaattggagactattattctatgtgaagtaacttgggaatggaaaaccaaacattgtatgttctgtctcatatgtgggagctaagctattaggacgcaaaggcataagaatgatacattggactttgggggtttgggggaaagggcaggaatgaggtgagggataagcctacatattgggtgcagtgtacactcctcaggtgatgggtgcaccaaaatctcagaaatcatcactaaagaacttattcatgtaatcaaacaccacctgttccccaaaaacctactgaaataaaaaaataaaattttttttaaaaagctgattaaaaaaagttcaacagaattctaggtatgtgaatattaaatatttctttcaaaaaataagtgtaatttgtctaaagatgttcacctgaatcatgtttcttgaggtgagtggtgtgtgtggggctgatcttaccatctcttcccattcccttttctttctttcctgtttgtcctccttcgactattagtcctaagtgaatcaattatgctcagtgaagttgcctgtattgcacttttgtttgtttgtttgtttttgttttcttctttgtatctggttctagaaaaagtgcacattacctggccagtgaacatacgcctatgtggtgggtactaggactgctgagtagagtccataagttgtccccctcatcagattcctttgcaaggccttctctcatgg

SEQ ID NO: 701607 - DNA, 2329 bp, Homo sapiens
  misc_feature 1502, 1503, 1504, 1505, 1506, 1507, 1508, 1509, 1510, 1511,1512, 1513, 1514, 1515, 1516, 1517, 1518, 1519, 1520, 1521,1522, 1523, 1524, 1525, 1526, 1527, 1528, 1529, 1530, 1531,1532, 1533, 1534, 1535, 1536, 1537, 1538, 1539, 1540: n = A,T,C or G
  misc_feature 1541, 1542, 1543, 1544, 1545, 1546, 1547, 1548, 1549, 1550,1551, 1552, 1553, 1554, 1555, 1556, 1557, 1558, 1559, 1560,1561, 1562, 1563, 1564, 1565, 1566, 1567, 1568, 1569, 1570,1571, 1572, 1573, 1574, 1575, 1576, 1577, 1578, 1579: n = A,T,C or G
  misc_feature 1580, 1581, 1582, 1583, 1584, 1585, 1586, 1587, 1588, 1589,1590, 1591, 1592, 1593, 1594, 1595, 1596, 1597, 1598, 1599,1600, 1601: n = A,T,C or G
tgcaagagaatgttctggttagatgttacatgcatatatttagtgatgaagtattatgatatctgaaacttacttccaaatagttcagcaaatattataaacactttaaatacataatatatatttcaaagaatcagtcaatattatcaatattatatgtacatatatgtagtgaaattacaaaatactaattgtatataggaaatgggtatatgggtatttattacaacattcttgtctatatgttttaaaattttcataataaaatattggaaggaaaacagtttattgcatctggtatactaacaatgaataaaataagctgttaattaacaggaatctattacttaacgcatgaaaagtgttctgaaaagtgtgaaatgctaatggaagcttcttttccatttatgtgcctcataattttagaaatactttatctccatttgtaatggtcatgacaagaaatttccaaccttgcagatcggattttgagtggttttcatttccttgtaactgtccaaattttgcaatttcataaaataagcatattgtactcatattcagaaatcattaaagcctgacaggttctttttttgtttttttattttttatttatacacaataatggtacatgtttatggggtgcatgtgatattttgatacatgcatagaatgtgtaatgatcaaatcaggatatttaggatatccatcaccttaccatttgtttgtgttgggaacatttcaaatcttgtcttctagctattttaaaatatacaataaattattgttaactatagccacctgactgtgctatcaaacactagaatttattccttttttttttttttttttgagacagagtcttgctctgttgctaggctgcagtgcagtggcactatctcagctcactgcaacctctgcctctcaggttcaagcaattctcctgcctcagcctcccaagtagctgggactacaggcgtgcgccaccacacccagctaatttttgtatttatagtagagacagggtttcaccttgttggccagaatggtctcgatctcttaacctcatgatccacccacctcagcctgccaaagtgctgggattacaggcctgagccaccacgcctagtcgaatttattccttttacctaactacaggtttatacccattaagcaatctctcttcattgacccctcctcctccccagcttctgataattatcattctattctatctccatgagatcaatttttttaaccctcacatatgagaacatgcaatatttgactttctgtgactgtaaatcttaatagttttaacaaatcacctgatgcttcctcgtcttcattgttagctgtgttttcaatatatacagtaacactttttaatgcagtgaatcacrtcccatccctgtattactgaatcacaatctatttgagggaactgcgaaattcttaaatccccacccaagaacctacagggaaaattttttgagaaaatnnnnnnnnnnnnnnnnnnnnnnnnnnnnnnnnnnnnnnnnnnnnnnnnnnnnnnnnnnnnnnnnnnnnnnnnnnnnnnnnnnnnnnnnnnnnnnnnnnnncctggatggaattggagactattattctatgtgaagtaacttgggaatggaaaaccaaacattgtatgttctgtctcatatgtgggagctaagctattaggacgcaaaggcataagaatgatacattggactttgggggtttgggggaaagggcaggaatgaggtgagggataagcctacatattgggtgcagtgtacactcctcaggtgatgggtgcaccaaaatctcagaaatcatcactaaagaacttattcatgtaatcaaacaccacctgttccccaaaaacctactgaaataaaaaaataaaattttttttaaaaagctgattaaaaaaagttcaacagaattctaggtatgtgaatattaaatatttctttcaaaaaataagtgtaatttgtctaaagatgttcacctgaatcatgtttcttgaggtgagtggtgtgtgtggggctgatcttaccatctcttcccattcccttttctttctttcctgtttgtcctccttcgactattagtcctaagtgaatcaattatgctcagtgaagttgcctgtattgcacttttgtttgtttgtttgtttttgttttcttctttgtatctggttctagaaaaagtgcacattacctggccagtgaacatacgcctatgtggtgggtactaggactgctgagtagagtccataagttgtccccctcatcagattcctttgcaaggccttctctcatgg

SEQ ID NO: 701608 - DNA, 767 bp, Homo sapiens
ttttccctattctgtggatacagtcccagagttttcagggagtacacaggtagattagtttgaagcattgaccttttatttattccttatttctctttcatcaaaacaaaacagcagctgtgggaggagaaatgagagggcttaaatgaaatttaaaataagctatattatacaaatactatctctgtattgttctgaccctggtaaatatatttcaaaacttcagatgacaaggattagaacactcattaaagatgctattcttcagaattgtttcatttgtatgatgtttcattttagagaagattttcatgatgaakggttaatgtgttcttgcctgaagttttatgtctgatccagatctagctttttgtatcaaagtgtgccctaagggaagatgcagatataatatgttgaagttacaaggaggcaggtttcaattggttaaaaacaatgacattcagacattgcaactgcatttgttagcggttattacagagttaatttctaccctggatgggaggacacatttgaacatgctaggcctggatgcagaccctgagacaaaaggttgaacaagtaattcatttggaaggaaatacctcagtatccttccaataatttctcctcttagcttaagctagtatggagttagattcctaccgcttatgtatcaccatgcccccttcctaaataatacagaggatatggtcagcattatcacatatcatcagagattgaggtttgaaagaaaggaaatgagtaga

SEQ ID NO: 701609 - DNA, 637 bp, Homo sapiens
aacacactttgggaacagtgcaggaccacacctgacacactgtagcacactcctgaccaagattctgtcctcgaccaaactctagccagggccctctgagccctttctctactagacctcaaggcatggcctagaaagacttgagcaaacactaacatagtttctaacagctcagccatatccctaggacaactccagcttccttaaagtgcctgcctgagaaaactccaggttgccaaaagaatgtactgtttgttccagcaacctgaggacagagcctgtctcccagtctctgtgggagggtaggagcccacctacattcaataagagccaggcaacaaacccagatgggtttcacatggaccaatcttttcttcctactttttgtaatttgtcttttctctgactcaaatgarcccccagttgcccccaccctactccagtctccctttaaaatgcccggtcacctccgtacaaatcaaagttgagtttacacctgaccttcttccctatttcaatagtatatagtagttaacccctttctgaggttttatgctttctggtttcagttaccagcaactgtgatctgaaaatataaaaagaaaaattccagaaataaacaattcacaagttgtaa

SEQ ID NO: 701610 - DNA, 637 bp, Homo sapiens
aacacactttgggaacagtgcaggaccacacctgacacactgtagcacactcctgaccaagattctgtcctcgaccaaactctagccagggccctctgagccctttctctactagacctcaaggcatggcctagaaagacttgagcaaacactaacatagtttctaacagctcagccatatccctaggacaactccagcttccttaaagtgcctgcctgagaaaactccaggttgccaaaagaatgtactgtttgttccagcaacctgaggacagagcctgtctcccagtctctgtgggagggtaggagcccacctacattcaataagagccaggcaacaaacccagatgggtttcacatggaccaatcttttcttcctactttttgtaatttgtcttttctctgactcaaatgagcccccagttgcccccaccctactccagtctccctttaaaatgcccggtcacctccgtacaaatcaaagttgagtttacacctgaccttcttccctatttcaatagtatatagtagttaacccctttctgaggttttatgctttctggtttcagttaccagcaactgtgatctgaaaatataaaaagaaaaattccagaaataaacaattcasaagttgtaa

SEQ ID NO: 701611 - DNA, 856 bp, Homo sapiens
aatattttcatcattgaaraaagttattctgggctgtgccagtctagaaagttttccagtttgaagagtagctttggagaaggtcacactggtgacctcaaatcatagagtcagagatacccttctttagtaattcctagtattttcatttctgagaacttgtttgtatttttcctgttaaaaaaggttctgccttgcaaagtttttattaaataatggatgtcttctcccacttgttcattgcaggcatgaacaattgcaatgccatctattaggaagtagatatgatgtcattgagctgacatgatagtagccaaaatttttaaaaaattttattatttttcagtttgggtggccttatcacatgtaaaggtgtattttccattataagtcttgatccttactgcctttcctctttctagttcttcaacacaggctgatcatgcactgtgacccaaaaggtgaactcccactgttgcttgcagacatctctttggctggttcccttcttgctgtgtcacatcttttcttgctctgatctgatttctgtatcagtcctctccaaaatggagtgctttttactctaggagttatgcagtattagaagctttgtatttatttctctttttggttaacatgtccttcttttgtgcaaattgcatgatgtgtatcatttacaaacatagttctatacatatgcaatttgcagaccatgcagttatatattgcactaaaggcattgtaatggggtgcacaatcaaataacattgggagcctgctgctcatagttttgtcttggtacaggaaccctggcttctattctgcctctgctcttctggtcttagcacttgcattt

SEQ ID NO: 701612 - DNA, 856 bp, Homo sapiens
aatattttcatcattgaagaaagttattctgggctgtgccagtctaraaagttttccagtttgaagagtagctttggagaaggtcacactggtgacctcaaatcatagagtcagagatacccttctttagtaattcctagtattttcatttctgagaacttgtttgtatttttcctgttaaaaaaggttctgccttgcaaagtttttattaaataatggatgtcttctcccacttgttcattgcaggcatgaacaattgcaatgccatctattaggaagtagatatgatgtcattgagctgacatgatagtagccaaaatttttaaaaaattttattatttttcagtttgggtggccttatcacatgtaaaggtgtattttccattataagtcttgatccttactgcctttcctctttctagttcttcaacacaggctgatcatgcactgtgacccaaaaggtgaactcccactgttgcttgcagacatctctttggctggttcccttcttgctgtgtcacatcttttcttgctctgatctgatttctgtatcagtcctctccaaaatggagtgctttttactctaggagttatgcagtattagaagctttgtatttatttctctttttggttaacatgtccttcttttgtgcaaattgcatgatgtgtatcatttacaaacatagttctatacatatgcaatttgcagaccatgcagttatatattgcactaaaggcattgtaatggggtgcacaatcaaataacattgggagcctgctgctcatagttttgtcttggtacaggaaccctggcttctattctgcctctgctcttctggtcttagcacttgcattt

SEQ ID NO: 701613 - DNA, 1296 bp, Homo sapiens
gttgttactgtggtgattgccaaatggttccttttctaatcccattatttcttctaagtttattggttggcattctactgtagggaagagctttcccttctctcccactgattcgtacatttatatcactatagactcatgaattcctattttgttcccattgtttactctccattaccatcatcatttattttgatactcaaattatcccaaatttggctggtgagggctctttccagccagctcctgttcttttgacatgcccacaacattatctgagcacttccttcgcctatggcatggcaagagtctaggctcatttagtactttccccatcccagccttggaatcaacctgagagagctaccgttttgttgttgttgttttttaacatggtagagttttaagtcaggtactgtcatcgttcctattttataaatgaaaaagagaaactcaggaagctggatatgtggttagagataacagaagaatgaaggcaactcaataacattttgctaccatgccacacaaaaccatgaggaaaacaccattaaaataacaactgggccatggtagtgatttgggaagaccaatttaactcccatttgagattagggaccactgctccctcaccctggagcactggctagcatgcgaactcttgccaacttcatccttgacaaagaaacagagaaaaaagagaagaggccatcagcagctgctgcagtacctgctagaaaaccaaatgcactccacactggtgtttaattgtcaaacagacaatggaaatttgattgcactgaattttgaatatcttcaattttaagatttatcagaaatacactgtctgggttttcaaaaataaatatttattatcattggtgaatgtgatgtatccttgctggatttttactatgtgaaaatacattttgtattgtttattgaaaatgtaataaattgatgcaataagacaatttttaaaaaagaatcctcttttcccaatacccccagcatttttgacagctttattgagctagaatttttacagcataaatttcagctatttaaaatgtacaactcaagtagttttcagtatatttacagaattgtgcaatgtcaccacgtttttagaacatttttattacccaaaaragaaaccttctgcccattggtaatcactcttcattctcttccccatgcagccctaggcaaccactaatctactttttgtctctatgaatttgcctgtgctagatatttcatagaagtgaaattataccagatatggttattgta

SEQ ID NO: 701614 - DNA, 675 bp, Homo sapiens
ttagggaaatttgaagaactaaacctttcagaaatcaaaatagtaaatgttaaaaggtggaatttcaaattctgtggtattttgagacaaaatgttttttaytgaatatttatgatggacattccttcaatatagctcactggtatcattaaccctgccacaatatttgggtttcagagcttactccataccatctgatagtcaattattaaactgtctgtactttatctctaattttctcacttatttccttttcaaatccttacctatcttgcctaaattttgaccttaatcccttatttctggtttaatattgcctaaaatactgttggccttcatccatcagcaaaccatccttctttggttctttgctccattcccaactgcttgttgaggtttctctaacatactctgtaatgcatctaactgtgcctcaaacccacccctgaaaacccccttaccctgtttttctttttcttttctccaacctggtaacctactgggatgcaaagagattaagtgatttgcttagcaacacatgcaaaagtaaggcaaaaattagaactaaattatctgtcctatttttctttcaaactttaatgcttcatgtagagttttttacatgataaataattcccacaaatctttaatttttttttccagaagacagccact

SEQ ID NO: 701615 - DNA, 675 bp, Homo sapiens
ttagggaaatttgaagaactaaacctttcagaaatcaaaatagtaaatgttaaaaggtggaatttcaaattctgtggtattttgagacaaaatgttttttattgaatatttatgatggacattccttcaatatagctcactggtatcattaaccctgccacaatatttgggtttcagagcttactccataccatctgatagtcaattattaaactgtctgtactttatctctaattttctcacttatttccttttcaaatccttacctatcttgcctaaattttgaccttaatcccttatttctggtttaatattgcctaaaatactgttggccttcatccatcagcaaaccatccttctttggttctttgctccattcccaactgcttgttgaggtttctctaacataytctgtaatgcatctaactgtgcctcaaacccacccctgaaaacccccttaccctgtttttctttttcttttctccaacctggtaacctactgggatgcaaagagattaagtgatttgcttagcaacacatgcaaaagtaaggcaaaaattagaactaaattatctgtcctatttttctttcaaactttaatgcttcatgtagagttttttacatgataaataattcccacaaatctttaatttttttttccagaagacagccact

SEQ ID NO: 701616 - DNA, 639 bp, Homo sapiens
aaacacacaccagaatgtctaaaatggaaaagtcagtaaatatggtttatcaatgaacatatgaacaggtagagctcttacactgctggtgcatagctaagtaggcatatccattttaaaaaacaatttggacctatacatatctgacaggcttcaattctattcttgagtatacacccycacctaaatgaaacaagggatgtggattaaaatctttacaactactatttttttttttttttattatactctaagttttagggtacatgtgcacattgtgcaggttagttacatatgtatacatgtgccatgctggtgcgctgcacccactaatgtgtcatctagcattaggtatatctcccaatgctatccctcccccctcccccgaccccaccacagtccccagagtgtgatattccccttcctgtgtccatgtgatctcattgttcaattcccacctatgagtgagaatatgcggtgtttggttttttgttcttgcgatagtttactgagaatgatggtttccaatttcatccatgtccctacaaaggatatgaactcatcattttttatggctgcatagtattccatggtgtatatgtgccacattttcttaatccagtctatcattgttggaca

SEQ ID NO: 701617 - DNA, 520 bp, Homo sapiens
atacagaaccttcctatacattttttttttcaacttccagtgaaactaagtacttccaaataaaaaatttaaatttaaataattgagctgcaacattctttttaaacttgattttgactcttaacagtggagattttaaaataagaacttaaaaagtataaccttctttcatctcaaaatctacttatctataaagccatagctaacccatacaattgtatcaaccacaaatgctgtaattaaaaatgaaggataataaaaaaaagtcagttacgacaaaatgaactcctttcctttagctttttctcccagatctcaattcattcattcaataccagaggcctactacatgcaaagcaatatactgctgcaataagacatttttatgaaggcagacttcaaacagctcaactyccattctaaggtttgcatgtctctgcctctgtgaaacaggcacgattccaaaagaatctacaaaatactagaagagctctactaagagcatttaactggtgagaca

SEQ ID NO: 701618 - DNA, 624 bp, Homo sapiens
ccagtaagtattatgatcaataagaattacaaaggatcagagaaataactttagctagaataatacgggaaggcttcatggaacagatggaatgtgttacagaccttcaaggagagacaaaatttaaagatgagagggcacacatggaagaacaccaccataaaaagaaacaccaaaagcaaagaaagtatatggcataccaaataatgaaagaatacatctaagaagtctgtgttggaggtgaggtgggaggagggacatatacacagatatatgaatgtatgttttagaagatgtgactgtaaatatcccttaggaaaatattatagagagctttgaayccacagacattgggctctgttctttaggtaatgtgaggtctgatcacatgaaatcagtgttttaagatgctaaatttagtgtctgtattggatgtgttgagaaaggacaattgagagtcagagaccacaagatattaaaaatagttcaggcatgcagacactggctattttttaagtgaggaataagacctagctttaattacacaaaatattttagaaagtacatcattactttactgctgtcaaaagaaaaatggattttccaatgggactaagtaggaca

SEQ ID NO: 701619 - DNA, 619 bp, Homo sapiens
aaatgtactgaatgaacattcctcagatttttcgtctcctgtccctcacctacacacccatttatatccccatctacatttcttcttccccatcctgtcttcattcttgcttagcattaggcacatcaactctcctctgaatttgattttttctcaaattcagatgaaacttaattcttcacttacttttccctgttgcaagcccaatatattttttaagcctttatctgatggctacttccttggagcaaataagcatgttcaagtgtctccaattaattaaaaagtaagaaagacgatggaggaggggaaggaagatgaagataaaaaccattctttgactgattcccctmcactaccttatctcttctctctattcatagccaaccttagtttgggtgtaggtgcatttttaatgactttcctcaaattacaaaatgactacagtcccaatcagaagtcttagaaaacatatttcacaaacattttttatgtctgtatattttcttcaacataattttaagggttgtatatttttttcatgactgaatcctaaattgcttaaccaatgccttacagttgcacatcaaagtttccagttttttcttataaacaattc

SEQ ID NO: 701620 - DNA, 1326 bp, Homo sapiens
  misc_feature 934: n = A,T,C or G
tttattctactcttggggagacttttttacctgacattttaattttttgctgactaaaaatatttagctatttttaatattcaagaagtctttattccctgtttattccccttacgtagcaacctgttcttgtttcaatatttctttgaaatttccttcctagagaatctctgaattcccttatatttatttgttttgtgtctctcttgttcctcttggaagcttttctcaagtgtttagtgattcttggctgccttttaatatgtaaaaagtagcctaccaaaaagttgattgtaattgtgtataggtgctgcttccctgtaatagcatctagttgctaactgatctttcatatgtgactcaaatgtatctatagatcttctcartggtatggtacctctgaagagaatcttccaatttcctgcctaaggcttttaagcttggcagctggtgttgagaggtgggtgggaaagggagctcggagtaaacactgttcaatatttagtctgatgtccatctcagtgtctgtgtctttgtttcaggagtctcttgagttccatttctccagagaccataccacctacctccggtgggggaagggttgtcagcaggtaaagacggaacgtcgagttataactgactctaacacagacttcaaataatccctgttttcagcctctctccttacctgtgccatcttggtgtttccagtgtctgaatatttccagagtttaacatggtgacttagcttgcttctcattgatagtgccattgaggcattattttgaccctcctgcaccctcttggtccgtcttgtttctgcatttgtgtattacagcataaggttataggcgtttcctaatgctattgaatttagcttcaatagcaaagttgtgtttctggttctcatcctgcttacagtttggggtaattntggagaaaataaggagacagaaatgtctttactgtctttgaacatgaatatgttggtattaacttttacatcagaataccttaggaatgggacgttgtactctgtggctaaataaaataacacctggatattaaagaaacccagaaagccttctttttctttttacaataattgggtttggttttcttggaagtctgaactcctgcttactattgactgtatgttcagttgcctcagactgtcaacatcaaacgttagctaaaggtgccaagcatttctgggaggagaattgataagggaaatagagcctcctctttgaagaggctttgactgtgtgggtctctctctttgagatcagtgcctcatgctacttgtgataatttataagagtt

SEQ ID NO: 701621 - DNA, 2000 bp, Homo sapiens
cattatatacttaaataaaatcattgcattgtataccttgaatatattcagttcttattcatcaattaaatatttcaaaattttaaaaagtctgagatgttcattatctagaaacgaaacgttcaatgagatgagctcacttgcccaagccctggtttccagcaggtgacaaaaccaagattctaacttggttgaccctatagcccaggcttttcttgtaattccttgccacagctccacagttagagatcttgacttctactctaggtcttgtaagtcctcctttagtcacagaaactcatactggaccctccaccctgcccagagcatgatggaaagatgacagacccacacaccagcgccatatgggcttttaaaattagaatcaaaggggagcaacatgctccaggatagacaatcacattcctgtttaaagaaaccagacgggagatgactacagactagcaagttgagggggatccttggaaggtgtgtcatatgctgtagaaaacttcccaagcccttcctgattttaaggcatttggctactgacactggttcgaatttactaagtacaaaaattttaaaaattaaaaaaatataaagcacttggcaagcaacttagaactttcacttccttagtttccagccgaaactttggcgtcactgtggtggagctaagtggccctgggtggagcgtcactcaaagggttcgctttggaagggcagtgggagaatgagcaagttgaaagagagggggtgtcttgaagcacrtttgtagagcaagcacaatttcatttattatgcacaactgtatgcaaaactatctcaattgtataattacttattagattaattttagtgggtgttttggtgctggtgataggagctagggaagcccttgaagccaccgcttagcaatgccccccctcattcaaggcatatgaccttcctgagcctccattcctaacctataaaatggagataaaaacacccacttcatagaattttgtgaggactgagtgagtctgcatatccagggctaatacacagtagatgctcaattaatagtggttacttattaaccctaaattgagttaaaactacttatggctcctctttctccttcatgaagctgttattaaaatgttttctctaatacatatgaaaatgcccggactatcaaaccctggtttggaggacagtttgttcttaacgttgactaaatattatacaacatcaaggaccaaaaaggatttgaggtggcccacaataagaaacacaatgtacgaaattcatgaagccattaaacgagagtgatgatagaaaagattccagtaaaggggagagagagaaatggtgcacagcctagagcagctcttctctccctgcagaagcatcacttgccaacttattggaatgcaggtcctgcctccccaggtccccgagtggagcccgagattctgcctttctcaccagctccccccaaccccacccccaggaagcaaatgctgctggttcacactttgtagggtgaaggaagttaatgaaagaggacaaagctactttatagttcaagtcaatctttctgaacaaatgcaacatagaatctcatatgcaaatgcattctgatgacttttttaattaacagaaaactccggggatgttggtgtgtgtcaaacagtcctccctgcttgaacaaatgttttctactcctctgtctctcccttttcctccaggaccttctggacctgacacagtgagcaagaaatctgatgtgcccaacaaccctctctctaaatgatttcaaggaagaggcagcaagctgcacagatactggaaatgcgtgatgtaaccttttacattcagagaaagggctgtccctaattcaagccatatttcacccaatgaagtagacttatttaaaactggaaaacatccaaagaagatatgaaattcaatatatttcagtaggtcgtggcctttgccttcttgtggcc

SEQ ID NO: 701622 - DNA, 489 bp, Homo sapiens
tatatagttataaataaattaggatacctcttagactgcagttgtagagtatttatacaggtacaaggtgagaagtggaagagatggtgtcccagtatcttatttgaatcacttatttactattggggaaaaaaaacgtaaggagtgtggtctgcggataacatctggaccagttttatctacaaatgtctatttaagtttccttccattagacagattctgtcgacttctgccttatgggtaacagactccattctatactcacaccttcacatatttatagacacaatattgatatactgatggaaaagatggtatctcattatygttcacgactatagggcataatgttaggtcagtgatcaagaaatgctgcagaccaagaattaatgcttttttacaacaagatgtctgtacttttagccaagtttgaaagatattgcattgtaatatatatatatatattcacaatacataatacatgatgca

SEQ ID NO: 701623 - DNA, 647 bp, Homo sapiens
taaagtctatatagaatgaaaattatgacatttaggttcttactgactgaagccattttaaatattagatgttagtgtaacttttttgattgttcacagactattcaatgtctgaagttgttttactatcttcaagggcaaaataaaattctttgtacacttgcttgagttttctttgtttaccttgaggatgagctggtgaagacttaaaggcaaattgaatgcatctggtttcagatccaatgagtgcagctcacagagggttttcttaaaaaggcatttgtatcttttktagaagcacattggagatctttcacaagcccttgaagaagtcaggaataaaaagttgcaacttccccgggagagagcaactctgaccctaaaagttaacgttacatcccaaacgtggaaaacaggaaatttcagatgggttttggcaaaacacatagtgccactccttctcttggtgtgctaagttttcccaagtctgtgtactccttatagcgcaggaattctccaaaggccaacatttcagttccagaaagagaaatagaatcaacggcaacaacaacaaaacaactttaccaagagcaagcaaattgcctcgtcttggtgactcctctgcaaaactgcaaattccacccccg

SEQ ID NO: 701624 - DNA, 841 bp, Homo sapiens
tagggtacactcaggttttctgcaacaattttcaatagttttaggtgggtaataagtatgtagtgctctatccatgatttatgttccttttccatggagtaaagttgttggttggcaatggcttccatgatgtgactacatttcccatccacttttgcttctgagtggggcagaggtgtatgggcatatgttatgatgaacacttccaggctgaataaacctttaattctgtcattcacacactttatctttcccatctactggctggatattgatcacttgggtgagcttagaagccacagactgaatatgacgagagactccattagcctgagtcatggatggctgcacagagcagagcttccatttacttttccagggtgataaataaatttccattttctttaactactgacatttcatgatcaacttgttagagaagctatttggctattttaacttatataatacaacagagcattctgaaccacagtctgtacctagcttaggcccttaagttcagtcttcttgtattaaagatatcctcagacccagtcattgagaaaacaccagtctaattctgtttgcaaatcmggattccttagcatcagagttaaaagtttcttttaaagaaatatggagggagaagaaaagaggttctttgggagcagactctgtagttagttctctaaaggtcatatcacttatctcctgtagaaactctgagatattcctcagtaactcaaataaaataaaagctattttaaagataaagaaactgaacatcaggctgttttgctgaaagtcacatagctattgtcagagttgaattttgtaccta

SEQ ID NO: 701625 - DNA, 1514 bp, Homo sapiens
ataatttctgtccttaatgttggttagaaaggcttttccaccgccaaattgtataaatctcttgtaccttcttctagtagtgcagtggtttcattttctttttacatttcaatctttgttttattttgacacaaggcagatgtctaactttattttcccttggctttcttttcacttccctagttacatacaattccctccaactatgtgacccacacaacaactccaaaggagtttccattttgctcttaaggaaactagggcagagaggtaactcatcacatttaaaatcacacagccattaatttacatagtcaaggttcaaacccagatcttttgatgcaaagtcctgttctctcatactccaagtatggtccagggatgggtagcattggcaatacccgagagcctgttagaaatgtagagtcatgggccccatcccatacctaccgaatcagaatccgcatttctgttaggttggagaagtactgcagggtgtactgtttccccagacttaggccacatcagagtcacctagggcatctgttgagctccatctctcctcaatattttaactcagtaggtctggactgaagaccaggaatctgcattttaacaagcatcccagctcataaatgcatatatgcaggtggccccatggatcacacttgagaaatgctctaaaacaactaagaaatattcctaagctacaatcaaggacacaaaaggtgattatttcccccaatctcaacttagataagtgagtatccttttaacctagaaaagaaacaggccaggggcggtggctcacgcctataatcccaatactttgggaggccaaggcaggcggatcatctgaggtcaggagttcaagaccagccttaccaatatggtgaaaccccatctctactaaaaatacaaaaattagctgggcatggtggtgagcgcctgtagtcccagctactcaggaggctgagacaggaaaattgcttgaacccgggaagcggaggttgcagtgagycgagatcgtgccactgcactccagcctgggcgacagagcgagactccgtctcagaaaacaacaacaacaacaacaacaacaaaaaacagctaggaggtgacaatgactcacatgtcaatatgtggaaataaagttgtaataatgaggataatgtaataatgagagtaatgactaaattttcggctttacagaaaaacacataaagaaaactaaggggaaaaagcctttagctgatccagaatttagtgagggcaatgtggagaagtaggagaaacggctactcaaatagattccagtccacttcccctcaagattgtgtcaattatgcccgtgagcctgggtctcttggcctgtaaaatgcagtcataaccacccgcccccgggaagacagaaactgcctgtccactttctgaacttttcatccccagtatcgacgtccagaggcctgaatgagtaaacgttccagatgatggagcagctccggaggctcgct

SEQ ID NO: 701626 - DNA, 591 bp, Homo sapiens
ttagtccagtaaatacaggtttttaaaaaaattgtctcttgagcaatttcataaaagactagtgaggtctgtgttactccctcattgagctcaaaagayagcaacttcaaaaaacatgtttggatctagaaagggatgaacttttttctatggtgttattgtaattggttacattcaaatttttaaagtacatttaagtaataactacagagatttgagacatttagtatacttcagaatattcacaaaataaaaaggtcaacattataaattattagtaggctgcttttctattagtcttttgatcatatcatcaatgaaattcttttaaaaaatcctttaataaaaagcatttatagaaataagtaaaactgaaaataatgtaattcaggaaatgtaattattcatttagaatgactagacaactgatactatacaactaaaacaaagtctatctttgtcacacactggaatatgattttaatataaacatgttcttaaggtactaactcattttaaaagttgctttttcataatcattcctttataatatctatctgtaatactgaggctaaagatgaaattgagata

SEQ ID NO: 701627 - DNA, 578 bp, Homo sapiens
acatggagagatttacatatgtaaaatttctactgatgggcattggcctatgttttgttctttttatcttttattttcaatcatttgggtcatataaatattgtgtatgtctacatctatgctcttcatatcatataaactgaaaacagagaacattttagatcttaagaagtcaacagtttttacattattttaaagcagtgaaaacttttctattccagaaaatttatctatatatatacatatttgaatagtgtgtgtgtgtgtgtgtgtgtgtgtgtgtgtrtgtgtaaatgcaaggatatctgattgcaaaagagccccaccaatttactccctgttaccccaaattagcctctttaggcaatatttaagaaaccgctatgtgcctttctgacaaggctaaacaaaattcacataacttatatggcttaatatctacaggaacagtttagaaaactagaaaacgaacacacaaaaagtggtaagggacttattctctgaatgttggctatcctggttttgtttgctgttgtctttattatacttttacttcagactgattaactaaaatctac

SEQ ID NO: 701628 - DNA, 637 bp, Homo sapiens
aaatgacttcaactaatattattgcgtatatatatgtattgaaaggggatatatatataaagtagctataayatatatgttttatataatttgttttctggtgatataagggtgaatatgaaataagagaaagaatgattttagaaatgtacattaagaatcataaattgctcattcataagattctcatttttttaccacttctcaattccatctattcccctgccattatgattaattgtgcagacacactagattgacaattaattagctacattcttaggtttgtcagttgcacagacaagaaattaaacattgcttaagcaacactccgacaatgcaccagatcaaacaataaaacaaaagtatgtatcgactgctttggtatcaagttgaccaaataaaattgttaattagttgagtttttcacttatttgttaattggtttttcctttattacaaaattataattttataatatagttgtataatcaaataacatgaatcttttgagtattcacaatgataactaaataaaccctaagagcatgttgagtgtgtgtagcaatttcaagttttaaacatttttatgcattttatacatttcatagtttctcaaaaccttgcaaaattagct

SEQ ID NO: 701629 - DNA, 577 bp, Homo sapiens
aatagtatcaccattttatagatgagacaggtaagacaaagacaaaagaatttgcgcaggttcacactgttaataatatgactgaacccaaatgtgaatgtagcaatctagctacagaatctgttctttaaattagtttgctcttccatgggctctgattttgggttctacaatgtgggtacaatctttaaaattaaatgcaatattctttgggttcttaaattaccatctgcataggaaaaataagggaaagttgcttatattttgagaaagttaaggtggtaataacatcatatcaacaattacattaraataaatacataattatatatcacatatattttccctattaggttaattcataaataggcaacttctctttttttttttttttttgagacacggtctggctttgtccccaggctaaagtgcagtggtgaaaacatggctcactgtagcctcgacctcccaggttcaagcagtcctcctgcctctgcctcccaagtgggtggaagtacaggcacacactaccacacctgactaatttttgtactttttgtagatatggggtcttgcc

SEQ ID NO: 701630 - DNA, 1617 bp, Homo sapiens
tatcttctttcctatgggctacacatgtatttcatagcacattttgctttttttcagtgtactataaatttctcatttcacatcacagatttcttgaggactgaaataatgtttggtccacatcagtatcctcgcacatcctacctacctgccaagcacaattcttgatcttttgtaatatgctctccaaattatttattgcattgtattgttcaattctgctgtactacagtccatctacaatgccactagcaacatttacaaactagtatggtcaaaatcacctatgaggtttagagaaaaatgctaagtattggttggctaaacatattaactaagtccactgtatataagacatagtctttgattcctaattttagatttatacatcatatcattacaattagtagatggtttcttaaaagtctcctgatacgtactttctgttaagcctgaaaaatgttgagacttaaataaatagcactcaaaaaaaattcacattacttcaactctcagaataattttctcaatttctcttctgtattcaatgacctcactatccaagagctgaagctggaatttcactatcttttaaaaatagtcccagtttataggaaataatgcataatttaaatgcatgaaggtgtattatactcgttgaaagcttctgaagttgaatatacaaatattgaagcatccttaaacaatttgcttttactatgtcaacacttgtaaattaaagtagaaaaattttaagtggccagctatctatataatttaatgatgtttaagtgtacttttacatgtggaaaggtattctctgtcccataaagtctttctctcatatcaaagcctgctttttaaaaagaatattttttttctctaaaattctctttataagtcaccataacttcagttcaggatctagctttacggttttgaaaaagattgtgactggaatttgcaagttctattcatcttgagtgactttaatatttatagcaaactacacttatcttacagcgacataatcttttactgctgagacaactttactgtgcacgtcaccctcaccatccctcaggagcaactaattagcagctcagagggaagagacaatctaccaaatataaaagactgtttcaaagaggtaatcagttcccaatagattctacatyggatagtaataaacaaagatgtgttttcctttggacttaaataaacttacccggaattatccatttacttctgtattatgcaacttttacagtggactaacccacataatctaaatgcattttttttagtgtatccaccttatcattcattttggattttcattgtttttcctctctaagcaaactgatgcaaagtcaaactgataatcatgaagtgcattgtgcataagagtttgcattctatttggcataattttgtttgaaggctcatcaaaatggacaatgtcaccaaaacagcaaatttgctaggtgcagctgtgctacatagcaacacatgacttgaaatcctaatgtcttctaaacattctgagtgagatgacataatcccaaaaaatactttttcccaacaataatgtgatctaaaggcttaggtgttttt

SEQ ID NO: 701631 - DNA, 1617 bp, Homo sapiens
tatcttctttcctatgggctacacatgtatttcatagcacattttgctttttttcagtgtactataaatttctcatttcacatcacagatttcttgaggactgaaataatgtttggtccacatcagtatcctcgcacatcctacctacctgccaagcacaattcttgatcttttgtaatatgctctccaaattatttattgcattgtattgttcaattctgctgtactacagtccatctacaatgccactagcaacatttacaaactagtatggtcaaaatcacctatgaggtttagagaaaaatgctaagtattggttggctaaacatattaactaagtccactgtatataagacatagtctttgattcctaattttagatttatacatcatatcattacaattagtagatggtttcttaaaagtctcctgatacgtactttctgttaagcctgaaaaatgttgagacttaaataaatagcactcaaaaaaaattcacattacttcaactctcagaataattttctcaatttctcttctgtattcaatgacctcactatccaagagctgaagctggaatttcactatcttttaaaaatagtcccagtttataggaaataatgcataatttaaatgcatgaaggtgtattatactcgttgaaagcttctgaagttgaatatacaaatattgaagcatccttaaacaatttgcttttactatgtcaacacttgtaaattaaagtagaaaaattttaagtggccagctatctatataatttaatgatgtttaagtgtacttttacatgtggaaaggtattctctgtcccataaagtctttctctcatatcaaagcctgctttttaaaaagaatattttttttctctaaaattctctttataagtcaccataacttcagttcaggatctagctttacggttttgaaaaagattgtgactggaatttgcaagttctattcatcttgagtgactttaatatttatagcaaactacacttatcttacagcgacataatcttttactgctgagacaactttactgtgcacgtcaccctcaccatccctcaggagcaactaattagcagctcagagggaagagacaatctaccaaatataaaagactgtttcaaagaggtaatcagttcccaatagattctacatcggatagtaataaacaaagatgtgttttcctttggacttaaataaacttacccggaattatccatttacttmtgtattatgcaacttttacagtggactaacccacataatctaaatgcattttttttagtgtatccaccttatcattcattttggattttcattgtttttcctctctaagcaaactgatgcaaagtcaaactgataatcatgaagtgcattgtgcataagagtttgcattctatttggcataattttgtttgaaggctcatcaaaatggacaatgtcaccaaaacagcaaatttgctaggtgcagctgtgctacatagcaacacatgacttgaaatcctaatgtcttctaaacattctgagtgagatgacataatcccaaaaaatactttttcccaacaataatgtgatctaaaggcttaggtgttttt

SEQ ID NO: 701632 - DNA, 994 bp, Homo sapiens
cacattttaacttctcaggaaaatattctgggtggaacccttagtctgcatcccatatcttaatttcacaaaactgtagctgatgtttaarttaattatttatgtaaaattatcagaaaatgccagagtaatccaattagaaacactatccaataagattccagggtgaaacaacttcagaaaattattcttatattcttgcaaaacctaaaaatctatttaaacatttactgcaatggaggacttagatgtaatctaccgaatgccacatataagcagagattgaggaaacgctgggatttggtgggtctgtgatagcgctgaatttgcttacaaaattgtctgtgcatgtatttgcattttcataagagttaattttttttaaattctcaagaggctccatgaccccaaaaaggttcagtgttactaaataaaatatactccagagtatgtatcaagggtgttcacattctgtgcctagcttacattttctagactctccctacgtgcccctctgttctctagccattcctaatgttcaaatgttagtgtcttcaaaaaggcttctctagctttcctaggtcagctttgttgaatgtcttttctctgtcctttgcctaggcacatgctgcttgctctacctgcagcatctttctgcctccctactgtcacctgctgactaatttctactccttcatgattaagcccatcacttacccatgaccatcggcaccctgagtttgggctaactgatccttctctatgttcccatagtatccacagcataactactctaatggcaattataatgcggcactatcactgttaacttatttgtctcattcttactgagactaggtcttcttcatctttgtatctctagtgcctagctcagttcctgatactgaaaaataattcattgagtgaataatgaatgaaaaaaagaataattcctcaagctttagagagtaaaggaacactggattactaaatc

SEQ ID NO: 701633 - DNA, 582 bp, Homo sapiens
tgaaagaatatgtaatttaaatttttctgcattcataacaatatgtattttgtatcaaaattatatttaagctaattttttgtatttttggtagagacagggtttcaccgtgttagccagggtggtatcaatctcctgaccttgtgatccacctgccttggcctcccaagagttttttcttttgcaaagtaataaacctcagcattaaagtcactgaagtaagtaattttcaaaatattttgccaaatatttcttttaaatataaggattatttttcaacttccttattrttaagaataccactgaggttccaagatggctgaataggaacagctccagtctacagctcccagcgtgagtgatgcagaagacaggtgatttctcaattttcaactgagctgtgaagagagtagtggttctcccagcacggactttgagatccgaaaacggacagactgcctcctcaagtgggtccccgagtagcctaactgggaagcacctcccagtaggggccgactgacacctcacgtggccgggcacccctctgagacgaagcttccagaggaacgatcaggcagcaac

SEQ ID NO: 701634 - DNA, 581 bp, Homo sapiens
aatgtgcattgttattacttaatctatagtacttggtgaagtaacaaattttaagatgatacaggaaagatgatgggagattaggcatgcagaaggtattgctagtgctgggcatggtggcttacacctgtaatcccagtgttttggaaggccgaggagggtggaacaccagaagtcaggagtttgagaccagcctggccaacatggtgaaacctcgtctctactaaaaatacaaacattagctgggtgtggtggcaggtgtctgtaattccagctactgggaggctgaggcaggagaattgcttgaatccaggaggcagaggctgcagtgagtcaacatcatgccattgcactccagcctgggtgacagagcgagactccaactcaaaagaaaaaaaaaaaraagaagaagaaggcatggcaagtgtgtataaggttgaggggaagtatgaaaacaaaattgagtgatagttttctgtgaagagagaacacaactagacatattttaagtggattgataaatgtccacttaaagattattaaaatggaagaattttaataatgtctgcagcaaaatatgg

SEQ ID NO: 701635 - DNA, 1343 bp, Homo sapiens
cacaaagttaagcaattatttatccttgatttatttaatgactcctttgtttcccactttttaaaaatgcctgatctgacagaaattgagtgtgtatttatttacttttgagctgcctactttctttcactgatccattaatctattcctctgtgaataaactaatttctcaattatcttcacattagaattagaacctgtgttttttatgtgttgggcaagtccatcttactgccaactcattctttgtcaatattgtcttagattcttggttctttgaatgtccacttcaattttttgttcaacaaatagtgcagggaaagaaagtttttgtcatttagatttgattgttaactaattkgttatctcattaaagtgtcaggaaaatccccaaattgaaagtaaattgcaccaatctgaaaacagtttctattctaacaaaattttcaagtcagttcaaagggtcaatgatgtgataatgcctaagagtgttgggatacagcagacacttaaataccgatatttaacacaataaagctttctttgaagccaaagtgtttctactcagaagaaactctgaaggaaaatacaagttgaattggacagggatagtttagggaagggaatagggtgctcacttaaatacaggggaaagaaggacagaaggcagttcaaaaaatgtgattttcccccctattgctttgtgaacctgagagtaaagatagctctagggcaatgattcttactctctcctaaaagtatacggaaactcattgctcttgagaatgaatataagaaggaatagaaaagggttacaaccaaatcccatgaaaatcttttagagaatttacagataataggagcaaaatttgaactctactaacaaggaaggtattcaagaaaaacatacccaaaacgtaaagatataaagtacaatctaatattttaaaaagaagtaaaggttctatgaaatatatagcagttttgaacaaataaaattaattagaatattctagaaatgtataaattggtcatttgcatcaccattgtctcaaccctacctgagatacttcaatctttaaatgtggggcaatactaataaactaacaaaggaaattgagatggagtggacaaaaatttgggaaaaccagatgagagtaatttctagaatccaagaaaagaaagtgttcaaagaaagaaaagaaattaacttagttaaattccatcaaaatataagataaatgaagatagtgaagtaaccaaggtttttagcaatagtattaatgacatcgagaagtacagtttagtggagtggtgggcatgaaaatctaattagaatgaat

SEQ ID NO: 701636 - DNA, 1447 bp, Homo sapiens
tgctggcttctcccatcataagggcaaagttaaagtccacctcaacactgtctagtaagactactattcactaaactgagagatgtattttgtacttttttttccccacacaggttcttacagatgtgacagggcaagtgagggcagacttacaaacaactgctgtagaaaatcactgggggacaaaaaacaatgtaaatctttgcttaagcagtttctttttgtgcacttagcgtccctagctaatttttttttttgtcaacatactcttagttataaataggtgttgagatggcactgagaaaatggaaagagaaaataactgcttctaagagcacataatttgaaatgacaagacctttggcctaagaggtaggtgcaacatcttgactttgcaagtaatttaataactatgagccccttaatcaatataagcttcaatttaatatgtgtaaagtaagtagttcattaaattattcaataaacactgttgaggacacagaggtgccacacacttgggctcgtttcttaagattagaaaaatgaaagaaacctataattcagtaagggagagttagaagtataatgacaatcacaacctttggtgacaagtattgcaatagaaatatgcatgacaggatgtggaaggaagtgaagaagtagctcattcagcctgggaggagcaccatttgcaaattttcaatgtcattgccttttgtgctgagtctaaaagtatatgcatattgtatccgaaagcaggatcaagagaaagcagatcagtgtgtacaaaagcattgcacagaagaatagctgccagggaagattgagtctgatggtagggttaatatttgtgttctcacaagtctcttacagatctacatgctatgtaaaacactaccaaacatgtatttaaaacaagcaacaacaacaacataaagacaaccagatgtatttagtccaataattactracataaaagaaaagagtggaggtattggaaaaggaaccattttccagcatgggctttttgcagggggaatacctggaatttaccaattcttatttcatgttctctttatctccaaccactataaaatttgttttaactattctgtttagataaatttaaaataaataccagatagtgcagaactcttccagttctctctaatgtccctaccaagcccctccatgccctgtgctatggaagcattgatgcttcaattttccacacattaacagcagatgtgagcagttcatgctctggatgacagctcaaagacaaaggaattctctagtgctatatagtgtcgtattttggtggtgaagtgagtgaagaatgcaatttaagttcactaccattcacatttaggagtcgatgaatgcagtatgagggaacaagcacctgcaaaggaaatagaaatatcatcacagtgtgtgctggaaa

SEQ ID NO: 701637 - DNA, 931 bp, Homo sapiens
tggggttaaaaatattttatgaactcaaattttcaagtttacccatgtcttagtcaaggtccttagttgtaagcaatagaaattggctgactaattaagcaggaaaacaaaatacccaggagtttattaaaagatattgaatagtgtacagaatggttggaaaggctggagaacatctttgaggctaagctagaaagaatatatttaaatccctcagtgcagaaccggcctgtgaggaaactttgcctgctgcaattgccacaatcccatgatgtcactttgcacctctgaccttggaaagccagttcgctggctgcaaaaggattcctcagggcgtcactttcatcccattgtttaccttaaaacagcagtctctggaaagaactgtgattggcagatgataacccagcttaccatctgcacaggagatgggaattatacatttttggattatacctggggggtgtggtaagtctctttcttctagaatttttctagaaatagcccaaaatatcctgctgacagagaatataatcctgtattttgagcgatcatctaatttattcagcagatcgaaacacttttgagagtgaaaaacaagrtgctatcaaataattactccaggaaaagaggtataaactgcatcacttcaagtagaaattatcacctggttatagtgacaaagatttcatgcctgggatacattctcagtgctgccacaagttttttaccgtctaccaggttggctgcactgctcccaggtacaaggccgcagctctacaggcatctgctagaagctgggcaaaaacaccaggtgtaggaccagaaagggtcatactgcctcagagtccttctgacatgatccaggttctcactggaggagagttggtcctgtgttcctcaccacgtttatctgctaagctctccaaat

SEQ ID NO: 701638 - DNA, 913 bp, Homo sapiens
gaaaatttccaagtcctcccctcacttatggccacatagtcaagtgaatagtgacacatgaaaagtcaaaccaagtaactgagtaattcaggccataagatcttctactataagatttgtgaactttggtgcacaattttcaacattatattgcagatatatatatatatataattatatataattatataatattgcaaatagaaatatatatttatatataatattgcagatataaatatataaatatattatatatatgcaatataatataattatataatataatataatatatatataaagatttctaagtatttccaacctttttataaaaatatacaacacacacattatttgagtagcaattcagattatattttatgagaacacatttacttaaaatagcaaaataggatagtaattacscttgcctgatgtttcttattagctgcacgtgcagtcaatatctgttcagagtcagcttctagagatgcaaaaggccaaagtaaacaagggccacggacaatgatgtgcctttctttatatctggaaacagatcagagcaggagaccacaacagaaagcacagtctactctgcagagatcgtctggaaaagactcaggctctctggggcagggagaggcactgccatcaagccaaacagagcagcagaggtgtacataagctattaaggctgacatgctactttttccagatatggccagaaaattgttacagtgtggtgttagagatgttaataattctctcaataaccaaggagagaaggtatatatccccatatgccatatatctatctcatataaatcttatatatggcatatatatgtcatatatgtgagagattcttgttcttgcctatgtgaaccccgaagatttgagacaggtctca

SEQ ID NO: 701639 - DNA, 1244 bp, Homo sapiens
tgcatttgtttgtatctttgtgtgggtgcaagtgtgtgtgttcactggaggttttgtaattttttcattactgttgtttctggtgtgctggttcacttgactcatagttcacattacaaatgtgagggttcattcctctatttttccagtctcatctttgatcagaggtgatgcctggagttggcttccaagtgagagtcctcagagcaactgttgagaatttaagttaaaaataaattatcaaataatgaatttgatcactggttgacctgaatatgtataatacaacctgttgaactctgataaagtcagagtgattattgttgaatgtgaacttgcttttgaataacagacacagttaacgatacttgcaaactgtatcatcagtaccaccccagggggttacaaggttgaccccactcgtatctggagattaagttcattatttctgatatttgtcactcagggatgcctatcttagctgattacatgaaagaactttccaatagacctactctaaaggaatggtctggctcagggaagcaagtcccagctggagtccaagaacagagtctgagtgattcacatggaaagactggagcagccaggactggaatgtggaatgggtgggccaatatgcagacactgaagttctttctcgaagtgagcttttaggtctggaattcttgaattaaaactattaaagtgaggaamctttccttctgcatttccttagcatatgtgggattatgttactttgttacaatgagcaaatagaagcacacacacacacacaaccttttttagagcacttttaggttcagagcaaaactgagagaaaatatagtgatttccttatgtgccctgcgtaactcccacatatagccttcccgattaggaacataccccatcagagtggaaaatctttgaaaagtaatgaaactacagtggtacatcataatcatccaaagtccacagtttttcattagcgttcactcttgccgttgtacattctgtgagttgaacaaatgtttaacaacacatatccatcattagcatcatacagagtattttccctgccttaaaaatcctctacatatccattcctcccacctccacaccccagtctgacaacacttttttttttttaactgtctacatggcttttcccttttcctgaaagtcatatagttgggatcatatagtatgtggccttttcagattggcttctttcacttagtaat

SEQ ID NO: 701640 - DNA, 1354 bp, Homo sapiens
gtcaaatgagaatcaattctttttttttttttttaaataaacacggtctcgctctaatgcctaggctggagtgcaatgaagccttgtattatagctcactgcagctttgaattcctgcactcaagtgatcctcccacctcagcctcctgagtagctgggactacagaggcatgcattaccacatctggctaattaaaaaaaaaaatttagtagaattgggggtcttgttgtgttgtccaggctcgtcttgaactcctgacctcaaatgatcctccagccttggcctcccaaagtactgagattacagacaagaacatgccaccctgcctggccatgaatccccttaagatgtatttgttgcatgcctacaaggtagcaggcactgggctgagcactgcaacatggtagagaaagacactgttcttgaagagagcaagaacgcatccaggaggtcctggccggcactgggcaggagagcgttctacccagggagccgggggacccctgagagctcagacagcccagcctccgtacatgcaaagcagctgtgctcagaaaccaaaagaggaatgacaaattgctgagggcaaggaaagctgctctctgacccaagtgtgccaaattagggcaaagccaagcctgtcagagagaaaggaaatacagctgagaatcaggaattttaatttttaagagccacacatggtcttccatcttgtttctttgtaactgcgtccctctcctgctgaagcattgctgttgtgtctgaggcctctgtagcacccacagctgccaacacatgtgctctttctggaaacggacacccccgtggagagctactttgttggctttgttttcataccattagatctmatctcttgaaaccccaaactgcacaacaaaaccgcaaaagcccaattctccatggggcctctgaccccgaggggcttaaagcaatgcttcccacctttttcacatcacagcacccacagcaactgacaatacatgctcaacccccttaggctgtcactcccccggcccctcagagatgagagcttggcatctcagcacacctgtaacactcatgcttgagatacctgcggggaagctgtcgttcaaagcgtgggaatgtcaccaaacctcaggagaatcatgatggaagtggagaagccaaacagatcaaaggtccaggatggggatggggcacagattatgtgcccgattatgaggcataattgtagaccaacgagagctggtggggactgcccccaccctaaagtccctgcctgccagcccacagtctaagctggcataacccaaacccacatcagagtcccaaggaggggaacacagggca

SEQ ID NO: 701641 - DNA, 548 bp, Homo sapiens
tgtttggaaattgaaccttgggttttcattcagttaaattcagttcagtagacctcttattcattcattcatttgacaaatatttattgagtagttaccaagtgtcagacactctgccaggcactgcatcccttgcaatgaacaagacagttaaggcccagccttcacaaaggaacattctaatgtggataaagcagggaggggtgggcacagtgggaggggtcaggtttgtgaaggaaccctaaacaagtgggcaggtgatgacttgggattggttaaagtgttaaggagaagtaaagggttatgggcagcatggccttccatgaccccagctcaaggaaggcctcttcctaaatctcccttgcacctaaaggaagggaaggagccagacacaaaaacagaagaagrggaggagggaactggggaaacaggaagggcattcattctaagcagagggaacggcaagcgtgtcacatctgtcttggattgtttgggctgctataagaaaataccttaggctgggcaatttataaacaagagaaattcat

SEQ ID NO: 701642 - DNA, 590 bp, Homo sapiens
tttcattttcataccaggaaatttcatgtaatttaaatatccgtgaggcttatttaatgataaaggctatttgaggatacaattttgaaagcgtattatttatttttttgaaggtgggagagttgaaggtggatgaatagatgtttgttttctaacgtaaattgtgagaacatgtatagctttcaggtctctgtagaattcgtctaacaaagttgtttttgtcagtattatttaaataacataaatctctggataattttacacaattgtatttagaatattattaaaragaaacattaataactgttctctctagaggcacatatattaaaggctaaaagaataattttatatctagcaaaattatgagcaatgtattaaaataacttaaaacttagcttgaaagacaaaatacaatttcagtatggtttaatgtatttgtttcttccctccttttcattttggtgaggtgatttaagatgtcttaaggaccctggaatgacatatgtatctaagtgttatgaataaaatttgaagccatgagatccctgttgtgtatttttcctcacccaagaacattatatgtgtta

SEQ ID NO: 701643 - DNA, 603 bp, Homo sapiens
tggctagcagttcacttaaaaatttttcacagactcacagaaaaacttgggacttccaaaaaagtgataacacaacgtttatagggaagactatagttagtccattctcttcctacataattttcagtagctttattttaggctccagaggaaaaataaataaataaaaatctgtttccagtgaataggtagcttcaaggtgaactcctttacactttttctaaataaatttgtacccttaagactcccaaataaaatattctaagctgctactatatgtttgaaattagaaatattatagattaagtgggaaacaaatacattcacaatttaaaattagttcttggactattctgcaagaataaatcaacatgcaagtatgaggatctttcatatcctggagccattgggcattctaattaccttaatataattgcatcccagctgagtattagatagtgaatatcttataaaacatcatgtagtgggcttgccacgagtttccatgtcgtaacatacagayatcttccatcatatctttgatgctagaaattaggtgatgtttttggcaacaagggccaatgtgctctgggaagacaacaa

SEQ ID NO: 701644 - DNA, 624 bp, Homo sapiens
ttatcctaatccattgagttcttttgattattcattctgtacacttgtaagtagatttaaattacaattaaaataaaaagcgatttggctcttgaaacgtcagggagtaatgacgctcaagccttgacaacatctaccactgaggagagaaagagaaatcaaggaccattatcatggagcctgtgatctagaagtcactgaaaatggtctgatcataggtaggtaaggccaagtaacattactgtctacattaaggtctacatgttttgggaataagttggaagcrttaataaagtgttccctaaataaagaaactgaatatttcacatgtgatttcctattaagtggaagttttaataaaattaatcttctcctagaacttcaatttgaaaataggcaattttactgctatagaagactattttatttttactaagtctcaagctttgaaaaaatatacataaataatgtatatacatatatgtatatatattacatagtaagcaactctaaaccacttttaaatgaattacttataactttttcttttctaagttgccgtgatgatcttctctgacaattgttcagtaatctcaccatcctccaaaagatcatgatctaatt

SEQ ID NO: 701645 - DNA, 624 bp, Homo sapiens
ttatcctaatccattgagttcttttgattattcattctgtacacttgtaagtagatttaaattacaattaaaataaaaagcgatttggctcttgaaacgtcagggagtaatgacgctcaagccttgacaacatctaccactgaggagagaaagagaaatcaaggaccattatcatggagcctgtgatctagaagtcactgaaaatggtctgatcataggtaggtaaggccaagtaacattactgtctacattaaggtctacatgttttgggaataagttggaagcattaataaagtgttcyctaaataaagaaactgaatatttcacatgtgatttcctattaagtggaagttttaataaaattaatcttctcctagaacttcaatttgaaaataggcaattttactgctatagaagactattttatttttactaagtctcaagctttgaaaaaatatacataaataatgtatatacatatatgtatatatattacatagtaagcaactctaaaccacttttaaatgaattacttataactttttcttttctaagttgccgtgatgatcttctctgacaattgttcagtaatctcaccatcctccaaaagatcatgatctaatt

SEQ ID NO: 701646 - DNA, 1001 bp, Homo sapiens
ctctctatcgtttgactcccatgtctggggcccgaagctacaccacagcctggcaatggacactcaggggctgcagaactgtgtttgttttacaacagactcatctatccatcagtgaaaattctcatgttcctctcagcctcggaagccacgtgtgtgatcctaatcccacagactaagcacggggccaggtggcttctcccagaagagtgctctcactggaccacaccatgtctgtctcccagctgtgggaactctagggtgcttgaggaatttcagtagggagttggatctaccccatattggagccctcatcgacacacaccattggtaatggccatagccctcagcttcacagcttgtatgggtagatcctcttatcrgcattatcttatttaaatacttgcagatccaacatcacttatagcccccaaatcttaaacctcaagaaaagcaaaaatagtttctgctaaggaacacgctgcggccccttggtgatagaagtcctgtagcacgctgtgttaggccgttctcccactgctataaagaactacccgagagactgggtaattataaagaaaagaggtttagtcagcttacggttctgcaggctttacaggaaacgtggctgggaggcctcagggaactcttaatcatggtggaaggcaaaggggaaccaggcacgtcttacgtgaccagagcaagaggaagagagagagagcggggaggtgccacacactttcaaacaaccagatctcccagcactcatgatcacgagaacagcaagggggaaatccgccccatgatccaatcacctcccaccaggcttcacctccaacactgcagattacaattcgacatgagatttgggtggggacacagatccaaaacacgcacatgccaacctctcagcttgatggactgtgatgggcttattttcttaagtgagctatcaattaactatgtgaaagtcaggtttctttaaaaattcacttatttag

SEQ ID NO: 701647 - DNA, 1001 bp, Homo sapiens
ctctctatcgtttgactcccatgtctggggcccgaagctacaccacagcctggcaatggacactcaggggctgcagaactgtgtttgttttacaacagactcatctatccatcagtgaaaattctcatgttcctctcagcctcggaagccacgtgtgtgatcctaatcccacagactaagcacggggccaggtggcttctcccagaagagtgctctcactggaccacaccatgtctgtctcccagctgtgggaactctagggtgcttgaggaatttcagtagggagttggatctaccccatattggagccctcatcgacacacaccattggtaatggccatagccctcagcttcacagcttgtatgggtagatcctcttatcagcattatcttatttaaatacttgcagatccaacatcacttatagcccccaaatcttaaacctcaagaaaagcaaaaatagtttctgctaaggaacacgctgcggccccttggtgatagaagtcctgtagcacgctgtgttaggccgttctcccactgctataaagaactacccragagactgggtaattataaagaaaagaggtttagtcagcttacggttctgcaggctttacaggaaacgtggctgggaggcctcagggaactcttaatcatggtggaaggcaaaggggaaccaggcacgtcttacgtgaccagagcaagaggaagagagagagagcggggaggtgccacacactttcaaacaaccagatctcccagcactcatgatcacgagaacagcaagggggaaatccgccccatgatccaatcacctcccaccaggcttcacctccaacactgcagattacaattcgacatgagatttgggtggggacacagatccaaaacacgcacatgccaacctctcagcttgatggactgtgatgggcttattttcttaagtgagctatcaattaactatgtgaaagtcaggtttctttaaaaattcacttatttag

SEQ ID NO: 701648 - DNA, 1001 bp, Homo sapiens
ctctctatcgtttgactcccatgtctggggcccgaagctacaccacagcctggcaatggacactcaggggctgcagaactgtgtttgttttacaacagactcatctatccatcagtgaaaattctcatgttcctctcagcctcggaagccacgtgtgtgatcctaatcccacagactaagcacggggccaggtggcttctcccagaagagtgctctcactggaccacaccatgtctgtctcccagctgtgggaactctagggtgcttgaggaatttcagtagggagttggatctaccccatattggagccctcatcgacacacaccattggtaatggccatagccctcagcttcacagcttgtatgggtagatcctcttatcagcattatcttatttaaatacttgcagatccaacatcacttatagcccccaaatcttaaacctcaagaaaagcaaaaatagtttctgctaaggaacacgctgcggccccttggtgatagaagtcctgtagcacgctgtgttaggccgttctcccactgctataaagaactacccgagagactgggtaattataaagaaaagaggtttagtcagcttacggttctgcaggctttacaggaaacgtggctgggaggcctcagggaactcttaatcatggtggaaggcaaaggggaaccaggcacgtcttacgtgaccagagcaagaggaagagagagagagcggggaggtgccacacactttcaaacaaccagatctcccagcactcatgatcacgagaacagcaagggggaaatccgccccatgatccaatcacctcccaccaggcttcacctccaacactgcagattacaattcgacatgagatttgggtggggacacagatccaaaacacgcacatgccaacctctcagcttgatggactgtgatgggcttattttcttaagtgagctatcaatwaactatgtgaaagtcaggtttctttaaaaattcacttatttag

SEQ ID NO: 701649 - DNA, 597 bp, Homo sapiens
tattcaccaccattcgcaggatctaaactgggagctccgtcccttcaggaagagccagggagcaactgtgtaagaggagcctgggtttcccactgacccctgagatttccatgggcctggtcttcccagagggcccctgggctttccacaggcatgcccagatttgccaagaatgctgtgtgcacactcatctcagcagggcaggcccatcagggaacacggccacctttaataaccctggagcgggaggtgggacaatcaacaagcctgcctgctgcagctggttgggcctgggttcatgttcctcatgagaggtggctggagctcgtggagagaccaggcggggggcccacagcctgcagcccaccctggcagtgccrgtcctcagcccagcaactctggtcagcccgtgcaatctctctgtgcgtccatttcctcatttgcaaatggagtagttgatgcactttgtgttgaaattgaataagatggtgtgtggtgtgtgtggccaagagcagagctctctcctctcccggtgggtgggtgggtgctggtgcctttctcactgccgtgcacacctggaacacctgccttcttcat

SEQ ID NO: 701650 - DNA, 593 bp, Homo sapiens
catgcaggtgcctgctgcatgccaggtgctggagttcatgtacatcatcaaaatcatgacaacccagccagttggatactgccagccccatttcatggaagagaagactggggtcagaggtaaagtgacttccctgagcatctccccagaggacaaaggaatcctagagtgatacaatatattcacctatgtcgaaggatgggaatgatatgggtgggaggaaatggtcaagcaatttggcatgacagaatgatgccctttccaaatggtcagagtgagccgtccccactgggcttctctctccctctcctccacatcagcattgmcctggctggagatgcacaggcaattgagaagattatcttagcaaaggatgatctgaacagagcttctgaccccagggcctcaagacaggagaaacaaatgggctgcagccaccgacccttttaaaggaggggcagccaaaaggccagccaggacagggaggaggtgaactcagaccccatgctctggccaggagctgcgtgcagccgccctggggctaactgccgcgtgcctgagtgaagttaataaagttgcatcctaatagtttc

SEQ ID NO: 701651 - DNA, 593 bp, Homo sapiens
catgcaggtgcctgctgcatgccaggtgctggagttcatgtacatcatcaaaatcatgacaacccagccagttggatactgccagccccatttcatggaagagaagactggggtcagaggtaaagtgacttccctgagcatctccccagaggacaaaggaatcctagagtgatacaatatattcacctatgtcgaaggatgggaatgatatgggtgggaggaaatggtcaagcaatttggcatgacagaatgatgccctttccaaatggtcagagtgagccgtccccactgggcttctctctccctctcctccacatcagcattgccctggctggagatgcacaggcaattgagaagattatcttagcaaaggatgatctgaacagagcttctgaccccagggcctcaagacargagaaacaaatgggctgcagccaccgacccttttaaaggaggggcagccaaaaggccagccaggacagggaggaggtgaactcagaccccatgctctggccaggagctgcgtgcagccgccctggggctaactgccgcgtgcctgagtgaagttaataaagttgcatcctaatagtttc

SEQ ID NO: 701652 - DNA, 3312 bp, Homo sapiens
tgaatgttctgactacctaatattacaataaggtaaaagacccattaggatctgaaataaggcagttcaaaataagcatgtaatcattggctaaacagtccatgattaatatcactacttccgtcgaatctcccgttcagagagtcctggcttatatttgatattcatgaataggtcaagtttattgattatataaagtttatgctgccggtgcctaaaaatgtcatttttttaatctatcgggctaaacacttaaagatactgtctaatgagtaccttagcgtaactgggcctcattacacacactcaaatcagtctctggatgagttaccttcatctcccggcagagtcaccgctggccagggttattgctttaataatccacatgtctgctgttaatgtttaccagctagctaatcagaactctagagaatacatggcatgtttgcattgttacaaggtagacatcattttacaattaacttcattacaactggaatgtaatcatccaacattacctctttttatttttcactgtgaggctttaagataattcaatatatacataaaactctaggtactagatatgcatataaatgacacttattttcataaggatacataaatatactcacccatatatagccatacaattattatgaggtatatttacaatctttacattaaaaggggattgttttatgtaaatattacctaaaataagatttctcgctttttttttaaccatacaataaaaaaatatattcacaaattaggccctagggggccatgttaaatccactgtaaatagagactactggcgtatgttgagtgtgtttcgaattgctaacttaagagaaaatgtattgtggtatttgacatacaggcagtagtttggaaaggcaaaaaacacacttaattccgcattaagcagagtttttaaattgtgccttaagtttgagtgaaaggaaggaatattttaaaaagacgttgcacttaagccataatgacgtttaatatcattctctccttgtaggcctcgcagtgccgattattttatgcaagaagctaaacgaatgaagcataaagcagatgcaatggtgagacccttttctttccagatacgttcttccaaattatgtgtgtactgcagcttcatcactgggacaatatagctggggtaattataaaatctattacaaggatggccgggtctgttcaatggagaaatgtttatataatcaaatgttcatagcccaataaagtatgacttcaaccaataatgcctgactgggaaaaagccctagacaaatgaatatttcaatttagtcctaaggtttgaatagtaactagagccagtggaggcagtgggcggtagtatttttttttcctttaaaaagtaaaatctagatttgcatttttctcttgttagcctgacaaacccttggcttggtcccaggatcaaatctcttttcaaaaacacttgtgttcttcacatgtatctgccgaaatgaatgctttctctgaaactgtacaacacagaaactattatctgcacgtaagactctaaagtcaccatgatttgatgttttcaaagaataacttttcttgcttggatgatctcctgttttggaaagcttgaagctctcaggcaagagatggaaaactttgttttcttttctaaaagagatcatgtggttgttccatcttaaatgaatgaagtccaaagggacatcttcccacctagtaattccagttttagtctcctccagtgttcataactgagattgaggcaggtgctggaaatgaagaaggcatttccagtgaccttcagaatactgaagatgtttaaacagtaacagtacccctcttccartgctaccagtgtcacctattaaacacttatttacgtgaagaccactgcctatgtacactggggtacaggaggaataacccctacgtatcagaaaatagaggagggcagcggaaggtacagctcttgtccacacaatctgagtctgatggacagttctggtcatctggagaagccaatgaatggccactcttggagaagagcatcagatttttaaggagaaagagattttctgcctgaatccagcatctaaagtttacagcattattcattcattgtcctcttgcccaaccctatctttcctgttgacgatttcccaagaggagacactctgctccagccaggctggtcccctactgacctctaagcacaccttgctcctgccagccagcgggcctttgcacctgcagagattcactctcacacactctcatgggcacactcacaccctcagcatcctccccaaatctagccaaaccctaccattccttcccggcgtcatattcagtctcctccctgtggccttcccagcctctctgcggccccatcactagctcactttcctccatctcatttgcactggatgcctcattttgtattttgttgggtaatcacagactgccttgcactttgaactgtcttgtaggtgtacattttctctctccaagtctattatatgttcctggaaagagctttcgcttgtggagtgcacataccacagaattgggtgctttaggaaatattaatactaaatgaaatgacttcatctgaaagtgttatcaagaaatgttgcattataggccaggcacggtggctcacacctgtaatcccagcactttgggaggctaaggcaggtggatcatttgaggtcaggagttcgagaccagcctggccaacatggtgaaaccctgtttctactaaaaatacaaaaaaaaaaaaaaaaatgagccaggtgtggtggtgcacacctgtaatcccagctacttgggaggctgagacagaagactcgcttgaacccgggaggcagagattgcaatgagccaagatcatgccactgcactccagcctgggtgacagagtgagaccctgtctccaaaaaaaaaaaaaagaaaaaagaaatgttgcattatagcctacactacctttataagcagtttaaaattttgatttgctaaggagaggaagttttgctctgcatttctggttttgaagctatcattactaatgaagttttttttgtatttttagtggcaagacttggaatagtatttgagtattatgtcattctgttttaattgatgaatgaatcatttgaaaactggggagattctgcaatccagagttagaatatgtaattacctacaaagagtagtaaggtatggaaccaggaacttgatgcataagtttagactgatgagatcttaagaatataaagctga

SEQ ID NO: 701653 - DNA, 3312 bp, Homo sapiens
tgaatgttctgactacctaatattacaataaggtaaaagacccattaggatctgaaataaggcagttcaaaataagcatgtaatcattggctaaacagtccatgattaatatcactacttccgtcgaatctcccgttcagagagtcctggcttatatttgatattcatgaataggtcaagtttattgattatataaagtttatgctgccggtgcctaaaaatgtcatttttttaatctatcgggctaaacacttaaagatactgtctaatgagtaccttagcgtaactgggcctcattacacacactcaaatcagtctctggatgagttaccttcatctcccggcagagtcaccgctggccagggttattgctttaataatccacatgtctgctgttaatgtttaccagctagctaatcagaactctagagaatacatggcatgtttgcattgttacaaggtagacatcattttacaattaacttcattacaactggaatgtaatcatccaacattacctctttttatttttcactgtgaggctttaagataattcaatatatacataaaactctaggtactagatatgcatataaatgacacttattttcataaggatacataaatatactcacccatatatagccatacaattattatgaggtatatttacaatctttacattaaaaggggattgttttatgtaaatattacctaaaataagatttctcgctttttttttaaccatacaataaaaaaatatattcacaaattaggccctagggggccatgttaaatccactgtaaatagagactactggcgtatgttgagtgtgtttcgaattgctaacttaagagaaaatgtattgtggtatttgacatacaggcagtagtttggaaaggcaaaaaacacacttaattccgcattaagcagagtttttaaattgtgccttaagtttgagtgaaaggaaggaatattttaaaaagacgttgcacttaagccataatgacgtttaatatcattctctccttgtaggcctcgcagtgccgattattttatgcaagaagctaaacgaatgaagcataaagcagatgcaatggtgagacccttttctttccagatacgttcttccaaattatgtgtgtactgcagcttcatcactgggacaatatagctggggtaattataaaatctattacaaggatggccgggtctgttcaatggagaaatgtttatataatcaaatgttcatagcccaataaagtatgacttcaaccaataatgcctgactgggaaaaagccctagacaaatgaatatttcaatttagtcctaaggtttgaatagtaactagagccagtggaggcagtgggcggtagtatttttttttcctttaaaaagtaaaatctagatttgcatttttctcttgttagcctgacaaacccttggcttggtcccaggatcaaatctcttttcaaaaacacttgtgttcttcacatgtatctgccgaaatgaatgctttctctgaaactgtacaacacagaaactattatctgcacgtaagactctaaagtcaccatgatttgatgttttcaaagaataacttttcttgcttggatgatctcctgttttggaaagcttgaagctctcaggcaagagatggaaaactttgttttcttttctaaaagagatcatgtggttgttccatcttaaatgaatgaagtccaaagggacatcttcccacctagtaattccagttttagtctcctccagtgttcataactgagattgaggcaggtgctggaaatgaagaaggcatttccagtgaccttcagaatactgaagatgtttaaacagtaacagtacccctcttccaatgctaccagtgtcacctattaaacacttatttacgtgaagaccactgcctatgtacactggggtacaggaggaataacccctacgtatcagaaaatagaggagggcagcggaaggtacagctcttgtccacacaatctgagtctgatggacagttctggtcatctggagaagccaatgaatggccactcttggagaagagcatcagatttttaaggagaaagagattttctgcctgaatccagcatctaaagtttacagcattattcattcattgtcctcttgcccaaccctatctttcctgttgacgatttcccaagaggagacactctgctccagccaggctggtcccctactgacctctaagcacaccttgctcctgccagccagcgggcctttgcacctgcagagattcactctcacacactctcatgggcacactcacaccctcagcatcctccccaaatctagccaaaccctaccattccttcccggcgtcatattcagtctcctccctgtggccttcccagcctctctgcggccccatcactagctcactttcctccatctcatttgcactggatgcctcattttgtattttgttgggtaatcacagactgccttgcactttgaactgtcttgtaggtgtacattttctctctccaagtctattatatgttcctggaaagagctttcgcttgtggagtgcacataccacagaattgggtgctttaggaaatattaatactaaatgaaatgacttcatctgaaagtgttatcaagaaatgttgcattataggccaggcacggtggctcacacctgtaatcccagcactttgggaggctaaggcaggtggatcatttgaggtcaggagttcgagaccagcctggccaacatggtgaaaccctgtttctactaaaaatacaaaaaaaaaaaaaaaaatgagccaggtgtggtggtgcacacctgtaatcccagctacttgggaggctgagacagaagactcgcttgaacccgggaggcagagattgcaatgagccaagatcaygccactgcactccagcctgggtgacagagtgagaccctgtctccaaaaaaaaaaaaaagaaaaaagaaatgttgcattatagcctacactacctttataagcagtttaaaattttgatttgctaaggagaggaagttttgctctgcatttctggttttgaagctatcattactaatgaagttttttttgtatttttagtggcaagacttggaatagtatttgagtattatgtcattctgttttaattgatgaatgaatcatttgaaaactggggagattctgcaatccagagttagaatatgtaattacctacaaagagtagtaaggtatggaaccaggaacttgatgcataagtttagactgatgagatcttaagaatataaagctga

SEQ ID NO: 701654 - DNA, 3312 bp, Homo sapiens
tgaatgttctgactacctaatattacaataaggtaaaagacccattaggatctgaaataaggcagttcaaaataagcatgtaatcattggctaaacagtccatgattaatatcactacttccgtcgaatctcccgttcagagagtcctggcttatatttgatattcatgaataggtcaagtttattgattatataaagtttatgctgccggtgcctaaaaatgtcatttttttaatctatcgggctaaacacttaaagatactgtctaatgagtaccttagcgtaactgggcctcattacacacactcaaatcagtctctggatgagttaccttcatctcccggcagagtcaccgctggccagggttattgctttaataatccacatgtctgctgttaatgtttaccagctagctaatcagaactctagagaatacatggcatgtttgcattgttacaaggtagacatcattttacaattaacttcattacaactggaatgtaatcatccaacattacctctttttatttttcactgtgaggctttaagataattcaatatatacataaaactctaggtactagatatgcatataaatgacacttattttcataaggatacataaatatactcacccatatatagccatacaattattatgaggtatatttacaatctttacattaaaaggggattgttttatgtaaatattacctaaaataagatttctcgctttttttttaaccatacaataaaaaaatatattcacaaattaggccctagggggccatgttaaatccactgtaaatagagactactggcgtatgttgagtgtgtttcgaattgctaacttaagagaaaatgtattgtggtatttgacatacaggcagtagtttggaaaggcaaaaaacacacttaattccgcattaagcagagtttttaaattgtgccttaagtttgagtgaaaggaaggaatattttaaaaagacgttgcacttaagccataatgacgtttaatatcattctctccttgtaggcctcgcagtgccgattattttatgcaagaagctaaacgaatgaagcataaagcagatgcaatggtgagacccttttctttccagatacgttcttccaaattatgtgtgtactgcagcttcatcactgggacaatatagctggggtaattataaaatctattacaaggatggccgggtctgttcaatggagaaatgtttatataatcaaatgttcatagcccaataaagtatgacttcaaccaataatgcctgactgggaaaaagccctagacaaatgaatatttcaatttagtcctaaggtttgaatagtaactagagccagtggaggcagtgggcggtagtatttttttttcctttaaaaagtaaaatctagatttgcatttttctcttgttagcctgacaaacccttggcttggtcccaggatcaaatctcttttcaaaaacacttgtgttcttcacatgtatctgccgaaatgaatgctttctctgaaactgtacaacacagaaactattatctgcacgtaagactctaaagtcaccatgatttgatgttttcaaagaataacttttcttgcttggatgatctcctgttttggaaagcttgaagctctcaggcaagagatggaaaactttgttttcttttctaaaagagatcatgtggttgttccatcttaaatgaatgaagtccaaagggacatcttcccacctagtaattccagttttagtctcctccagtgttcataactgagattgaggcaggtgctggaaatgaagaaggcatttccagtgaccttcagaatactgaagatgtttaaacagtaacagtacccctcttccaatgctaccagtgtcacctattaaacacttatttacgtgaagaccactgcctatgtacactggggtacaggaggaataacccctacgtatcagaaaatagaggagggcagcggaaggtacagctcttgtccacacaatctgagtctgatggacagttctggtcatctggagaagccaatgaatggccactcttggagaagagcatcagatttttaaggagaaagagattttctgcctgaatccagcatctaaagtttacagcattattcattcattgtcctcttgcccaaccctatctttcctgttgacgatttcccaagaggagacactctgctccagccaggctggtcccctactgacctctaagcacaccttgctcctgccagccagcgggcctttgcacctgcagagattcactctcacacactctcatgggcacactcacaccctcagcatcctccccaaatctagccaaaccctaccattccttcccggcgtcatattcagtctcctccctgtggccttcccagcctctctgcggccccatcactagctcactttcctccatctcatttgcactggatgcctcattttgtattttgttgggtaatcacagactgccttgcactttgaactgtcttgtaggtgtacattttctctctccaagtctattatatgttcctggaaagagctttcgcttgtggagtgcacataccacagaattgggtgctttaggaaatattaatactaaatgaaatgacttcatctgaaagtgttatcaagaaatgttgcattataggccaggcacggtggctcacacctgtaatcccagcactttgggaggctaaggcaggtggatcatttgaggtcaggagttcgagaccagcctggccaacatggtgaaaccctgtttctactaaaaatacaaaaaaaaaaaaaaaaatgagccaggtgtggtggtgcacacctgtaatcccagctacttgggaggctgagacagaagactcgcttgaacccgggaggcagagattgcaatgagccaagatcatgccacygcactccagcctgggtgacagagtgagaccctgtctccaaaaaaaaaaaaaagaaaaaagaaatgttgcattatagcctacactacctttataagcagtttaaaattttgatttgctaaggagaggaagttttgctctgcatttctggttttgaagctatcattactaatgaagttttttttgtatttttagtggcaagacttggaatagtatttgagtattatgtcattctgttttaattgatgaatgaatcatttgaaaactggggagattctgcaatccagagttagaatatgtaattacctacaaagagtagtaaggtatggaaccaggaacttgatgcataagtttagactgatgagatcttaagaatataaagctga

SEQ ID NO: 701655 - DNA, 3312 bp, Homo sapiens
tgaatgttctgactacctaatattacaataaggtaaaagacccattaggatctgaaataaggcagttcaaaataagcatgtaatcattggctaaacagtccatgattaatatcactacttccgtcgaatctcccgttcagagagtcctggcttatatttgatattcatgaataggtcaagtttattgattatataaagtttatgctgccggtgcctaaaaatgtcatttttttaatctatcgggctaaacacttaaagatactgtctaatgagtaccttagcgtaactgggcctcattacacacactcaaatcagtctctggatgagttaccttcatctcccggcagagtcaccgctggccagggttattgctttaataatccacatgtctgctgttaatgtttaccagctagctaatcagaactctagagaatacatggcatgtttgcattgttacaaggtagacatcattttacaattaacttcattacaactggaatgtaatcatccaacattacctctttttatttttcactgtgaggctttaagataattcaatatatacataaaactctaggtactagatatgcatataaatgacacttattttcataaggatacataaatatactcacccatatatagccatacaattattatgaggtatatttacaatctttacattaaaaggggattgttttatgtaaatattacctaaaataagatttctcgctttttttttaaccatacaataaaaaaatatattcacaaattaggccctagggggccatgttaaatccactgtaaatagagactactggcgtatgttgagtgtgtttcgaattgctaacttaagagaaaatgtattgtggtatttgacatacaggcagtagtttggaaaggcaaaaaacacacttaattccgcattaagcagagtttttaaattgtgccttaagtttgagtgaaaggaaggaatattttaaaaagacgttgcacttaagccataatgacgtttaatatcattctctccttgtaggcctcgcagtgccgattattttatgcaagaagctaaacgaatgaagcataaagcagatgcaatggtgagacccttttctttccagatacgttcttccaaattatgtgtgtactgcagcttcatcactgggacaatatagctggggtaattataaaatctattacaaggatggccgggtctgttcaatggagaaatgtttatataatcaaatgttcatagcccaataaagtatgacttcaaccaataatgcctgactgggaaaaagccctagacaaatgaatatttcaatttagtcctaaggtttgaatagtaactagagccagtggaggcagtgggcggtagtatttttttttcctttaaaaagtaaaatctagatttgcatttttctcttgttagcctgacaaacccttggcttggtcccaggatcaaatctcttttcaaaaacacttgtgttcttcacatgtatctgccgaaatgaatgctttctctgaaactgtacaacacagaaactattatctgcacgtaagactctaaagtcaccatgatttgatgttttcaaagaataacttttcttgcttggatgatctcctgttttggaaagcttgaagctctcaggcaagagatggaaaactttgttttcttttctaaaagagatcatgtggttgttccatcttaaatgaatgaagtccaaagggacatcttcccacctagtaattccagttttagtctcctccagtgttcataactgagattgaggcaggtgctggaaatgaagaaggcatttccagtgaccttcagaatactgaagatgtttaaacagtaacagtacccctcttccaatgctaccagtgtcacctattaaacacttatttacgtgaagaccactgcctatgtacactggggtacaggaggaataacccctacgtatcagaaaatagaggagggcagcggaaggtacagctcttgtccacacaatctgagtctgatggacagttctggtcatctggagaagccaatgaatggccactcttggagaagagcatcagatttttaaggagaaagagattttctgcctgaatccagcatctaaagtttacagcattattcattcattgtcctcttgcccaaccctatctttcctgttgacgatttcccaagaggagacactctgctccagccaggctggtcccctactgacctctaagcacaccttgctcctgccagccagcgggcctttgcacctgcagagattcactctcacacactctcatgggcacactcacaccctcagcatcctccccaaatctagccaaaccctaccattccttcccggcgtcatattcagtctcctccctgtggccttcccagcctctctgcggccccatcactagctcactttcctccatctcatttgcactggatgcctcattttgtattttgttgggtaatcacagactgccttgcactttgaactgtcttgtaggtgtacattttctctctccaagtctattatatgttcctggaaagagctttcgcttgtggagtgcacataccacagaattgggtgctttaggaaatattaatactaaatgaaatgacttcatctgaaagtgttatcaagaaatgttgcattataggccaggcacggtggctcacacctgtaatcccagcactttgggaggctaaggcaggtggatcatttgaggtcaggagttcgagaccagcctggccaacatggtgaaaccctgtttctactaaaaatacaaaaaaaaaaaaaaaaatgagccaggtgtggtggtgcacacctgtaatcccagctacttgggaggctgagacagaagactcgcttgaacccgggaggcagagattgcaatgagccaagatcatgccactgcactccagcctgggtgacagagtgagaccctgtctccaaaaaaaaaaaaaagaaaaaagaaatgttgcattatagcctacactacctttataagcagtttaaaattttgatttgctaaggagaggaagttttgctctgcatttctgkttttgaagctatcattactaatgaagttttttttgtatttttagtggcaagacttggaatagtatttgagtattatgtcattctgttttaattgatgaatgaatcatttgaaaactggggagattctgcaatccagagttagaatatgtaattacctacaaagagtagtaaggtatggaaccaggaacttgatgcataagtttagactgatgagatcttaagaatataaagctga

SEQ ID NO: 701656 - DNA, 887 bp, Homo sapiens
ttttttaaaccattacttttaatacactatgtacaagtgtgagatttacaaaacaaaggttttagtaaaataatttcacactttaatgtacacaggctcctcatgaaaggattcccttgcctyttcaaagtcagggccctataaccatgcctacattaactcagatctactgacatacagacatcagggaactgaaattaaagcaacaccccacatacttacaagtggcagttccttttcaaactgctcgaataaaaacaaaaactaattattcagaagagtatgtaacgtttattaaatagctaatacatgttaaaatttttaagtataataaaatctcattaaaacacagctaagaagagatcaaccagggattagagtgtgaataaaaacagtgccatgatttaaccaaaaggattccctgttacaatgacataatggactcctggcatttaagatatatgccaacactgatccatttccacatgggccatctataacaagcttaattaaatggtaaaaagaggacacaaacaggattcagaacacctggactctaaaacctactctgttcttgggcaagtcagtgagccccactggccctgtctcctcaaatacaaaatgaggcccataggatatataatcatgctgtccaaaatcactcttaattatttaaagacaaatgattaaacctcagtccagactaagataaaatccattaaagtgaattttaactatctaagttgctttttctatcttatgatctccctaggcgcatctggcaaaaagaacacgtgcaaaacaagcaactgtaatggaaaatagcattttcttttctttttcttttttttgagacagtctcgctctaccacccaggctggagtgta

SEQ ID NO: 701657 - DNA, 1073 bp, Homo sapiens
aaaacattaaattttgcaattcataatccctcctacaaatccttctcttgttgcccacccttcagtatatactccttcaagaatgtccttgatgtactagcaaagaataaacagaaaataaaaaatcaaaacaggccaggtatggcggctcacacctataatcctaacactgtgggaggccaaggcaggcggatcacaaggtcaggagttcgagaccagcctggccaacatgatgaaaccccgtccctactaaaaatacaaaaatcagctgggcatggtaacacgcgcctgtagtcccagctactcaggaggctgaggcaggagaatcccttgaacctgggaggcggaggttacagtgagccaagatcacgccactgcactccagcctgggtgacagagtaaggctctgtctcaaaaaaaaaaaaaaaaaaaaaaaatcaaaataaaacaaaactagattcagggaaattctatcctccaaatttttacaatcaatgtcactgttttgaaatgtcagagtgagtgcttttctcctcattgttctttgcctttttattttttatttagagacagggtctggctctgtcacccaggctagactgcaatggctctatcatagctcactgtaacctcaacctcctggttcatgcttgtaatttgaaagatttgggaggctgaggcaggaggatcatttgaggccatgagtttgagaccaacctaggcaacacagcaagatccgtcttttaaaaaaaatccacaaaaaaacaaaaacaaaaacaaacagaaaaggctgggcacggtgggtcacacctgtaatcccagcactttggtaggccacagcgggtggatcctctgaggtcaggagttcaagaccaagtctgaccaacatggagaaaccccgtcactactaaaaatacaaaattatctggatgtggtggcatgygcctgtaactccagctacttgggaggctgaggcaggagaaccactggaacccaggtggcagaggttgcagtgagccaagatcccgccattgcactccagcctgggcaacaagagtgaaactccagctcaa

SEQ ID NO: 701658 - DNA, 1667 bp, Homo sapiens
attctcccctatactttaaatcatgtccagattgcttataatacctaatacaatgttgttatactgcattgttctttaaatttgtatttttatttttgtattattgtttttcatttttttccaaatttttttatctgaggttggttacatccatggatgtgtcatccacagatacagagggccaactgcacttaacaaaggggagagcactaggaaaagtaacccatcttaactaaaatgaaacagaagtaatgctccttccctgttattctaaataggaataatgaagggactctgggcaatattatagtgcccaatttctccttcaaatcattaaggaggattatctttaataatagagggagaaagcaaatctttctgataggtacaggtgctactctgtctactataaattctaccatgattcctactcatcttccttaaagtcactaaactattctggaatttcaaaacagcactcaaacacttcccattacgcaacctgtaactgtaattcttggcctcttcactagtcagcatgtatttcgtctctgtgacaccacacaagtatattgcattgggagggatgctttttttttttttttgagacggagtctcgctctgtcacctaggctggagtgcagtggtgcaatctaagctcactgcaagctccgcctcccgggttcacgccattctcctgcctcagcctcctgagtagctgggactactggcatctgccaccacacccggctaatttttttgtatttttagtagagacggggtttcatcctgttagccaggatggtctagatctcctgacctcatgatccacctgcctcggcctcccaaagtgctgggattacaggcgtgaaccaccatgcccggccaggaggaatcttttgtgtgaatggaactgtcaactcaaatgttcctcagatggcctatttctaaaagcacctaaaaactctcccaggcataatcatttaataatgcaatttatatggcactttgtttgtccttgtacgtttaacccaatgtctatwtgaggaattacgtaaggtacttgattctctctgggacaagagttctgataagggaagcattctggggaccaagcccatcaaagcagaaaccgacttttctaaacctttacctgttcttgctcaataccctttaaagcccgaagctaagaaagcatcaaggcccatgatggaagattttataaacagggactcattcattattccttgcaccagcccttgtagtactccagtgttgctctgtaaaagacctcacaggcatagatattgatttatgcaagaccagaggtccataaataagatcgtgattcctcttttcccagtggtccttaattcaaattctattttgtcttcaatactacccgaagccactcacttcactgtgatgggcttatgttttttagcatcccattagatctaggcagtcaatatttatttcccttctcatgggaaaatcaacaatatactgtacctggactgttttgcctcagggatttactgaagatcctttcttatttctctcaggttcttaattgggactgcaaggatttgagatttccttgtgagtctattctaatataatatgtagatataatacgtagatgatcttttactatgttcaaaaaa

SEQ ID NO: 701659 - DNA, 1275 bp, Homo sapiens
caggccctggtgtgtgatgttccccatcctgtgtccaagtgttctcattgttcaattcccacctatgagtgagaacggcattgtaatcttttaatgcatgaataaacaggaagaatagaatttgtgtcctagtttccttgtactttggtccagagtaattacaacagaggttaaaaaaaaaaaaaaaaagcaacataggaagttattcgtgacttggacttggttttcagggtttttaaaatttcacttagatatttcaactgtactctcaactgaagggtcataattaaatcactgaaataaagccagccggtcacagattcagaattgccatacagaatgtcagaactacaagattttctccttatcagattatatgctcagctattcaaatatctgttgcataaacccttattgggtgcctactatgtactaggcatgcttacaggataggaatacaattgttacctacaacatagtcctactccttcttgttgcctacaacatagtcctgctccttcatggaactctcagaagcctatggagaggattcaaagactagctaggatttggcaggacagaagatgaggtaaggcttcacagagatgttttttatcggatgattattttattgtaattttaattattatttttaagtcccaaaggtgggagacagaatggtggtacttgtggtgctggtacttccttccctctgccttactaggaaggcaggataacagcctcctctggagagctaaaaagagcaaggctgaattttatagacaccctggccaggcttgctccccaatcacaaggggtgatttcaagtcttgaagtgcaactttcacaatagtaaagagtaaagaatggatacttgaattccatcagcaataatctcactcaatagaccactccagctctaaaatttgtgtttccaakatttcaccttcttagctgacattgatgaagtgactaaatatcactagcagcattctctgtttacctaagacatttatctggagttgggagaggaagctgttttttgaggcttgaaggaaataagactatggaaggcttcataagctgtattgggaattgaaatgtaaggcattgtgagttctgcatccagtaacagtggagtagattgtagtagctaaccttcacacagaaaaaatatgataaattctggacgaaatataaaaagagctatttgtaggcattagacagcaatctagaacatgcagaaactggaatggcatccatcctaaaaaggag

SEQ ID NO: 701660 - DNA, 1694 bp, Homo sapiens
tccctggttctgcatttcctcagccgccatgagcacattctattctatggtcattggatcggcattttaaatcctgtttggcagaaagagagtttcatgtttaggtccaagatgtaatgggtctctctaaaggacagcatgacatttcctgcgtaaaacaactaaaatccagaattcacttcctggtcaatatcgtggggactacctaagcagcatgtgagcacacacacacacacacacacacaccacacacacaacagaaaagtgagtgataatcgattttaaggactaactctggagccagactaactgggctctgattacagctatgattacagctctggtggtaactagctttacgatcttgggcacattatttaacctcttgtccctcagttgcttcatctgtaaaaccgagataacaattgcaattatctcataaaattattggaaggagttaatgaattagtatcagtaaagtgattggaacaattcctggcatataataagccccacatatatgctatataaatgctagttaaatgactagttaaacacacaatgaaatgtaataaaagaaaataaaattaaagataatatattaccagttgggtagatggcaacagagagaatgaagacagagatgaataatcagagatctcttcaacctggagagatattccattatacgacatggtggcaacttgagtggattaatatgtatatgtgtgtatatatatatatatatatatatatatatatatatatataattcccacatttaagaaaaaaagggattaaaacagaaatctgtacccattcgaattttgcataaagagaaccatgwtgagaaggaattactgtactttggtgtgctcataaaattactatatatttataatgatttttaaaaatatggactttagatgacaatttcttaatattgcacctgtacagagacatttggagaaacaaattaaacctttatagataaccttaaatatctgaatatgtatagagttgaatgatgggacaattgagggaaggggtagacagacattaggaaaaacaaattaaacctttatagataaccttaaatatctgaatacatgtctagttgaatgatgggacagtggaggaaagggtgtagtgagcatagtttgaatgatggacaatggaaggaaggggtgtagtgagcatagtcagttggaatgatagacaatggaaggaagggtgtagtaagcatagtcagtttgaatgatggacaatgataggaaggctgtagcgagcatagtcagtttgaatgatagacaatggaaggaagggtgtagtgagcatagtcagtttgaatgatggacaatgataggaagggtgtagtgagcatagtcagtttgaatgatggacaatggagggaaggggtgtagtgagcatagtttgaatgatggacaatggaaggaagggtgtagtgagcatagtcagtttggatgatggacaatggaaggaagggtgtagtgagcatagtcagtttgaatgatggacaatggaaggaagggtgtagtaagcatagtcagtttgcatttgaaagtgatgctgaagtcctcgtcattgggatgccagggggtctaggtcacagaacatacagaaacgtttgtgtgtaagtgttgtgtgcatttgcacatttttcatggggaaaa

SEQ ID NO: 701661 - DNA, 625 bp, Homo sapiens
ttgttggagggcatttattcatagacatcatgtatactttctttccaaagggtaagattgacctagaaccctatggacaaccctttatagttaagcttgccaactacttgtcagaaatgattagtgagaaatgtaggaaagaaaatttcccctgttgataacagggggcaaatagaagatgccctgaagttgtcataaggaatcacatttttttcaataagaatattttttatttgataatatctaatatcacagatcaacctttatttacacatattctagacatgggttgaacttgacaggtttcggtaatagaaaattctgtggcaactcacaaaagagtatgtgtgcattgtaatcatttttattataaataataactgtgtcttttcttgataaaatgaagatataataaatcatgatttcccctcaatcatatcttttagaaactgagtttatgtgtctttrgatttataataatcccaagctcacattttatgttaaaatactcattaaaatgcgataatttattacaactttattttggattatattctgaatgtcttacaacatgaaagctaaagaatgctatacattttttgaaacagatttatataagcctcac

SEQ ID NO: 701662 - DNA, 625 bp, Homo sapiens
ttgttggagggcatttattcatagacatcatgtatactttctttccaaagggtaagattgacctagaaccctatggacaaccctttatagttaagcttgccaactacttgtcagaaatgattagtgagaaatgtaggaaagaaaatttcccctgttgataacagggggcaaatagaagatgccctgaagttgtcataaggaatcacatttttttcaataagaatattttttatttgataatatctaatatcacagatcaacctttatttacacatattctagacatgggttgaacttgacaggtttcggtaatagaaaattctgtggcaactcacaaaagagtatgtgtgcattgtaatcatttttattataaataataactgtgtcttttcttgataaaatgaagatataataaatcatgatttcccctcaatcatatcttttagaaactgagtttatgtgtctttagatttataataatcccaagctcacattttatgttaaaatactcattaaaatgygataatttattacaactttattttggattatattctgaatgtcttacaacatgaaagctaaagaatgctatacattttttgaaacagatttatataagcctcac

SEQ ID NO: 701663 - DNA, 2558 bp, Homo sapiens
tttgtatttttagtagagacagggtttcactatgttggccaggctggtctggaactcctgacctcaaacgatccgcctgcctcggcctcccaaagtgctggcattacaggcatgagccaccacccccagccacttctatcattcttaaaatttgtcaattatttatttcctattattttctccttagtctggccagagatttaacaattttattgatccttcaaagatctaaatttagtttaatttacttagctatataatttttctctgtttaatgttgtttatttcttcattaacctttattattttcttctttctgattgcttcagaattaatttgttctcatttttataataacaagtgggaagctttcatcataatttcaaggtaatttttcttttctaatgcaagctcttaatgggatagatttttccctaaacacagaaatttccacattttgatatgttatacttttttaaatttctcttacttttggctaggttcatgtttaaatatacatatgtgcaagaatattttcccttgatttatatggatttagaggttaaaaaaaggcaaaaaaattattttggaaatttctaggagacttagttcaccatcattgttacataattgtgcatatgttgcaagtaatgtattaagaaaagtatttatatctgtatacatgtttggtccttaatgatgaaattaatgcacagttgtctaactataataatttccttataatcacactagttttcctttggtgccacaagatgatgaatctcactttagtgtgaccaagcaaaatgaggtacaaaaacagtccaatcaatgtgaaaatatctcaaattcatatgaattttaaaaatattttatatgtaaattaaattagaaattaaatatatataatatattttatttcagaartatttgcttgccttttggaactcaaagttcaaaaccttctattgtcatctttaaataactaatttttaagttaatttctagttggtcctatgaaaatactaccacacaatgtggagataaagaaaacatttacagaaaaattgtccatatggacacattttaaacagatgatctaattagcataacagccaccaaactggtaaataaacagttttgtttatttgctgcttaatcagcatccattcagaattctgtaatattgtttagtaaaacagtttatttccatccataaatgtattttataaatttatgcccagtaaacttccaggtaaaccatcgaaatattaactgttttctaaaagtgatggtctttttttttaagctgctttctatagtgaattgatgaaagttaatgaagattaaaatgcttattctataataaaagccaatgccggcatgctgatatataatctctatagatcaaaaaatattcatgccttattctcagatttttaatagtggctctaagcagtcttaaaaatttattatttagacaccttatcctatattttaaaaatattttcttagtatactgtggatgttatacaagtcatataatggatagagaatttcttacataaatttacaatataatttttttaaataaaacttttgtgaaattattttcaaatgttataaatgttaatgagttttgttatattggttccaatatttctcatatatggaaaatgtcattttccctgggaattaatatttggagctggtgtttaagaaaaaccatgtttgatgttggaaaatgctatgtccggtataactatagatgtttggaaagcagctcagttatgctaaagataaagaaaggagagaaaaatgacagaaggggaggtttgaacaaaacaaaataatacctgaaaatgttgaatggatatgtaatatttgtgaatgtttatgttctctatttcaccattatttaaacatttatattttcaaagggagacaataattatattttgaaatcattttgtttttttatagagtgctgtattttttcttttcaatttcaatttggtgagcaaacaaaatcagtcagattattatacataattaggtttcctttttgagatttgttgaaactctttatcctttatgtatgtatttcaagtagtataataaaaaagaaatataaaatgattagatatacataaaagtattgtagattatgtttttcatattttctttcttttaatgtattttgcagatatacccattccagattatgatttcacaaactaagatgactctcagcagggaatcgttactgcatgtcgttttcatcaaagggagcttagtttatttgcctatctgaatattgacattatattactaatttacacattggggaaagggtcaagagaactccaaatttttgttgacttgatattaacctgaaaggggaatgttaataactgacaaaatatatccacagtagttagacatcaagttgtgtttgtttttttaatctacttcatattattgaattatttagatagatgatagatagatagatagatagatagatagatagatagatagatgatagatagatagat

SEQ ID NO: 701664 - DNA, 2558 bp, Homo sapiens
tttgtatttttagtagagacagggtttcactatgttggccaggctggtctggaactcctgacctcaaacgatccgcctgcctcggcctcccaaagtgctggcattacaggcatgagccaccacccccagccacttctatcattcttaaaatttgtcaattatttatttcctattattttctccttagtctggccagagatttaacaattttattgatccttcaaagatctaaatttagtttaatttacttagctatataatttttctctgtttaatgttgtttatttcttcattaacctttattattttcttctttctgattgcttcagaattaatttgttctcatttttataataacaagtgggaagctttcatcataatttcaaggtaatttttcttttctaatgcaagctcttaatgggatagatttttccctaaacacagaaatttccacattttgatatgttatacttttttaaatttctcttacttttggctaggttcatgtttaaatatacatatgtgcaagaatattttcccttgatttatatggatttagaggttaaaaaaaggcaaaaaaattattttggaaatttctaggagacttagttcaccatcattgttacataattgtgcatatgttgcaagtaatgtattaagaaaagtatttatatctgtatacatgtttggtccttaatgatgaaattaatgcacagttgtctaactataataatttccttataatcacactagttttcctttggtgccacaagatgatgaatctcactttagtgtgaccaagcaaaatgaggtacaaaaacagtccaatcaatgtgaaaatatctcaaattcatatgaattttaaaaatattttatatgtaaattaaattagaaattaaatatatataatatattttatttcagaagtatttgcttgccttttggaactcaaagttcaaaaccttctattgtcatctttaaataactaatttttaagttaatttctagttggtyctatgaaaatactaccacacaatgtggagataaagaaaacatttacagaaaaattgtccatatggacacattttaaacagatgatctaattagcataacagccaccaaactggtaaataaacagttttgtttatttgctgcttaatcagcatccattcagaattctgtaatattgtttagtaaaacagtttatttccatccataaatgtattttataaatttatgcccagtaaacttccaggtaaaccatcgaaatattaactgttttctaaaagtgatggtctttttttttaagctgctttctatagtgaattgatgaaagttaatgaagattaaaatgcttattctataataaaagccaatgccggcatgctgatatataatctctatagatcaaaaaatattcatgccttattctcagatttttaatagtggctctaagcagtcttaaaaatttattatttagacaccttatcctatattttaaaaatattttcttagtatactgtggatgttatacaagtcatataatggatagagaatttcttacataaatttacaatataatttttttaaataaaacttttgtgaaattattttcaaatgttataaatgttaatgagttttgttatattggttccaatatttctcatatatggaaaatgtcattttccctgggaattaatatttggagctggtgtttaagaaaaaccatgtttgatgttggaaaatgctatgtccggtataactatagatgtttggaaagcagctcagttatgctaaagataaagaaaggagagaaaaatgacagaaggggaggtttgaacaaaacaaaataatacctgaaaatgttgaatggatatgtaatatttgtgaatgtttatgttctctatttcaccattatttaaacatttatattttcaaagggagacaataattatattttgaaatcattttgtttttttatagagtgctgtattttttcttttcaatttcaatttggtgagcaaacaaaatcagtcagattattatacataattaggtttcctttttgagatttgttgaaactctttatcctttatgtatgtatttcaagtagtataataaaaaagaaatataaaatgattagatatacataaaagtattgtagattatgtttttcatattttctttcttttaatgtattttgcagatatacccattccagattatgatttcacaaactaagatgactctcagcagggaatcgttactgcatgtcgttttcatcaaagggagcttagtttatttgcctatctgaatattgacattatattactaatttacacattggggaaagggtcaagagaactccaaatttttgttgacttgatattaacctgaaaggggaatgttaataactgacaaaatatatccacagtagttagacatcaagttgtgtttgtttttttaatctacttcatattattgaattatttagatagatgatagatagatagatagatagatagatagatagatagatagatgatagatagatagat

SEQ ID NO: 701665 - DNA, 630 bp, Homo sapiens
gttgagaaagactgagactttacaggcacagacagcctagtcaggtgggtttctcatccacctccaccccaaccaagctcagtgtccctcaatatgcactgcagtgctgtttcctttgcattggtgcatagtgtttagtgttcctattgccctagtcagatgggctaccccctcactagcaggacatcttgatgttctttcttcagttgttttgtgagttccattattcaataactctattagcctgaggatgacaatgtatttaaaaagcccatcttttttcactaatgtgtacccattatctagttgcttgaatagcaaaaaatattccttggtccargtaaaatcccatgggctatgtaaaaggatggcagaaattcctctcaagtgtggctatagttacctcagcacccatatgattgacatatatttgtctttttcagacaacaagctgtttttcttagtccttgtcctcacatggatatcctctaacagtccaatccttccattgccactgtcctgatcagatggctaggcttttggcaatggcccataagtcactgaaaatatagcaagatatgcgacagaggtagcctgcatggccatcaccactgcatttagtttggccca

SEQ ID NO: 701666 - DNA, 630 bp, Homo sapiens
gttgagaaagactgagactttacaggcacagacagcctagtcaggtgggtttctcatccacctccaccccaaccaagctcagtgtccctcaatatgcactgcagtgctgtttcctttgcattggtgcatagtgtttagtgttcctattgccctagtcagatgggctaccccctcactagcaggacatcttgatgttctttcttcagttgttttgtgagttccattattcaataactctattagcctgaggatgacaatgtatttaaaaagcccatcttttttcactaatgtgtacccattatctagttgcttgaatagcaaaaaatattccttggtccaagtaaaatcccatgggctatgtaaaaggatggcagaaattcctctcaagtgtggctatagttacctcagcacccatatgattgacatatatttgtctttttcagacaacaagctgtttttcttagtccttgtcctcacatggatatcctctaacagtccaatccttccattgccaytgtcctgatcagatggctaggcttttggcaatggcccataagtcactgaaaatatagcaagatatgcgacagaggtagcctgcatggccatcaccactgcatttagtttggccca

SEQ ID NO: 701667 - DNA, 630 bp, Homo sapiens
gttgagaaagactgagactttacaggcacagacagcctagtcaggtgggtttctcatccacctccaccccaaccaagctcagtgtccctcaatatgcactgcagtgctgtttcctttgcattggtgcatagtgtttagtgttcctattgccctagtcagatgggctaccccctcactagcaggacatcttgatgttctttcttcagttgttttgtgagttccattattcaataactctattagcctgaggatgacaatgtatttaaaaagcccatcttttttcactaatgtgtacccattatctagttgcttgaatagcaaaaaatattccttggtccaagtaaaatcccatgggctatgtaaaaggatggcagaaattcctctcaagtgtggctatagttacctcagcacccatatgattgacatatatttgtctttttcagacaacaagctgtttttcttagtccttgtcctcacatggatatcctctaacagtccaatccttccattgccactgtcctgatcagatggctaggcttttggcaatggcccataagtcactgaaaatatagcaagatatgcgacagaggtagcctgcatggccatcaycactgcatttagtttggccca

SEQ ID NO: 701668 - DNA, 1136 bp, Homo sapiens
ctaccggggtacaatatacccacgtaacaaacctgcacatgtaccccctgtatctaaaatttgaaataaaaaaaccccaaacctataggaggaaggcagaaaaccttattttcaaaacagatttctggcttttgagctcgtttgaatttctatccaagctctcaggatgaaagagggactaggacgggtgcttatgtatttgactttggctttggagtccaaagtgtttcttggaaaaaataggagtgaatgctgttcttagagtttatcatgaagtaaaacctcaaataagggaattagaaaaattctatttttaggagaaagaggcaaattgtaagaaagcacatggacgtcaggctttcggaaggacagaaggaaccyccgtttccaggggatgccctggagctcctgtggatccgcccgtgtctcctacgcctcctccgagaatggcttcgacttctagaagtggaagtgcttggggtcctcagcaagtccctctgtttcgaatgaggaaatggcccctggtggttatgtaagtcagactcatgaatctttgagcttggcaacttaaggagaccttgagttcaatccttccctgctctcgtgagaaggccttggccctggcttactgttcgggcctccaatagccacaggggtgactcaggcaggtgacatggctgataaatcacaggctggacccaggggttcagtttccagtgtggcctggggtccttttcctggggggtccggggcgctggctttctgtcctttaatactcagaagccactgaaccatgttcacaggtggcttcccatggagtggcgggcaccacctcttccaggatggaacttggggtggatcagtagagagtagggaccaagatgagttagaccccatggcaggtggggagggcagcagggttggccaggctgtgatgtgctccagcgctgttctgagagctccgctctgggcccggagcaccaagcccaccgtccttggtggtgagcagtgccgcacccagcagagcaggtccagaagcctgtccagaacactcgagagcagttgtcacggtgcccggtgtgcccctgagacgaagcgaaacaggattcctcagttattgaatgcgggctgtgcgt

SEQ ID NO: 701669 - DNA, 916 bp, Homo sapiens
tcagtgttagatgttccctctatgcaaatrtgagggaaaaaacctagtgccaggttattagcctttatttttgagaaatcatggtgaataggagacggatccaatgacagggaaaaaaaaaagcagtctttttttttaaggggaaaaagatgtcatcatttggaaatgataacttaatttttgaacaatgtctggtcggaaaagaacaaatcaagtaaggtatttggcagttacctaaaagaacagaaggtatcggggaacattaagcataattttataaagaacaaatcttggtataccagttttattttctactatgataaagtgataggccatatggacaaaagagaagaagtttcttatatttaaaattatataatacagctggaggtataattcactgaggtgcctgatttagtatcacatggttcactgaggtttctggtttgatatcacatagtaatctccaaaaaatcatgtcctttgccccccatctgttaaacagttggtgagaaggtattgataattagtggcatggtgtttggaaagaacactatgccaggaatcacatgcaaaatgaggaaagggggactcacatttattgagcactttttatacaaagctctgttccaggtactttgcaaatagatacttttttacttcttgtaaaaggtgttgttaccatttccctgtcacagttgagtgatgctcgaggagattgcagtttcacacagctagtaagtggccaagctaagacccaggacctctctaagatctgttgaccttgaagaaattactcgacctccctgaggcttctctatctgtaaaatggggctgattgctctttattatctctaggaaaggcacatgaaataataggtgctaaagcttctgagaaactcaaaggctcagtcaa

SEQ ID NO: 701670 - DNA, 653 bp, Homo sapiens
ttgttgcacatccgcgccatagtcatcagctgtgcccagccctcccaggccaggagttctctgcattcagcctgagaatcttcttcaaggccacctgtgtgttttagtccactgagatacatctgtctccttgtcttccctccttcctggcagccaagaagcagggtgcaggccccctttactctctggcccaaraaacatctttttctcttttataagccttgcccttggaccagcctgctagagtgggataaggggacaatttacacttttgtaagggatgtctctggaagaaattgtgttgggcagagctaaaccttctaaccctgggcattctggaaggcttgggaaatacctacttagttcagtaagttactgtttaaataaagagggcctaaagtatttatctttctatctcaagcacctaagttattctgtatccataggacagcggcaggagcccgccactttgaaacaaaattttacagtgattgaacattcagatggaagaccagacacacaagtacctcgggacatccatcaccagcatcaaatcaaagtgaaacccaggaggagagcctccatcctgtcttcatcctcaagtggaaattaatagcagagtacaaattgttgctagtgtatcagttcttaag

SEQ ID NO: 701671 - DNA, 2772 bp, Homo sapiens
aggctctaggttccaggctggcctgcccctgtcctctcctgttccctctgttgatgaattgatgggctgactcagcctgcccctccctggacctcagccctgggacttggccatagtgagcctcatctgtgaagcgtgttcaactccagctgaataccagaaatgcaatgtccctgtttacttccaattcaggtagaattgtatatacttcccttatacagcttcccacactgagctgtctcaccatctctgtggacagatgagtaattcgtgcccgctctcccttctcagtttgtcttctgtgtggagaactgccaacatggtctctcctttttagaaactcacatactgtaagtgcaaccttttggaagtcagtgtacataaacatgtgaaatgtgcatcccagctactgtagataatgaggcagctctacatgtaatcacgaggaaaaatcgccaagataaattcagtggacaaaccagcayggaagaggctgaggagcacgctgccatatgtctacacatagtgtagctctagcagaattcgtgaggagcaagtgacagcaggtgcctctgcagaaaggaactggggacaacagtggggaagaagttaacatgtcattattttattttttagatattctacaatgtgaatttactatttattaaaaactaaataaaattgtaagctggggatagtggctcatgcctgtaaaccagcactttgggaggctgaggtggaagactcacttgaggccaggagttcaagaccagcctggtcaacatagcaagaacccatatctacaaaaaaaccccaaaatttttaaaaattatgaattaaaataaataatgaataacctttgaacctccctttccactactaagaaaataattgaacaagtgcacaaggatgtgtacatgaggatagtcatcacagcgttgtttataataatgaaaatttagaaataacctctagggttaatcaattatagtgcattcgtagccatatcctttaaaaacagttgattttttaaatgtttatgtaactagaaactgttatttatagaagtcttagaaatttgagaaagattatcacaaactaccttaagactttttaaggatgaaaattatagatacaaataacttatttaaatgttgtttttcctgaggcataatggattgactttttttccttagtgcacacatgtaattaaatatttttcatttcctgtttattgcatatttgaaactttgttctatattttctatttcaggatgtacgtaacattgatgcgagagcacattatatgggggtgtaggcacaagattttcttgctagtggaatgtgaaccaaaaagtgtagaggccactgggctaaaggaggccggctcaatcagtgaaaatattcaaagccagttttgttgttttcagcagttagtaactatcagtagatgaatatttactaggaaacattggtcttttaaccactttgggcatgcttcttatttagtatgttcattctatcatgacattcagtgaacatttattgagtgcctactgtgcactagggactagtaagcatgttaagtttgtaagctttgttaatttccaccacaaacccataggacctcgttattctcataattgaggaaactgagattcccagtgttgaatgaaagccacacagtatcacatggccaatatcatgtgattgcagagtcaggactcaaacccagctcttaaccaccacgctatactgacggccctttcccagttcacagggaaaaatcaggaacagggagagaattttcaaaatattaagtttccccatagaattttctgaagaactttggtgtatgttgccacttgttcactaacaagttctagcagatgacagaacaatgaggaagtagctaattaatattaatgaacaacctcagaatttttctgagtgttgaatagacttgaatattcaacagtctcaaatatttgacaccatttagtggacacagacttgactcgatatgcttattctaccaagttgttcctggtttacgtgacacaactgaatgtatgccagtttcatgggggactctcagatattctgaaggtacctaatcaagtcagtatagtgggaaggagagagaaacagaagcctcatttgtgaaatagtacttgagtttgtgcgtgaagaatggataggatttagactgagaagcgtggaaaggggacaaccataaacaactgtagagaggctggaacgtgagctgtgctgcaggcagcagggatgcctggaggcacgtggaagccaggaggtggcgggcacagggcacttgacaatgcagtgcataagctcgaggtgagacgggcagaagaacttccgtaagatgccaaggaaaactgcttttattaaatatcttaatttttggcagaatcattttgtctgatataatgtgatgggtttagtaccacattacatttcacatgttatattctgaaatctgaaactttttttttttaatctaggaatattccctgggcttttgaggcaataaagcaagcaagtgaatgggtaagaagaactgaaggacagtacccatctatctgcccacggcttgaactggggaacgactgggactctgccaccaagcagttgctgggactccagcccataagcactgtgtcccctcttcatagagtcctccattacagtcaaggctaagtcaaatgaaactgaattttaaactttttgcatgcttctatgtagaaaata

SEQ ID NO: 701672 - DNA, 2772 bp, Homo sapiens
aggctctaggttccaggctggcctgcccctgtcctctcctgttccctctgttgatgaattgatgggctgactcagcctgcccctccctggacctcagccctgggacttggccatagtgagcctcatctgtgaagcgtgttcaactccagctgaataccagaaatgcaatgtccctgtttacttccaattcaggtagaattgtatatacttcccttatacagcttcccacactgagctgtctcaccatctctgtggacagatgagtaattcgtgcccgctctcccttctcagtttgtcttctgtgtggagaactgccaacatggtctctcctttttagaaactcacatactgtaagtgcaaccttttggaagtcagtgtacataaacatgtgaaatgtgcatcccagctactgtagataatgaggcagctctacatgtaatcacgaggaaaaatcgccaagataaattcagtggacaaaccagcacggaagaggctgaggagcacgctgccatatgtctacacatagtgtagctctagcagaattcgtgaggagcaagtgacagcaggtgcctctgcagaaaggaactggggacaacagtggggaagaagttaacatgtcattattttattttttagatattctacaatgtgaatttactatttattaaaaactaaataaaattgtaagctggggatagtggctcatgcctgtaaaccagcactttgggaggctgaggtggaagactcacttgaggccaggagttcaagaccagcctggtcaacatagcaagaacccatatctacaaaaaaaccccaaaatttttaaaaattatgaattaaaataaataatgaataacctttgaacctccctttccactactaagaaaataattgaacaagtgcacaaggatgtgtacatgaggatagtcatcacagcgttgtttayaataatgaaaatttagaaataacctctagggttaatcaattatagtgcattcgtagccatatcctttaaaaacagttgattttttaaatgtttatgtaactagaaactgttatttatagaagtcttagaaatttgagaaagattatcacaaactaccttaagactttttaaggatgaaaattatagatacaaataacttatttaaatgttgtttttcctgaggcataatggattgactttttttccttagtgcacacatgtaattaaatatttttcatttcctgtttattgcatatttgaaactttgttctatattttctatttcaggatgtacgtaacattgatgcgagagcacattatatgggggtgtaggcacaagattttcttgctagtggaatgtgaaccaaaaagtgtagaggccactgggctaaaggaggccggctcaatcagtgaaaatattcaaagccagttttgttgttttcagcagttagtaactatcagtagatgaatatttactaggaaacattggtcttttaaccactttgggcatgcttcttatttagtatgttcattctatcatgacattcagtgaacatttattgagtgcctactgtgcactagggactagtaagcatgttaagtttgtaagctttgttaatttccaccacaaacccataggacctcgttattctcataattgaggaaactgagattcccagtgttgaatgaaagccacacagtatcacatggccaatatcatgtgattgcagagtcaggactcaaacccagctcttaaccaccacgctatactgacggccctttcccagttcacagggaaaaatcaggaacagggagagaattttcaaaatattaagtttccccatagaattttctgaagaactttggtgtatgttgccacttgttcactaacaagttctagcagatgacagaacaatgaggaagtagctaattaatattaatgaacaacctcagaatttttctgagtgttgaatagacttgaatattcaacagtctcaaatatttgacaccatttagtggacacagacttgactcgatatgcttattctaccaagttgttcctggtttacgtgacacaactgaatgtatgccagtttcatgggggactctcagatattctgaaggtacctaatcaagtcagtatagtgggaaggagagagaaacagaagcctcatttgtgaaatagtacttgagtttgtgcgtgaagaatggataggatttagactgagaagcgtggaaaggggacaaccataaacaactgtagagaggctggaacgtgagctgtgctgcaggcagcagggatgcctggaggcacgtggaagccaggaggtggcgggcacagggcacttgacaatgcagtgcataagctcgaggtgagacgggcagaagaacttccgtaagatgccaaggaaaactgcttttattaaatatcttaatttttggcagaatcattttgtctgatataatgtgatgggtttagtaccacattacatttcacatgttatattctgaaatctgaaactttttttttttaatctaggaatattccctgggcttttgaggcaataaagcaagcaagtgaatgggtaagaagaactgaaggacagtacccatctatctgcccacggcttgaactggggaacgactgggactctgccaccaagcagttgctgggactccagcccataagcactgtgtcccctcttcatagagtcctccattacagtcaaggctaagtcaaatgaaactgaattttaaactttttgcatgcttctatgtagaaaata

SEQ ID NO: 701673 - DNA, 627 bp, Homo sapiens
aggaaataatcactataaaaacgcttgtcaaaatattttttcttaacatgttggcaatacgtagcaagtttttaaaaattttcgtatgctgtgacctagacgttttgtttcgagaagtcattgagggtaaaggaggggaaagtagttatgttttacttagaaatatgaatttttatccaaaataagatgattaaattttgatgtagccttaattttatgcaaccattaaaaacagtgctttggaaaattayttaataacatggtaaaaataattggtcagatatatttagtgtgatggattgtagaaaagaataaaaggttcagtaagtgttctgaatgcataagtgaatcctagtatatatgataaatacttcataatggtgaacaaaagatagtctgtacaggaaataaatggttttgaagcaactgggtaggcatctttaaaaaataatgttagctccttgtctcacactgtataatcaagatgaatctcagtgtatcatagaggtaaatgtagaaaacaagaatcacaaaaatacctgattcaggtaagaccttgctattatgcaaaatccatgaaagaaaaaattgaacaaattttctgcatgagaaaaacaataacaaaaa

SEQ ID NO: 701674 - DNA, 1946 bp, Homo sapiens
aaggaacacgtccctagaataaagctcgctgaagaatacataaaatgattaaattaggaaaattgcacatagtgacgccaccaggcccaggtagtttgataagtgacatctatcaatcattcaggaaacaagtcatttcagttttatacacactcttccagacagtagaaaaagagagactagtccccaatttctcaatcttatcttgatrcccaaacagaagaaacaggaggaaaaaggaaaatgacaagtgtatttgaccatgcatatagacgcaaaagtgctgagcaaaagatgatcaaacaacctactggagtattaaaaaaatgctatgaataatatggttttctcccaggaatgcaggagtagtttcataccagaaaaatctttaattgtcattccccatggtaacagattaagtaggaaaaaatcctatcagtagatgcattcaaaaaatacaacagaagtttaggataaaaacttatttagtgatagaaaggaacttccttaacctgatgaaagttcacagaaccaagtggcaggatattgggtgcatttccttcaaaatcagcagtagcaaaagatgcccatggtcactatgtctactcaactttgaccataatctcacccagcatattgaaacaagaaaaaggaaagaagtgcttaggacaaagggaagaaataaactgttattattttgcagatgatataatcatctaatttgaaatcccaaaacattctaaataatacccaagatcaatgtgtgattttttttctttttgtagagatggagggctcactgtgttatcccctggccttgaactcctggcctcaagagatcctcctgcctcagcctcccaaagttctgggattacaggcatgagccaccaaacctggcctaatttgtgattttgttttaattgaaaaaaatttatttaaaatacttcaatttctatatactagttatttgaactaataagggagcttggcaagttggaaggaaatgaaatcaattaaaaatgagttttacttgctgcatttactgagagaattatgacaattctctaaatccagagagctgacatcccagaggagatgggtgtcactatgaagagatgcacagttatagtgaatcccctcaaggaacccagctgagaaattcaaccccatcaatataggaaagaaaaaggagaagttctgtgttgccaaatggtggggaaatgaaaggtaactggctattcttcaaaccatccatagtcacaaactgcccacagtctgaggtgttacacagacttccgttgccagatgaggttaggtttgcgtgtcctcacttcctcaaaaaaagtgattattcaggacagtgggtcatttgttgaaatctgacatctgttagaagagaaatacatctgcagagtatacatgaggacaggcatttcttgctcagtacctgaagcccaaaaggatgagttgattctttaagaaaatagcattacacttgcatcaaacccagctgctttgattcagcaagccatgacagttaaaaataggaatatcactaatttttcagatggtatctatatttctgaaaaagaagagatcagcaggcttataaataagatctaagaattctccagctaccaaagcaagaagatgctaaaggacacatgcaagaccaacttgtgattttttttaattacaaaaaaaaaccctcttatattttttaaatactttcattctgcattctgataaggaatcagaaaatgcacttttaaaaagatagcatttacaatagcaacaaaaactggtatttaggaagaaaaataacaaaagatgtgtaagacctgtgtgaagaaactctacattatctctttaaaacacttaaaaatatttaaaggaatagagagagaaagacctactgtcatggataagaaggcatgaatttctaa

SEQ ID NO: 701675 - DNA, 1946 bp, Homo sapiens
aaggaacacgtccctagaataaagctcgctgaagaatacataaaatgattaaattaggaaaattgcacatagtgacgccaccaggcccaggtagtttgataagtgacatctatcaatcattcaggaaacaagtcatttcagttttatacacactcttccagacagtagaaaaagagagactagtccccaatttctcaatcttatcttgatacccaaacagaagaaacaggaggaaaaaggaaaatgacaagtgtatttgaccatgcatatagacgcaaaagtgctgagcaaaagatgatcaaacaacctactggagtattaaaaaaatgctatgaataatatggttttctcccaggaatgcaggagtagtttcatacyagaaaaatctttaattgtcattccccatggtaacagattaagtaggaaaaaatcctatcagtagatgcattcaaaaaatacaacagaagtttaggataaaaacttatttagtgatagaaaggaacttccttaacctgatgaaagttcacagaaccaagtggcaggatattgggtgcatttccttcaaaatcagcagtagcaaaagatgcccatggtcactatgtctactcaactttgaccataatctcacccagcatattgaaacaagaaaaaggaaagaagtgcttaggacaaagggaagaaataaactgttattattttgcagatgatataatcatctaatttgaaatcccaaaacattctaaataatacccaagatcaatgtgtgattttttttctttttgtagagatggagggctcactgtgttatcccctggccttgaactcctggcctcaagagatcctcctgcctcagcctcccaaagttctgggattacaggcatgagccaccaaacctggcctaatttgtgattttgttttaattgaaaaaaatttatttaaaatacttcaatttctatatactagttatttgaactaataagggagcttggcaagttggaaggaaatgaaatcaattaaaaatgagttttacttgctgcatttactgagagaattatgacaattctctaaatccagagagctgacatcccagaggagatgggtgtcactatgaagagatgcacagttatagtgaatcccctcaaggaacccagctgagaaattcaaccccatcaatataggaaagaaaaaggagaagttctgtgttgccaaatggtggggaaatgaaaggtaactggctattcttcaaaccatccatagtcacaaactgcccacagtctgaggtgttacacagacttccgttgccagatgaggttaggtttgcgtgtcctcacttcctcaaaaaaagtgattattcaggacagtgggtcatttgttgaaatctgacatctgttagaagagaaatacatctgcagagtatacatgaggacaggcatttcttgctcagtacctgaagcccaaaaggatgagttgattctttaagaaaatagcattacacttgcatcaaacccagctgctttgattcagcaagccatgacagttaaaaataggaatatcactaatttttcagatggtatctatatttctgaaaaagaagagatcagcaggcttataaataagatctaagaattctccagctaccaaagcaagaagatgctaaaggacacatgcaagaccaacttgtgattttttttaattacaaaaaaaaaccctcttatattttttaaatactttcattctgcattctgataaggaatcagaaaatgcacttttaaaaagatagcatttacaatagcaacaaaaactggtatttaggaagaaaaataacaaaagatgtgtaagacctgtgtgaagaaactctacattatctctttaaaacacttaaaaatatttaaaggaatagagagagaaagacctactgtcatggataagaaggcatgaatttctaa

SEQ ID NO: 701676 - DNA, 1946 bp, Homo sapiens
aaggaacacgtccctagaataaagctcgctgaagaatacataaaatgattaaattaggaaaattgcacatagtgacgccaccaggcccaggtagtttgataagtgacatctatcaatcattcaggaaacaagtcatttcagttttatacacactcttccagacagtagaaaaagagagactagtccccaatttctcaatcttatcttgatacccaaacagaagaaacaggaggaaaaaggaaaatgacaagtgtatttgaccatgcatatagacgcaaaagtgctgagcaaaagatgatcaaacaacctactggagtattaaaaaaatgctatgaataatatggttttctcccaggaatgcaggagtagtttcataccagaaaaatctttaattgtcattccccatggtaacagattaagtaggaaaaaatcctatcagtagatgcattcaaaaaatacaacagaagtttaggataaaaacttatttagtgatagaaaggaacttccttaacctgatgaaagttcacagaaccaagtggcaggatattgggtgcatttccttcaaaatcagcagtagcaaaagatgcccatggtcactatgtctactcaactttgaccataatctcacccagcatattgaaacaagaaaaaggaaagaagtgcttaggacaaagggaagaaataaactgttattattttgcagatgatataatcatctaatttgaaatcccaaaacattctaaataatacccaagatcaatgtgtgattttttttctttttgtagagatggagggctcactgtgttatcccctggccttgaactcctggcctcaagagatcctcctgcctcagcctcccaaagttctgggattacaggcatgagccaccaaacctggcctaatttgtgattttgttttaattgaaaaaaatttatttaaaatacttcaatttctatatactagttatttgaactaataagggagcttrgcaagttggaaggaaatgaaatcaattaaaaatgagttttacttgctgcatttactgagagaattatgacaattctctaaatccagagagctgacatcccagaggagatgggtgtcactatgaagagatgcacagttatagtgaatcccctcaaggaacccagctgagaaattcaaccccatcaatataggaaagaaaaaggagaagttctgtgttgccaaatggtggggaaatgaaaggtaactggctattcttcaaaccatccatagtcacaaactgcccacagtctgaggtgttacacagacttccgttgccagatgaggttaggtttgcgtgtcctcacttcctcaaaaaaagtgattattcaggacagtgggtcatttgttgaaatctgacatctgttagaagagaaatacatctgcagagtatacatgaggacaggcatttcttgctcagtacctgaagcccaaaaggatgagttgattctttaagaaaatagcattacacttgcatcaaacccagctgctttgattcagcaagccatgacagttaaaaataggaatatcactaatttttcagatggtatctatatttctgaaaaagaagagatcagcaggcttataaataagatctaagaattctccagctaccaaagcaagaagatgctaaaggacacatgcaagaccaacttgtgattttttttaattacaaaaaaaaaccctcttatattttttaaatactttcattctgcattctgataaggaatcagaaaatgcacttttaaaaagatagcatttacaatagcaacaaaaactggtatttaggaagaaaaataacaaaagatgtgtaagacctgtgtgaagaaactctacattatctctttaaaacacttaaaaatatttaaaggaatagagagagaaagacctactgtcatggataagaaggcatgaatttctaa

SEQ ID NO: 701677 - DNA, 616 bp, Homo sapiens
agccactaggtttccaggaaagtatgtatctagattttaggtccttagaggtgggaaggaggacttcctatcatgatggaaccccctaatagagaaatgtagttcagctgtgcactgcaaacaatgctccgagagtgctagcccaatgcaattacaaaacagaaccatataaatggtatcaaccctggaaaggatatatctttattatttgcaattagcatgattatatgtctgggaaattcaaaattaactgggaaaaggattacaggcaacacagtaactcattaaagtatcagttacaaaagggttttacaatttrtcactattgacattctgaactggataagccttggttgtgggaggacagaagagatgttcagtgcattgtaggatgtttagcagcatccttggcctctattcactagataccagtagcactccctcccctaccaagttgtgacaaataaaaatgtcttcagaccttgccaaatgtcccctggggggaaggcaaaatcacccccatttaaattgggttgtgcaattaatttataagaatcaataactttcttacgttaaaaaactaaccaattaaaagttataatgaggccaggcaagg

SEQ ID NO: 701678 - DNA, 1846 bp, Homo sapiens
tcagagctataaagcccattgccacatcttaggaagacaacttttctgaaaaacaaatagtgatctatttcttgacatgagtgggagtacatgagcattttgttttacacaaatatattaatcttcacgtttatctttttctcattgtgtgtgtttgtgtgtggggtggttgttatagtccacattttaaaagctaagagaaataagtcagctggatgtagcggctcatgcctgtaaccccaccactttgggaggccgaggtgggcgaattgcttgggcccaggagttcgagaccagcctgggaaacatagtgagacctcgtctctactgaaaatacaaaaattacctgggcttggtggtgcgtgcctgtagatccagctgaaggactggggctgaggtgggaggatagcttgagcccgggaggcgaaggckgcagtgagctatgattgtggcactgcactccagcctgggtgacacagcgagaccttgtttcaaataaaagaggaaaaaacgaaaaataagtcaatcgaattcgggtccccttttctttataccagtaaagcttcatagctcctgaaattaggctgcttgaagcaggacacctttcatataggtgctgcaattctctaaattcatacttgctaggacagggagggtcaaaggcagcaggaggaagccatccccggcatgactggctcgggtctcctgggctcgtgaaaacgaactcattagacatcgagctccctcttgtggcagctaaaagaaaacacaaggaaatgcaactcttgcttcactcagttctgtgaccgcattgggagataacccttggaaagcttgattatttgtgggctagctcgcccagaatacatttctaagcacatctgtacaagtaactttgttctttcaatgcagaaagtccccttcattccaaaatgtacattccagagacggtggaggctagagatctctcctgtatctcatcccattctatgagttaccagtgccattagacgaaagaaagtccatgtaaatgcttaggatgctggcgactgttcaactgtgattccattctatctttccatctcatgcctcctgcggctccaaacaccatctagttaactgcgtcccgaatgttgacctacactgatgctgtttcatcagagtcaattggggaggtgtttgtttgtttgtttgtttgttttaatatgggttaggtcactgcaacatcaaagcatcttgatttataaagtttggagcagagcacaataatctgtgtttaatcacagattaactttgttccctttaggtattccctggtaaattgtaatgtgcaatcagattcccctgttttctttttttgttttgttttgtttttgagtcagggtcttgctctatggtcaaggctggagtgcagtggtgcaatcatagctcactgaagcctcaacctcaccagctcaagcgatcatcccacctctgtctcccgagtaggtgggaccacaggaacatgccaccacacggggcttatttctgtgtgagccactgcgcccagcaatgattcccctgctttctagcagttgaataaatactcttttaactagaggacataataagaactaatattagaccatgagaattagaactaatattacctcttggaaacacggatatatctttatggtccacaccatagaacaaatggtcttttttatatgcggtggtaacacagccattgggagggaaacatggggagaagtcctagttaggaaagcaaatttggagagtgaggctgtgatcgtgaaatcacaggtgtggacaagctaagctgtcaatactttgttcttctgaa

SEQ ID NO: 701679 - DNA, 1846 bp, Homo sapiens
tcagagctataaagcccattgccacatcttaggaagacaacttttctgaaaaacaaatagtgatctatttcttgacatgagtgggagtacatgagcattttgttttacacaaatatattaatcttcacgtttatctttttctcattgtgtgtgtttgtgtgtggggtggttgttatagtccacattttaaaagctaagagaaataagtcagctggatgtagcggctcatgcctgtaaccccaccactttgggaggccgaggtgggcgaattgcttgggcccaggagttcgagaccagcctgggaaacatagtgagacctcgtctctactgaaaatacaaaaattacctgggcttggtggtgcgtgcctgtagatccagctgaaggactggggctgaggtgggaggatagcttgagcccgggaggcgaaggcggcagtgagctatgattgtggcactgcactccagcctgggtgacacagcgagaccttgtttcaaataaaagaggaaaaaacgaaaaataagtcaatcgaattcgggtccccttttctttataccagtaaagcttcatagctcctgaaattaggctgcttgaagcaggacacctttcatataggtgctgcaattctctaaattcatacttgctaggacagggagggtcaaaggcagcaggaggaagccatccccggcatgactggctcgggtctcctgggctcgtgaaaacgaactcattagacatcgagctccctcttgtggcagctaaaagaaaacacaaggaaatgcaastcttgcttcactcagttctgtgaccgcattgggagataacccttggaaagcttgattatttgtgggctagctcgcccagaatacatttctaagcacatctgtacaagtaactttgttctttcaatgcagaaagtccccttcattccaaaatgtacattccagagacggtggaggctagagatctctcctgtatctcatcccattctatgagttaccagtgccattagacgaaagaaagtccatgtaaatgcttaggatgctggcgactgttcaactgtgattccattctatctttccatctcatgcctcctgcggctccaaacaccatctagttaactgcgtcccgaatgttgacctacactgatgctgtttcatcagagtcaattggggaggtgtttgtttgtttgtttgtttgttttaatatgggttaggtcactgcaacatcaaagcatcttgatttataaagtttggagcagagcacaataatctgtgtttaatcacagattaactttgttccctttaggtattccctggtaaattgtaatgtgcaatcagattcccctgttttctttttttgttttgttttgtttttgagtcagggtcttgctctatggtcaaggctggagtgcagtggtgcaatcatagctcactgaagcctcaacctcaccagctcaagcgatcatcccacctctgtctcccgagtaggtgggaccacaggaacatgccaccacacggggcttatttctgtgtgagccactgcgcccagcaatgattcccctgctttctagcagttgaataaatactcttttaactagaggacataataagaactaatattagaccatgagaattagaactaatattacctcttggaaacacggatatatctttatggtccacaccatagaacaaatggtcttttttatatgcggtggtaacacagccattgggagggaaacatggggagaagtcctagttaggaaagcaaatttggagagtgaggctgtgatcgtgaaatcacaggtgtggacaagctaagctgtcaatactttgttcttctgaa

SEQ ID NO: 701680 - DNA, 942 bp, Homo sapiens
atgcctattttcaaatgaagattagaaaggctaaagcatatgctcaagtccccacagccaataactaatggatcccaagtttgaaccaggctattcaaactttagtctttgttttcagtcattatatatcccagtttaaaacatcagcaattttcacttaaaaaccaataatacttggaaaatgttttgtaacaagtgtgtcagaaaatagatgaagtcttatrgtaagcatgtgacactgcatttaccattgcattctccgaagcacaaaatccaactctttcatgcttagaggcctgtgtgggtcacaaagcagaatattatatacagagaatctgtctctgcctggggaaacatgcagtcttggatgcaggcgtgaagagtagggaatgtagacttaagtattaactaaccatttattcagtcagtcaggtggtcataaacatttattgtgcatctactgtgtgcatgcagcaaacaaagtatctgtcctatgaaacacacattccagcaggttagtgaggggatcagaaaagaaaacaaaagcaaatagtatataacaacaagttgtagtaagtgatgcatagaaatgtaagtcagtagactgggcaaaaagaagagagtatattgcagagtggtgactattttagaccaactatttagattgtcttatttatttatttatttatttatgaaacagggtcttgttctgtcgcccaggctggactgcagtgatacgattatggctcactgcagcctcgaccacccaggctcaatgggacctcccacttcagcctcccaagtagctggggctacaagcagtgccactacaactgcataattttttaaatttttttgtagagaaggggtttcaccatgtgggtgaggctgatttcgaactcctgggctcgagtgattctcctccctaggtctcccaaagtg

SEQ ID NO: 701681 - DNA, 942 bp, Homo sapiens
atgcctattttcaaatgaagattagaaaggctaaagcatatgctcaagtccccacagccaataactaatggatcccaagtttgaaccaggctattcaaactttagtctttgttttcagtcattatatatcccagtttaaaacatcagcaattttcacttaaaaaccaataatacttggaaaatgttttgtaacaagtgtgtcagaaaatagatgaagtcttatggtaagcatgtgacactgcatttaccrttgcattctccgaagcacaaaatccaactctttcatgcttagaggcctgtgtgggtcacaaagcagaatattatatacagagaatctgtctctgcctggggaaacatgcagtcttggatgcaggcgtgaagagtagggaatgtagacttaagtattaactaaccatttattcagtcagtcaggtggtcataaacatttattgtgcatctactgtgtgcatgcagcaaacaaagtatctgtcctatgaaacacacattccagcaggttagtgaggggatcagaaaagaaaacaaaagcaaatagtatataacaacaagttgtagtaagtgatgcatagaaatgtaagtcagtagactgggcaaaaagaagagagtatattgcagagtggtgactattttagaccaactatttagattgtcttatttatttatttatttatttatgaaacagggtcttgttctgtcgcccaggctggactgcagtgatacgattatggctcactgcagcctcgaccacccaggctcaatgggacctcccacttcagcctcccaagtagctggggctacaagcagtgccactacaactgcataattttttaaatttttttgtagagaaggggtttcaccatgtgggtgaggctgatttcgaactcctgggctcgagtgattctcctccctaggtctcccaaagtg

SEQ ID NO: 701682 - DNA, 663 bp, Homo sapiens
tttcctacttcctgatgaaaaagactcccataaaactctttgataaccaccatcctctcctccagcattgctgctcaactgaaatcccactaataaaacaacttgtgtcattctttaagggcaagactcaaaagactatttcttgggaggtatatttattgccttcaattcatgtggaagtataaaggactgatagatcctttttttttttttaacaaagtacatttaacaggaaaagagatataaaaaatgctagagataaagacatttccagcaagggaatgaaacaaatacctcgagtaggggaagtaagcctcccttattttatttggtctctgaggcttatgctgttactaaagaggarcaaagaatctgtcttttatttatttatttcagctcattcacacaaataatatttttccggataatgtaagctaagcctcatttataaagttcaacatcatctaaaatcatagcataaagatttaccagaaaagaaatcagaacacaacagtcagagttacaataaatggtgttctttatttcagactcatgtaaagcccttggattcaggaaaaacctaaacctgctatcaaatgacattattagaactataacaaacactattcatcattgctgtggattttttgtggaggagaatga

SEQ ID NO: 701683 - DNA, 663 bp, Homo sapiens
tttcctacttcctgatgaaaaagactcccataaaactctttgataaccaccatcctctcctccagcattgctgctcaactgaaatcccactaataaaacaacttgtgtcattctttaagggcaagactcaaaagactatttcttgggaggtatatttattgccttcaattcatgtggaagtataaaggactgatagatcctttttttttttttaacaaagtacatttaacaggaaaagagatataaaaaatgctagagataaagacatttccagcaagggaatgaaacaaatacctcgagtaggggaagtaagcctcccttattttatttggtctctgaggcttatgctgttactaaagaggaacaaagaatctgtcttttatttatttatttcagctcattcacacaaataatatttttccggataatgtaagctaagcctcatttataaagttcaacatcatctaaartcatagcataaagatttaccagaaaagaaatcagaacacaacagtcagagttacaataaatggtgttctttatttcagactcatgtaaagcccttggattcaggaaaaacctaaacctgctatcaaatgacattattagaactataacaaacactattcatcattgctgtggattttttgtggaggagaatga

SEQ ID NO: 701684 - DNA, 1034 bp, Homo sapiens
ggtagtcccagagttgctacaaacttcttatggttctggggactacctgattgtcacgccattctttgctcaattagaaagactacccaatgaacaaaatgggtctccaaaatacaccttcattgtctagctgacaattgcttagggcagtaagacaggtaattaaacaattaatagtctaaaagggggacataaatgaaaataaaactattgagattataaaaatgcagagcaaaaatttttttctaaatcaggactaatgacttacacagatgttgaaatgctaacatccaggaaattagctaagcagcattctagccgagatcagatctgaaataagttaaaatcctttaaatgttcaagctgccaggtttggatcctatgcaaaatytacaaagaataaaaaataaataaaaatgaaggggaaaaaatggcacttcaccctgtaatctagtgactaggatttggcaatatcatagccatggcctgggttcaatttctggtcagggaacttgttccttctagttcgatatttgtgtaatgcttgacattgtgagatactgcttttggaaaagtatacaccaaaaacccagaaatgtcagtgtttgtctcaactaaactgtgataataagagatttgaaaggattttgttttaaagaactctatgatgaaaagtcagcttaattgaaagctgatactcaagatataagatacattgtgtgtgtgtgtatatatatatatatcttgaataaatatatgtacaagctggtattcaagctatatctatacatctatatatctatttagatgtatagatatatcttgatatataaaaatataagatatatgtatattgaatatatatatatatttaaaggtgtatcttttttttttcctttggatcctgtttttggattttttttccagtggactgaaatccttttttaattatgtgcttgagccctctgttcactttctttctcaagaattgttctcagggccaggtgcagtggctctcgcctgtaatcccagca

SEQ ID NO: 701685 - DNA, 1013 bp, Homo sapiens
agtgggaggtaactgaatcatgggtgtgggtctttcccatgctgttctcgtgacagtgaataagtctcacgagatctgatggttttataaaggggagttgccctgcacaagttctcttcttttgtctgctgccatgtgagatgtgcctttcaccttccactatgattgtgaggcctcccccgctgcgtggaactgtgagtccattaaacctctttcttttttaaattgtctagtctttggtatgtctttatcagcagcatgaaaacggattaatacatctcccttcagacatgttcagccaaccagtttgctcttacgtgaagaaggtatggtttgcccaatttcaatagtaaccaagcataatacatgaattagagcaacctccgtattgcaactatttacccatgaaggataggaaaggcagaagactatatgatctacagaaagatcatgagactcgaagtcagaatacctgggttattaatgttcactaaccagctctccgactgtaggcaacacatttttgcttctcagagcattgttctcttggtatttaaaaagaaaatatataagcaggataatctctgaggtttcctccagttctgtattctgtacttctctgaatattcggctgcatactcacctcatttgcaaagtcccagactagaacaagggataccaaaacactcatggagtgaagtatcacatcaagcctcagccactggcatgcacaaagtaaaaacgctaacactacagatttggatattcaccctggtaatggtgagatttaacttcagtagagagcttccatatcacataacggtgtatcattgcactacgttttacttcccctagcaaataaagtacccaggaaaaaaattgaaaagagcatacattgctttatcgtcttgtgaaattactgkgtttcaagccaatagaatgccttaatgctcaagttctcaagggtgatacaaagtgcagagcatctctgtttgtgaagctaaatttaataa

SEQ ID NO: 701686 - DNA, 677 bp, Homo sapiens
gtgcaaagggggcaaaaattcatatcccaaagaaaacggggacacatcaggtctgtcttgttcatcactgtgtccacagggcctgacacctagtaggctcagtgggagaaaggagccccaattaccaacaaaagccaggaaagaacgggaggctcttacggaaaagggtgatacttaaactgagcaaggaggcacctggaaatagtgccacctaataatttttggcgatcagactgrcacactagaacggttcataagaccagccttctcccattggctagcttccttcctcacccttctcaccctgggcaagccgcttcctctctctgggcctcttgcttttcctctgtaacataaaaggggttgagcaatatcatctctgagagcgccatgtgtgtgcgtgccagagggaaaacccccacaacgctaatacatcaaaactgcaggtttgcacaaaaactgaattctgctgaatgcaaacaggcaaacagcatttaccaggaaacaaaacaaaatcaagcacataaaaaagtaggaagagttggaaaacggaaggaagataagttctcaaacagctggaatagttgatgttagctagcgaagtttttcagaggaaaaaacaagaagttggttatgaggcaagtggacctgagaaaaaagactaaaggggaagaata

SEQ ID NO: 701687 - DNA, 601 bp, Homo sapiens
tattttcattattactaccactttatttctaaatgttgccatagtcatttggctttgttctaaatctgtgggaaagatacagagattacacattttgttttcttgcagttactatgctgtccttcctatcactacctgttggctgaggtagtgataggcctaaatgattcattatcttaaaggtactaaatatgttgagtaattttttcttctaaactaacagaaagagagaacctaggagttactcccttaggctggttaaagtgaaaggtagccaagtcaacccagcttgtttccttctctcattaggaaagaactattgttcattctcataacacactttttccaattgcaaacatactcagggttaaaatagtttagcacaaattgcagcccatttcatttgttcttcacaagctggaacttttcttgtaagctaratattaaatggttcaagtaaattggatacataagcctgaaactaggcgtttctcattatacatagagtataaattaagacagactttttcatggtgaaaggtttacagcctttaaaacatctgggaagaagtgggaaagtagggaataactctgttaaata

SEQ ID NO: 701688 - DNA, 628 bp, Homo sapiens
agcgattgaggtgtcttgaagcagggcagtaaatttaccagcttcttgatgaaacataactccagtgatgcagggatgatactgctaataaatgacagtggctgctaacatctcttgagcactgcccttgcagccagcacgatgctaagcactcaacgtggataacctcatgtagtcctggcagccccccaatgaggtagctatgtttttatacccacttaagagatgaagaaacctgagggtctcagagcagctcacacagctggtgagacactgagccagaattcacacccaagctgcggtggaatctgctcaactgtgttctcctgttcctgagggcaaactggaggggkttcattgcgggtaggtgccatgaacaatcaagggcgaggggggaggtggactgagccgctcccagtgtggcacgacgggacaggatgaggcggcgactggaggtagaagggacaggacttggctgctgattccatgtggaggagctgctcacggtgccatatttccagcgcgcatgctccagtcactggctggaaaccagcaggcacgcgtggaggtgcagaggcaaggagttgaagtgtcctcagggaatctgggtgagccacagtaggaggtg

SEQ ID NO: 701689 - DNA, 885 bp, Homo sapiens
tgttttactggtgagattactgaggtcacttggatacttgggtagaaataagaatatagtccaagcttcctgaattctaagttttacacttaactatggcagcctctcaaccttgaacattagcactgacattagtcaggttgtggcagagacccctggattctgaccttaatatctgttctccttgcttgtagcagaactgccagtttttacctcagccgatgactatgcactgtaaataccatatttcccaagctcccttgcagctacatgttgttgactggactcagtggtgtccaacataatatgagtggaaggcrgtgcctgggaaacttgacagaaagatggctgatatatgctcttagtctctttacttcttcccctttccctttattcttcctcttaagtgggttttgagcagccatcttgaactgtgaggtgggaaccatgtgctgaggagagtggagtgtgggtggccaaacccctgcaatagctgtactagccctacagtggatcttccacaggacagagaaagaaaggaagaaacttctgtcttatgtaagctaatgctatttgttatgtgcaaggttaattgataattgttatgtgcaaggttaattgagaaaaacgttttgttttctcctacaaaaaacgtttttttgtaggagaaagattaaccactctttctcacttgtggatattgggtgcccaacccttatttgctgcaacagtgacaggaagtcagattttaggtgactgtgattctggacagaacccagatttcagagaactcagaaaacttctacaacccttctcattgtctcaagacaaggggagtctgagatgttctgcctgtgttcacacagtctggctgaaaggatatta

SEQ ID NO: 701690 - DNA, 885 bp, Homo sapiens
tgttttactggtgagattactgaggtcacttggatacttgggtagaaataagaatatagtccaagcttcctgaattctaagttttacacttaactatggcagcctctcaaccttgaacattagcactgacattagtcaggttgtggcagagacccctggattctgaccttaatatctgttctccttgcttgtagcagaactgccagtttttacctcagccgatgactatgcactgtaaataccatatttcccaagctcccttgcagctacatgttgttgactggactcagtggtgtccaacataatatgagtggaaggcagtgcctgggaaacttgacagaaagatggctgatatatgctcttagtctctttacttcttcccctttccctttattcttcctcttaagtgggttttgagcagccatcttgaactgtgaggtgggaaccatgtgctgaggagagtggagygtgggtggccaaacccctgcaatagctgtactagccctacagtggatcttccacaggacagagaaagaaaggaagaaacttctgtcttatgtaagctaatgctatttgttatgtgcaaggttaattgataattgttatgtgcaaggttaattgagaaaaacgttttgttttctcctacaaaaaacgtttttttgtaggagaaagattaaccactctttctcacttgtggatattgggtgcccaacccttatttgctgcaacagtgacaggaagtcagattttaggtgactgtgattctggacagaacccagatttcagagaactcagaaaacttctacaacccttctcattgtctcaagacaaggggagtctgagatgttctgcctgtgttcacacagtctggctgaaaggatatta

SEQ ID NO: 701691 - DNA, 960 bp, Homo sapiens
gtaattataattcccagaatccaccatgcagtttcatgcttaatggcttttacatgtccagctctgccctgtccttgtgaccagctctagactcaagtgtcacctctggattcccctgggctgagctgatcccgccacccttatgctctgattacccctgtgtatagctttttcactacacctaagatttatttgcctgtcttccccgaaagaccatcagttccttttaatctgagatatgtctttttattcttctaagatctccagtgagtagctgtatctagcacataaaaggtgttcaataaatgctcattgaatgaaatgaaagagtrtgggatctcagccttgcagttgttctctttcccattagtgacactactggactctctccctcacagtcgagccatcgtctgctactgtcgcctcaggtaccagggttaaactgaacctctctgagttgtccctgttatggggtcatttatgagtataggcatgggaaaatccaaaattgcaataatacaaaaagatatgcaacataatatatgctgtaaatttttaacaaaaactatttgctggttgttttttaaaagtaaaagtacaggaaagaaaagttatcataaaataatatcatcctgtaaagaaaattgcagttaatatattggtgtttttatttcccttcagttgagatcaaactttaatatcaaatttcctttctcagtttcctcagttaacacattacaatttgccatgtcatcaagaattcttcatagacataattttaatgttggtataataatccattaaacagatgctgtggttaaatttgaatgtgactatatctgatgttccggcaatttattgaaaacaaaataagtccacaccagaaaccctcatgcaggataagatgagatgctatttgtttcctttttttttttttcctcaacttagctttttctcatt

SEQ ID NO: 701692 - DNA, 601 bp, Homo sapiens
ttttagctttgttctttgtcataatctgcactcctggccagactgaccaaacctggctgcaaaggaaagagatttgaattgatcaccaatgtatgaaaaatacagaacccatgtctggctcctaaactcctggtaataattcccgccatcgtagcaagtgtcccatgcattcagataaagcagtcataatttatggtgtattttaccgaattggtccagcatattggtcctacaaggctcagccaagaaatgtatctrgtgccttaaactacagatttctggtgactcttaaaactggtttacaaagattgagaaaacaattagattgaagagttttgcttcaagtagacctgcattcatagctagagtgcatgagattttcagcactgtagaatttcacacaggcacaagcataacaccagtactttagcagccgccaacagttgcatctattaaacgttttgagaaatgacattgacttatgcacatttaagcaatcaacaatgttttagaagtccaggtaacatataaaatatattcagacctagttttactttccatattgttgctccaaagtaaggtaaataggagttttagttgt

SEQ ID NO: 701693 - DNA, 615 bp, Homo sapiens
tttcaaattggcttctttcacttagtaacatggatttaaggttcctccatggctatttacacttagttgcccatttcttttgagtgctgaatagtattccattgcctggacgtaccacagtttattcgcctattcgtctacttggttggacaagtagataaatagatatcatcttggaaggacatcttgcaattgcaaaaagcttccaagtttttgcaatttaaagttattgggaatatgatgatgaattagaccagctctttgtgagttgcctgtctagttagagaaaccatagctatcatttattgagcccttactgctaatcttttacttgtgttattcatttcatccttaaaattctctattagagaggtcctgatccccactttacagattagaaaaccatgataagaggcagggcagggattagggtaagtcaagagaggcccaaggcacacaatttaatgaagcttatgaaaatctgacttgtggggtggtgagaggaccctgagagtgagtgcctctttaaatgttgtgccctaggtgcctcactgtgtcccagtcctggsaaaaggagttaagtgacttgaccagtatcattcagctggcaagtgg

SEQ ID NO: 701694 - DNA, 669 bp, Homo sapiens
ttgttgactctgtgtgcacagttgtacagcagatctttagagcttactcatcttacttactgaatctgtatgcctttaaaaatggctactatgtgttaatttgtttgctttgaattacctagaaagatttcccttactttgagggaggaggcaggactttactgtggaccagattgaagactgactgaaacagggaagaggctaaagcacctctccataagacacaaccaccagttccgtatcagtttaccactgccatggcaacacctggaagttaccatccctttctatggcaatggcctggaggttaccaccctttttctagaaatttctgaataactaactyacccattaatttgcatgtaattagaagtgggtataaatatgagtgtagaactgcttccaagctgctgctcttagcacactgcctatggggtagccctgctctgcagaagcaatttcaaaactgtaacactgctgcctcaataaagctgtttttttttgtttttgtttttgtttttgtttttttaccactggctcactctcgaattctgtcttgagcgaggacaagaaacatcccaggctaagcctctcaatgtgggggctcacctaccctgtctcaacttcattctctgctttagctttagacacacattatcatatgctaac

SEQ ID NO: 701695 - DNA, 1597 bp, Homo sapiens
tgtatgaaaacagacatccccagtgttcctaggcatccataagaatcatagggccgcgtgcggtggttcacacctgtaatcccagcactttgggaggccaagatgggaggattgcttgagaccaggagtttgagaccagccgtggcaacacagcaagatcctgtctctacagaaaaaaaaaaaaaaaaaaattagccggtsatggtggcacacacctgtagtctcagccactctgggggatgaggtgggaggatcacttgagcccgggaggtcaaggctgcagtaagccaggatcacaccattatactctagcctgggtgacagaacaagaccctgtctcaagaaaaagaaaaaaaaagaaagaaagaaagaaaagaaatatatagaaaaacagtcacgtagggaggttttttttttaatttttaattacagatactgggtcttactcaagacctgttgattcggattctccatgtcttgagatctgaaatgtttctacatccaagttagtgtgtgtgtgcaattcaaatacaatgtcaggtttggaaatcattgatggaggggcaagatccaggggcatattattcaaaagcatacacacaaaagaccttctgaaaattgtgtgtatacatcctggctaatatggtgaaaccccgtctctactaaagatacaaaaaattagctgggtgtggtggcatgcacctgtagtctcagctacttgggaggctgaggcaggagaatcactggaacccgggaggcggaggttgcagtgagccgagatcgcaccactgcactccagcctggtgacagagcgacactccgtctaaaaaaataataataataaaaaaaagaaaattgtatgtattctgcctatgtgaaaagaaaatgtgggaatggatttgcttactacattgcccacttggagtactacttaatcaagtatccccccaaagataaatttaatgaaattattcacaaattctaagtaattttgtggaggtaggaaggatgttatagaaaactacaagcagacattttgcactcatgcttgcatttggaatgctccagatgtcttcatttagagagatccactgtagctaaaattatattcatggaggacagttatagatatggaataaacctagggcttcagatttttaaagaacgtataggtcatctctttcaacccctttcataatgcaagaataggctctataatatcctagacagatgatcatgtagctgaaataccttcagtagtaaggagcttgttattaattggtagtactgaccaaaaggggaatgtatcatactcgcatacaatatgtacaatatatagggaaatgcaccaagatatgtaatataaaataatacattagagggttagaggttataggaattgtaaagatataatcatgtggttaaatatgcttggaaatattatatgtgttatgcttacagaaataaaaggtaataaattaatgaattctggagagagaaatcttggccagtaaaggatataaagacagacaacttaaggacaaggaggctgtcaagcatctacatcccagtgaccacctaatggaatgaatcaaag

SEQ ID NO: 701696 - DNA, 1597 bp, Homo sapiens
tgtatgaaaacagacatccccagtgttcctaggcatccataagaatcatagggccgcgtgcggtggttcacacctgtaatcccagcactttgggaggccaagatgggaggattgcttgagaccaggagtttgagaccagccgtggcaacacagcaagatcctgtctctacagaaaaaaaaaaaaaaaaaaattagccggtgatggtggcacacacctgtagtctcagccactctgggggatgaggtgggaggatcacttgagcccgggaggtcaaggctgcagtaagccaggatcacaccattatactctagcctgggtgacagaacaagaccctgtctcaagaaaaagaaaaaaaaagaaagaaagaaagaaaagaaatatatagaaaaacartcacgtagggaggttttttttttaatttttaattacagatactgggtcttactcaagacctgttgattcggattctccatgtcttgagatctgaaatgtttctacatccaagttagtgtgtgtgtgcaattcaaatacaatgtcaggtttggaaatcattgatggaggggcaagatccaggggcatattattcaaaagcatacacacaaaagaccttctgaaaattgtgtgtatacatcctggctaatatggtgaaaccccgtctctactaaagatacaaaaaattagctgggtgtggtggcatgcacctgtagtctcagctacttgggaggctgaggcaggagaatcactggaacccgggaggcggaggttgcagtgagccgagatcgcaccactgcactccagcctggtgacagagcgacactccgtctaaaaaaataataataataaaaaaaagaaaattgtatgtattctgcctatgtgaaaagaaaatgtgggaatggatttgcttactacattgcccacttggagtactacttaatcaagtatccccccaaagataaatttaatgaaattattcacaaattctaagtaattttgtggaggtaggaaggatgttatagaaaactacaagcagacattttgcactcatgcttgcatttggaatgctccagatgtcttcatttagagagatccactgtagctaaaattatattcatggaggacagttatagatatggaataaacctagggcttcagatttttaaagaacgtataggtcatctctttcaacccctttcataatgcaagaataggctctataatatcctagacagatgatcatgtagctgaaataccttcagtagtaaggagcttgttattaattggtagtactgaccaaaaggggaatgtatcatactcgcatacaatatgtacaatatatagggaaatgcaccaagatatgtaatataaaataatacattagagggttagaggttataggaattgtaaagatataatcatgtggttaaatatgcttggaaatattatatgtgttatgcttacagaaataaaaggtaataaattaatgaattctggagagagaaatcttggccagtaaaggatataaagacagacaacttaaggacaaggaggctgtcaagcatctacatcccagtgaccacctaatggaatgaatcaaag

SEQ ID NO: 701697 - DNA, 619 bp, Homo sapiens
tatttatttatatttcattataaattgtctaacctttttcttcaaatttcaaatactcttgttataagtaactgtaattatactggagatacttcctttaatcaatcattgtgtcagatgactttgaaaaaatataattagttaacagcatacagtaagggaaatttcaggattgtttaacaactcttaaaaggactcaaagaaaaaaagttgaaaaataaaaagagtctataagtttaatgtaggtgtccatgggaaaatataaatatattattgttgawgaaaaaatgattggtagtaaatttatcatgtctgaatttttttaaaggcaagcctgatatcactggtcaagatttcctttaaggtcttgaccttaacatctatgtgtacctgattcctgaatttgcaggaatgttcttgttcctttttaaattctgtgaccaatgtcaaacaggaaagcatctcaatatgccagtggatgaaatcaatgctgtctttatggaaaacatgatgatttccaaaacagctcaaattaactcctattcaaacacaatgtccttgctgtaagataaaattttccatattggtgttgaagtgaaaagtgatttctcatctacta

SEQ ID NO: 701698 - DNA, 619 bp, Homo sapiens
tatttatttatatttcattataaattgtctaacctttttcttcaaatttcaaatactcttgttataagtaactgtaattatactggagatacttcctttaatcaatcattgtgtcagatgactttgaaaaaatataattagttaacagcatacagtaagggaaatttcaggattgtttaacaactcttaaaaggactcaaagaaaaaaagttgaaaaataaaaagagtctataagtttaatgtaggtgtccatgggaaaatataaatatattattgttgaagaaaaaatgattggtagtaaatttatcatgtctgaatttttttaaaggcaagcctgatatcactggtcaagatttcctttaaggtcttgaccttaacatctatgtgtacctgattcctgaatttgcaggaatgtycttgttcctttttaaattctgtgaccaatgtcaaacaggaaagcatctcaatatgccagtggatgaaatcaatgctgtctttatggaaaacatgatgatttccaaaacagctcaaattaactcctattcaaacacaatgtccttgctgtaagataaaattttccatattggtgttgaagtgaaaagtgatttctcatctacta

SEQ ID NO: 701699 - DNA, 619 bp, Homo sapiens
tatttatttatatttcattataaattgtctaacctttttcttcaaatttcaaatactcttgttataagtaactgtaattatactggagatacttcctttaatcaatcattgtgtcagatgactttgaaaaaatataattagttaacagcatacagtaagggaaatttcaggattgtttaacaactcttaaaaggactcaaagaaaaaaagttgaaaaataaaaagagtctataagtttaatgtaggtgtccatgggaaaatataaatatattattgttgaagaaaaaatgattggtagtaaatttatcatgtctgaatttttttaaaggcaagcctgatatcactggtcaagatttcctttaaggtcttgaccttaacatctatgtgtacctgattcctgaatttgcaggaatgttcttgttcctttttaaattctgtgaccaatgtcaaacaggaaagcatctcaatatgccagtggatgaaatcaatgctgtctttatggaaaacatgatgatttccaaaacagctcaaattaactcctattcaaacacaaygtccttgctgtaagataaaattttccatattggtgttgaagtgaaaagtgatttctcatctacta

SEQ ID NO: 701700 - DNA, 1366 bp, Homo sapiens
ccattgaacatcaaagactgaacactgttaccacagaccaagtcccttatttttttaaaaagacacaaccaacccagagaggcaaattagcccttggttatacaagaagttgtaagaagcagcatatctcttatgtcttttctttgcagttgctacagagtaaaagaaaatcaattcggtgtattctccaggagtatggaggaaaacagcccttatttcaaaaaattttggaaggaagaaaaccaaaataatttgtgtggtcattgttttgtaatactgatggtgaaatgcatgtgaattatccagacacatctttatttcagccatcctaaaattttgactagaattacatattaaactctaattgcataaatgtaattaaaatatcagctcatcaatgattcatatttaaaacacacaaatctttcaaagaagtatcaattatatgaacttacatgacaagaataaaaaaatgacaattaggtatcagaagaaatctcaaagtcamatgaatggcaatatttttcttttcctaaggaagctaagaacatttattattacctgattactaaccttttattttcatgacttagaagaaaactagttaagaaatcatagtacttttgcttactcttcccaaacacagtgtgtcaataaacatttattgctatatttcttacataaaagggatattttaggtgataagtgtttgttttaatgttgcatacatacacaacaaacaaaatgctaattttcagcaagtttgatatgctttatttttgcttcctcccctgaatttgctttgtgagattattatacaggttatgattttgggggccttggaaacctaagtaggactttattcttttctttgaatttgagagtttaactacatgtacgtaacaatgtgcaatccatctttatgcaaatagtctaaaaaggcaatgtgcctgaagggctgttttatggcattatttggttttatatctttgcaatcaacactatgcagctaacatggccatgtaaattcatgagagatttttctattgaaacccaaacaaggtcacctgcttttgaagatcagagtgagataaaagtgacactgtttctacagtggtactaaaaaataatgtgtaaagcctctttaaaaaaaaatactattgattttgtctgtgaaaatatgtcattgatttttttttttcaagtttggattttcattgctaattctaatgagggaatttgagatgagttgtgcaatgagctatttatacttatttccttttacatactattccctaaaacatttaaaaaggttcaaaacctgtattcttttcaatggccacagatttttcaggtaccacattta

SEQ ID NO: 701701 - DNA, 554 bp, Homo sapiens
ggggcagtgaccaaggcggcagggagtagtagccttatcttttcagcctctctgccttggactttgcttctattgggtcccaagttaggaaaactaaggacgaagccagtgactgacagcctccatttgaaatggaatcctctgcatctccgagtggccctatacctgacaatrtcattgttagtgaaagcccagtgacaaatgcactcccccaccccaagttcttccacatctcccatggaggacagcacagccaataggacagagtgtatttatgggcagggctggctaaacaggctgggtacgagtccggaacagggtcaggaggatctggcttcccattggccgacacgacagaatccttctcgctttgctgtctgatgtactggtccaatagggtggtcaacttcaggggctggtgctggagcagggagtgggtctgggccatgagtggggtgaggcctcccacaagctccccctatgccaggggcaggctgggaaggctggagtagttgataaagccctgcctgctgaggatggcatctacgtcattg

SEQ ID NO: 701702 - DNA, 1208 bp, Homo sapiens
tctgaaattcaaattgaaactgagcattttgtatatttatttgctaactgtatccctgggaaagagtgaccattagtagtgtagggaaaggactcaggaagaaagtaaaaattgaggtaggctattaaggaaagactgagatgttcaaaaattgccacataatgtatatgcagacaagtaccaggagaaacgatcagagaaatgtgtcaagttcaaaatccctaagggttctgaatgmcaatctaagaagaatggatttcattctgctggcaaagatgaataagaaagattctttataagctcccatttttgacccctttaaaggtaacagtagcaataagaatcaattttatggtataggtcttccatagagaagtccttttcagattttatagggctttttgcttcaataaggccccattttcctttttatgtttttcctcaggtttttacagtcttcctttgttcaagtataagaaatgatgatggctctaccttcaggaaagtgaaacgaataagatttttctattgctgccaaataaatgaaaatgataaatgatcgtgtaaaaattgacaaatctcaagcaatagacttttaaccatgtttatttgaagcaacttgctgtacttcagtgcacaattacaaatcatcctttcaagttcttcagaagctaagacctgcaaagagctaattagctgctctgacagcaggaagatgtggcaacagaaggcacagtttctgaatgactgcaaggtatttaatttgaataaaaggagaattaaacagcagcaatgtgcaaacatagcagtagatagagaatgcctatattaaagactcttacttgccttcaaaatcgaccactggaaatgtatattgcagtgaatgttttaaagcacaagacagccttgcagagcagacagcagagacagaagagtttgtgttggtgcagctcatgcagcagaaactcaagtctcccctttgagcaccttgcctgcactgcggatcagtgtctggaacatgaatgagcattcttggtgcttagtgttgtggtcagaccgctaagcttttcctaagcatgtgtaactgagttaagtggctgccgcatcttgaccaatttgagagatgcatgcataatctaatatgttccttcttcattcatttgcaactcttttcagtcactgaatggacttattcttccctggatccc

SEQ ID NO: 701703 - DNA, 400 bp, Homo sapiens
  misc_feature 2, 3, 4, 5, 6, 7, 8, 9, 10, 11, 12, 13, 14, 15, 16, 17, 18,19, 20, 21, 22, 23, 24, 25, 26, 27, 28, 29, 30, 31, 32,33, 34, 35, 36, 37, 38, 39, 40, 41, 42, 43, 44, 45, 46,47, 48, 49, 50, 51, 52, 53, 54, 55, 56, 57, 58, 59, 60,61: n = A,T,C or G
  misc_feature 62, 63, 64, 65, 66, 67, 68, 69, 70, 71, 72, 73, 74, 75, 76,77, 78, 79, 80, 81, 82, 83, 84, 85, 86, 87, 88, 89, 90,91, 92, 93, 94, 95, 96, 97, 98, 99, 100, 101: n = A,T,C or G
tnnnnnnnnnnnnnnnnnnnnnnnnnnnnnnnnnnnnnnnnnnnnnnnnnnnnnnnnnnnnnnnnnnnnnnnnnnnnnnnnnnnnnnnnnnnnnnnnnnnnttggggtattttgttatacagcaattaataactaatatagttattttctcctacaatttatcattgcacaatgatgggcatgaagcaaacattaccttcagaagatttggattcagtggcatctaatgtgcatgaagggccagtggagaactttaaagtcttttatttccataatgacaatcacagcaaggtgaaagtgggcagcygatctgggggagaatatttagcctcagggatttataacctgtgctatggtttgaatgtttgtcccttctaaaactcatgttaaagtttaattg

SEQ ID NO: 701704 - DNA, 904 bp, Homo sapiens
tttttgtaacttcagagaaaaacaaaacccaagtcagtgaaagccatcagtgtaagacttcctggagttctwcactggggtgatttcagttctgtaagaaggaaagtcctggggcagccctcctttgttctcccctatgacagctcatcgaagatttgagggtgactattgtttccttgaccacatttgccttgacttcagggcaaacatttctagttcctcaacccttcctcctaaggcaagcttacctcctcagccttccctccttggacaagctccagtttgtaaatgctgttcttaaaggtccttggcatgaggccagtgtcatcggtttctgcctggctcagccctgtaagccctgccccttcctcatattggagctgacattgtccactaaagaggacactactatgtgttttggaaacaacaactagactgctttggctgttggcttggcccgagataccattttgtgttattatttccaattgcatctgttaaatatatatctatagatatatctgtagaaaaattctagtttattacttcttttttctttgaattgcgtctaaggtcaagtcttcactaaactggacttttaaaatttaaaaatgctatgagtaatttgtgaatgcattcttgaaaattcaaatggtaaaggaataaatgaagccaaataataaagaacctcttcaccatcggccttcactaacatcactcccctctctacatttatgatttggtttatgcatttccagacttgttcctatgcatttacatatattgagtggcatcatgttgtgtatgttttcctgcaatttttcctgttaccagaaaatggtactcagagacttgctcatatcagtaggtagaagtctatttcactatttttcacctgcttcat

SEQ ID NO: 701705 - DNA, 904 bp, Homo sapiens
tttttgtaacttcagagaaaaacaaaacccaagtcagtgaaagccatcagtgtaagacttcctggagttctacactggggtgatttcagttctgtaagaaggaaagtcctggggcagccctcctttgttctcccctatgacagctcatcgaagatttgagggtgactattgtttccttgaccacatttgccttgacttcagggcaaacatttctagttcctcaacccttcctcctaaggcaagcttacctcctcagccttccctccttggacaagctccagtttgtaaatgctgttcttaaaggtccttggcatgaggccagtgtcatcggtttctgcctggctcagccctgtaagccctgccccttcctcatattggagctgacattgtccactaaagaggacacyactatgtgttttggaaacaacaactagactgctttggctgttggcttggcccgagataccattttgtgttattatttccaattgcatctgttaaatatatatctatagatatatctgtagaaaaattctagtttattacttcttttttctttgaattgcgtctaaggtcaagtcttcactaaactggacttttaaaatttaaaaatgctatgagtaatttgtgaatgcattcttgaaaattcaaatggtaaaggaataaatgaagccaaataataaagaacctcttcaccatcggccttcactaacatcactcccctctctacatttatgatttggtttatgcatttccagacttgttcctatgcatttacatatattgagtggcatcatgttgtgtatgttttcctgcaatttttcctgttaccagaaaatggtactcagagacttgctcatatcagtaggtagaagtctatttcactatttttcacctgcttcat

SEQ ID NO: 701706 - DNA, 1206 bp, Homo sapiens
  misc_feature 426, 427, 428, 429, 430, 431, 432, 433, 434, 435, 436, 437,438, 439, 440, 441, 442, 443, 444, 445, 446, 447, 448, 449,450, 451, 452, 453, 454, 455, 456, 457, 458, 459, 460, 461,462, 463, 464, 465, 466, 467, 468, 469, 470, 471, 472: n = A,T,C or G
  misc_feature 473, 474, 475, 476, 477, 478, 479, 480, 481, 482, 483, 484,485, 486, 487, 488, 489, 490, 491, 492, 493, 494, 495, 496,497, 498, 499, 500, 501, 502, 503, 504, 505, 506, 507, 508,509, 510, 511, 512, 513, 514, 515, 516, 517, 518, 519: n = A,T,C or G
  misc_feature 520, 521, 522, 523, 524, 525: n = A,T,C or G
tacatttttgcattgttgaatgcattgcatcatctcatttactcatcacaacgctatgatgtaggcatwgttattatcacccccattttataaataagaaaactggagctcagatagatgaaagtgacttgcttaaggtcaaatagcagcatctgtgctcttagcttccctcaccctagatggtgtttgcttagcttgcatggtggcacagctatggagctgttttgaaaattatcctacctcattccaaaatggctgattactgcttggacttctttctcttgtctccatattctccccagtggattccccagggttggatgcagggtccagcttccagaccaggattggcttttgtttttggtttggggttttttttttttttttttttttgaaacaaggtctctttttggccaggaggggtcnnnnnnnnnnnnnnnnnnnnnnnnnnnnnnnnnnnnnnnnnnnnnnnnnnnnnnnnnnnnnnnnnnnnnnnnnnnnnnnnnnnnnnnnnnnnnnnnnnnnctcgactcgagaggatcccggagacagcgacacctcgggttcaaatcctgtctctatcagtttttggcagtgtgatttggggtgaggtgcttatccaccgagcctccaaaactgccttgcctatattccttatgacctagagggtgactctagtgcttgattggctggtcactgggataacaggctagaggatctggtgatctcaacctcctaggccaccctccatcacttggccattccactggaaacagtctttggggctccccacagttgtggctcattctgatctccagcatctcccagtaacctctttggcttgtgcttgtagaagcagcctttgagaagacggagggcttcagatgaagcagatgccaggctaagcaccgtccccaatcttatattgcagagccatttggaagaagagctcaagctgttgaaacaaacaaaacgctgcatgagatgaagaccagattcctgctctttggagaaaccaatcagggctgtcagattcgaatcaatcatccggacacgttacaggagtgcggcttcaactcctccctgcctctggtgatgataatccacgggtggtcggtaggaaatgctgacatgccgtttttctctccgatttcacatttacttaatatcattctagcgtgttcatgttcataaaagatagggagc

SEQ ID NO: 701707 - DNA, 1206 bp, Homo sapiens
  misc_feature 426, 427, 428, 429, 430, 431, 432, 433, 434, 435, 436, 437,438, 439, 440, 441, 442, 443, 444, 445, 446, 447, 448, 449,450, 451, 452, 453, 454, 455, 456, 457, 458, 459, 460, 461,462, 463, 464, 465, 466, 467, 468, 469, 470, 471, 472: n = A,T,C or G
  misc_feature 473, 474, 475, 476, 477, 478, 479, 480, 481, 482, 483, 484,485, 486, 487, 488, 489, 490, 491, 492, 493, 494, 495, 496,497, 498, 499, 500, 501, 502, 503, 504, 505, 506, 507, 508,509, 510, 511, 512, 513, 514, 515, 516, 517, 518, 519: n = A,T,C or G
  misc_feature 520, 521, 522, 523, 524, 525: n = A,T,C or G
tacatttttgcattgttgaatgcattgcatcatctcatttactcatcacaacgctatgatgtaggcattgttaktatcacccccattttataaataagaaaactggagctcagatagatgaaagtgacttgcttaaggtcaaatagcagcatctgtgctcttagcttccctcaccctagatggtgtttgcttagcttgcatggtggcacagctatggagctgttttgaaaattatcctacctcattccaaaatggctgattactgcttggacttctttctcttgtctccatattctccccagtggattccccagggttggatgcagggtccagcttccagaccaggattggcttttgtttttggtttggggttttttttttttttttttttttgaaacaaggtctctttttggccaggaggggtcnnnnnnnnnnnnnnnnnnnnnnnnnnnnnnnnnnnnnnnnnnnnnnnnnnnnnnnnnnnnnnnnnnnnnnnnnnnnnnnnnnnnnnnnnnnnnnnnnnnnctcgactcgagaggatcccggagacagcgacacctcgggttcaaatcctgtctctatcagtttttggcagtgtgatttggggtgaggtgcttatccaccgagcctccaaaactgccttgcctatattccttatgacctagagggtgactctagtgcttgattggctggtcactgggataacaggctagaggatctggtgatctcaacctcctaggccaccctccatcacttggccattccactggaaacagtctttggggctccccacagttgtggctcattctgatctccagcatctcccagtaacctctttggcttgtgcttgtagaagcagcctttgagaagacggagggcttcagatgaagcagatgccaggctaagcaccgtccccaatcttatattgcagagccatttggaagaagagctcaagctgttgaaacaaacaaaacgctgcatgagatgaagaccagattcctgctctttggagaaaccaatcagggctgtcagattcgaatcaatcatccggacacgttacaggagtgcggcttcaactcctccctgcctctggtgatgataatccacgggtggtcggtaggaaatgctgacatgccgtttttctctccgatttcacatttacttaatatcattctagcgtgttcatgttcataaaagatagggagc

SEQ ID NO: 701708 - DNA, 1478 bp, Homo sapiens
ctatttattatccatcctttataagcaacatattgcaacagtcttttctaaaaggatgcccacttgtggcagcacaggttctgaaaatttcttcaaaatcaagaaatctgctaatacattgagaggttgtgatggaacaaacactctcatttacattacattaatgtaaatcaggagaatttcttttggaggaaaattggcaatatccatcagtcttaaatacgtaacctttgtcccagtaactacgctgctcccgatttatgtgcacatgtgccagtgtagcayaatgtatgaggaaagtcaactccatcattaggagtaggctattaagcagtcactgaaagaatgggtagacctatatgcactaacgtgaaatgtccacatacaaagggaaaaaagcatgtcacagcacatataggtcactaccacttttaaaagacacatttatacgaatgtgctttgaatgtctgaaggagacactaaaactgggtaagagtggttacttctggggagaggacctgggggactgggatgaagaatggaaaggagatgctgtctctgacttttgccctatttgaatttttttgtcatgtgtatgcacttccttttcattgctgatggttttttaaaggcaccagaccagggaatgtaagttactgagtgaagaactctctcaccattggtgcttttctgaagggaatctgtgtagcccagatacaaacccttgtgtgggacggctgtccacctactactcgctggtttacccattggacttgtgtctgtcctccctaaggccaaattttccccactccagtctatatggaaaaaataagcctctgtgtctgaagccctatttctggcctacaagtggggcgtgtggacacacgagacaaatggaggtctgttaatggtagggcaactgcaaaataaatcatgcctgaacacaggcacaaaatggaagttatctggatacatttgcaaagatttatattcagaaaggtagttttgttatttattaagtgtttattaaatgcctccctaaaggtcctggatgccactagaatctttagttaggactgagatgtatatgcaagagtggcacatatcaaaatatctgctcattggttcagatccaacgtaagttttccttgaaccagaacctcatattaacttaaagtactcaatggcacagcatcctctaatttaaagattttaaaacaaaaacataaccagaagacccagttttcaaaattgctgttaaaggccaacaaattagtgggagggaaggaataaaaaggaataacctctcttaaaataacaaatctacaaagtcctctgccacaaaagcagatctttgtcatttcccatgagataatcatcaccttgctgaaaatgagaaaggcaccccccgcaggcagggggaaaaaacccactcgctgaaacagcttctacttgtttttaccatatattccaggggt

SEQ ID NO: 701709 - DNA, 626 bp, Homo sapiens
aaaaagaagaaaaaaaaatctatccccagaataacatggtaaacattttggtatatacccttctaggtttttttctcttattcatggatttttaaagcatacaattagaaatatactgtacttatgtcatgatctatttttacattttaatatctcattaatgattttctagatctaagccttatctatagctacactatttaatactgtaaccactagcaacatgggctgttgagcactagaattgtggctagtctgaattgagatgtgctgtaagtgcaaaaaacacaccagattccaaacacaattttttttttttttttttgagacggagtctcactctcgcccaggctggagtgcagtgrcacgatctcggctcactgcaagctccgcctcccgggttcacaccattctcctgcctcagcctcccgagtagctgggactacaggcgcccgccacagcgtgcggctaattttttgtatttttagtagagacggggtttcaccgtgttagccaggatggtctcgatctcctgacctcgtgatccgcccgcctcagcctcccaaagtgctgggattacaggcgtgagccaccgcgcccggccggaacaagaaacacatttttaa

SEQ ID NO: 701710 - DNA, 1346 bp, Homo sapiens
tcacttgaagtcaggagctcgagaccagcttggccaacatggtgcaaccctgtctctactaaaatataaaattacctgggcgtggtggtgcacacttgtaatcccaactactcaggagactgaggcaggaaaattgcttgacctgggaggtggaggttgcagtgagttgagatcacaccactgcactccagcctgggtgacagagcaagactccgtctcagacaaaaaaaaaaaaaaaaaagaaagaaaaaattttaagggtcttagatggtatctggctaattttggatatgtctgtgcatgtgagcattcattagtgcttagagtaggggtgtccaatcttttggcttccctggggtgtgctggaagaagaatcatcttgggccacacataaaagacacaaacagtaacaatagctggtaagcttaaaaaaaaaaatcgcaaaaaagcctcatgttttaagaaagtttacaaacttgtgtcaggttgcatccaaacccatcctgggctgcacgcggcctgcaggacgggggttggacaagcttggcttacagattgtttatcttcttaaggttttttttatgtggtagggatggggtatatagaagcaaaagaaaaaatacttgtatacttgttaacattaatctccacaataaaactttcagttacccagaactgtcccaagcacattttggacaatcagatatatatatggaagtggcttatttatttacttatttatttatttatttttagagacatagtctcgttctgttgcccaggttagagtgcagtggcgtgatcacagtttactgcaggttcaacctcctgggctcaagcaatcctacctcagccttctgagtagctgaaaatacaagcatacatcaccatacccagctaatttttaaattcttttttgagagacagggrtctcactatgtttgcccaggctggtctcaaactcctgggctcgagtaatctttccaccttggcttcccaaagtgcaaggattacaggcatgagctgctgtgcccagcctgtgtttgttttaaatccttaaaataaccttcttatctcctgcatcatcattaatatacctgtatccaaaaatatgttttttgggaagccccactctatctatctctgcaaagagtagacaataaatgtttgctaaactcaagaatcttgcaacagcttcaagggaagacaatctgatgactccaaatggttttccatcactttcatcatgtaagaggcaaaggctgttaaattaaaactcttattatttgaaaaaaagacagttaatgagaaggacgttgaaaaggaaatatcctggacttttctga

SEQ ID NO: 701711 - DNA, 1346 bp, Homo sapiens
tcacttgaagtcaggagctcgagaccagcttggccaacatggtgcaaccctgtctctactaaaatataaaattacctgggcgtggtggtgcacacttgtaatcccaactactcaggagactgaggcaggaaaattgcttgacctgggaggtggaggttgcagtgagttgagatcacaccactgcactccagcctgggtgacagagcaagactccgtctcagacaaaaaaaaaaaaaaaaaagaaagaaaaaattttaagggtcttagatggtatctggctaattttggatatgtctgtgcatgtgagcattcattagtgcttagagtaggggtgtccaatcttttggcttccctggggtgtgctggaagaagaatcatcttgggccacacataaaagacacaaacagtaacaatagctggtaagcttaaaaaaaaaaatcgcaaaaaagcctcatgttttaagaaagtttacaaacttgtgtcaggttgcatccaaacccatcctgggctgcacgcggcctgcaggacgggggttggacaagcttggcttacagattgtttatcttcttaaggttttttttatgtggtagggatggggtatatagaagcaaaagaaaaaatacttgtatacttgttaacattaatctccacaataaaactttcagttacccagaactgtcccaagcacattttggacaatcagatatatatatggaagtggcttatttatttacttatttatttatttatttttagagacatagtctcgttctgttgcccaggttagagtgcagtggcgtgatcacagtttactgcaggttcaacctcctgggctcaagcaatcctacctcagccttctgagtagctgaaaatacaagcatacatcaccatacccagctaatttttaaattcttttttgagagacagggatctcactatgtttgcccaggctggtctcaaactcctgggctcgagtaatctttccaccttggcttcccaaagtgcaaggattacaggcaygagctgctgtgcccagcctgtgtttgttttaaatccttaaaataaccttcttatctcctgcatcatcattaatatacctgtatccaaaaatatgttttttgggaagccccactctatctatctctgcaaagagtagacaataaatgtttgctaaactcaagaatcttgcaacagcttcaagggaagacaatctgatgactccaaatggttttccatcactttcatcatgtaagaggcaaaggctgttaaattaaaactcttattatttgaaaaaaagacagttaatgagaaggacgttgaaaaggaaatatcctggacttttctga

SEQ ID NO: 701712 - DNA, 619 bp, Homo sapiens
attatcatgtggtggtaactggtacaaaagctgtttaatccgatgcttctctccggggctgttaacgtaaggaactttttcctctggtaagcaagcaaaatagagctggatctgcaaaagagacagtgagaatggcatcaacatacagaactgagcatctcagctcacttaatctttaaaagttacctttccctaggtacagggtttggcctcttgtagctaatgagaagaccagctgagccaactcagcagaactgcaaaccttcagataactagcacccagctgctaaattgctcttcaggaatgtaatttgtagtgacaattagggacatcataaattatgcaccataaaatatgcacatttaagaccactcttcccggtggtgtggctcacgcctgtaatcccagcactctgggaggctgaggctggtggatcacctgaggtcaggagttcgagaccagsctgaccaacacggtgaaaccctgtctctactaaaactacaaaaattagctgggcgtggtgatgcacgcctgtaatcctagctactcgggaggctgaggcaggagaatcgcttgaacctgggaggcagaggttgcagtcacccaagatcgcgccac

SEQ ID NO: 701713 - DNA, 3688 bp, Homo sapiens
cctccctcacaaaggaaggagggtcagggaggggatgggtgcctaggattattggagtagtaaatctaaagagggattgggtgtagaaaacgttaaagaaccagtgctctctaatcacattgctttaaatataatcaaaggggaaagagtaattggagaccttgggaaactgcaacctattataaaactttataatgcctgttagccctaagaagagcttggtatctgccttggggcccttccctggggatgccacagacccaggtaatggtaactagaatttgcaaatgttcaatgacccaccagggtataatgaccaatcggggatacaacagaaatgtttaaaattgacaagaaagtaacacatttggcataaactttcagcagtaacaaatttggaaagaaacaaaatatcattacagtgattcctttggatattagtttcttcatctgggtaagatgtaggatcccaagggttttgtgaactctacatttgtatgattgattttgtgattcttttagatacctatctacatagtcagaacaaccaaactgctgttctggaatatgctcgcattgaaaactagaactgccaccctatttaatactacatctgccaactgcccctcaaatttaggttagatgtcatttgtgattatcagagcctttgatctctcatttctattaagaaacctgaaagacatctaatcatttaaatacattcttcctagattgctggaacttacagtagttataaatcctttcaaatgtctgataccaagagcaactaactcttacccttaaaactaaaaaggaggtctttttagaagggaaaaaatgaaggcaaggagcagaaaagacctcagggtcactatatacacaacatggaagaaccagggattagcgccaaagttggctttgtactgtgtcctttatctctttctaccagacccaacgcagctggctgacatttgacaaacaaaatgctgcctctttatttctctgcctttggcatatttctgattttctattatcctctcctccattaggacattgtagttcagcttgactttagattagaaacagacttgtacaggtatagtatacttatgagggcctgagaagaataatgtctgagaatcattcattcacttaactcatgtttattaaatttgtctgctatgtgccaggcatcattctaggtgctgagaatacagtagtgagtccccaaagtccccagcttctaggaaaggagaaagacaacgaacgataaacaaatagacatgtaaatacctggcaatgctaagtgctttgcagacaaatattgcaaatggagggagggtgatattttagttagggagttgaagccttctctgtagagatgaccttagagcaaagaccaggatggagcgagggaaccaagccctgtgaatttttgggcttcctttctcaactggcccctaaagtgtgatctgcaagcatgaatattccacctggctgaaacaaaaggatgctggttgggggccttgctctccattctgcataagttcacccttgacaataacaacccctttcagaccagactaaagtctgtttcattgagattgaacctttgtaggaagcttgcaactgtctccacactgcttcatcactaaaaacgcttacaatgggtaataaaccatgacagtacctgttgaaaatataacaaaacgtatttacaagtaactgcgttagaggaagcacatttacaatggctgacatttaatagtgataagtgctgctatagtttgtagttggaagtattttgttgcctaatgtagctgtcctttaaaagctattccaaaaagggtctgcctggcttaatgtattcacctgctgatactccctttatcataatcatatgatatttcagagtttgatttaaatcaataattgattgcgcatttctcctataggtaggtagctgaaatcttccctgaggaagcccaaacagagtgaagtaggaaaaaggaaatctgacctaggtattcatggttaattttacagatccacagaggaaaatggtaacctttgaagtcttcccacaaatccctaaactaggcctaaggccagaagagttctatatcagaacgttttgggaatcgtcttcaaaaccggaatccatttggccaataaagagtctatttgaattacaaattgtgttgtccgaatcagtgtttccaaagtagtctaccagcagagccacaacttttctgtttctgccactttaagagagtaacaaaamaaaaaaaaaaaaaaaaaaaaaccttctcagctgccttactttgtagctgagataacagaatttggccacagagtgatttacttgactgatctatttatggcaacttgtttatgtatttttaaatcacagttacaatgagctattgttcacgtgtatactgtagaaccacataggttgcaaatcactcccaaggaatcctgatggtacaggattattttttagcttaaaaaaaaaaagataccaaaggaactggtgaccactttaaattgcttttatttactgatattttacaaattgatgaagctcttaaatattgcattttccccttcattctcttggtatttctatcaccttgtgataaggaggctatagtggaaactaaaatttgtagttcagaagagattagacctctactgatgagtactaatctatcattttttttctgggcttgctttgagggtatgttttgcttctcttgaccctttctgtagacaactgaagccaaactccactttctctcagtgtacctacaaatagctcagaaacaagattagcttcagtatgggacacttccttgtgtttgaataatgatattcacttaacctatttgtaaaaactctcagtagtgtacttgagttagtacatcgcgtgacctggctccttttctttgctgttatttactgataaaaataaatctcctgcgctaagcagtaggaatcactccgaaatgcaggggaagtcctaagagaattcatatgctaatgagcccttctaagtgagaacttgcttaaatgtgccatttgctgacatcattgttatgggcagagtggagatgatttctttaagaggtggcctttcatattctcccagcgtttcgtggcccgcgcgtgcacctgcgggagggggaagtttacataagcgtcctagggtatttgcatcttagcggcttcactcactgggctccggagaatggagcgggcgggcggcggtaggtgctcgagccgctaggctggccaagggggtgggtaacttttcgaggaattgtgcgcgcgggacctcgtggagatcggccaggggcacggtcagcagtgacagttcctggaaagcgggcggcggcgggagcaggctgggcaggcgccgcccgcgggcgggagcggggagctgggtccggctgggatcgaagggcgggatcggcaggaaacgaaatgggtacttttttttttttttttttttttttttttttactgcgggctctgattacttttgaagatcgccggccccaggcgggctcccggcgctgagcggagacgagtttttctccccgcagaggaggatcctggaaggacgcggagctggggcttgggggatgcagtggcctggacgaggtgactccaacccggggga

SEQ ID NO: 701714 - DNA, 1161 bp, Homo sapiens
atttcctaacactgagccattctttcaatctccaaataaactctgtttggtcatacagtgttattcttcgaaggtacagattcaatatcctaatgttttacacaaaatttcttctttatattgagattgatctagaattttttttgtctagtctgatgcctatataagggttatgcttccttcaataattaaccaagtagtactttattcttttaatgctcaaggaaactaactgttccttgaggatttgacaaaactcacctgtaaaaaccaccttgtgaagggacagttctttgataacttttaattccttccatggtaattggtctattcaggcttttcttcttcagtcaattttgataatttatatttgcctataaaatgatccattccatcaacatgttcaatttattagcacagaataaacccagaattaaaataaaaatgtcagcatataattatattcccatttttgcttctaaatgtgaatgtttattacctttgccagaggtttatttattttattggtcttttaaaggaaccagcttatggatttatgaattctactatttctaattcattaatttctacatttatctatttactttctcttttcttatagttcttttgctatttgttttctagctacttgggctgaatgcttaaatcatttatttctactctatttactacaagtagttaattattactttttctttgtgtgcagctttggcctcatcccataatttttgcatatagwtattgtgaattattattaaatagtctacaagtacatttttaatttccatgttaacttaagatttataatagtcccacatccaaccagatttttctgttttaacaaacttgttaatttccagttttatactgaagtgctattaaataaatgaaaatccaaaagtcatgttttgtgaaaaccggcactgattctattttgacattcaacctaaagaaacacagtacagcaaagacaatttcttcaacaggattatacgcatgcatttttcaagattcttgatttttttctcaaggcttttataaatgtatactgagatactttccctgcaacatctatgcaaagaaaaaactcacactaaacatagtaaggttacatttattaattgtagccctaagcctgta

SEQ ID NO: 701715 - DNA, 3193 bp, Homo sapiens
tttcagatgtgttatacatagttattctaccagctgggtctaagcacttgtggaaaaaaatctatccaaaaaccatgttttaaagacctcaatatacgaatttgaaatagatacttcctcatcctgaatattttctattactcttaattaaatagtaccttaataatatgaccccagaagttgcatattcagaaaaatttagagaaaagagataatgtagaaaattgtaatttttgtactgatcttgcattcatattaaaaaaaagsatttcctgctacatatcacaaatacataaaagaaacataccaaaaaaaagcaaaaaccaaaaacccctttaaagagccagacagttgttatcaaagtcatatattaaatctcatgcacattataagaagtcacattctttatacatatacacacttttaaaaattgtactaaattcacacaaatttggatatttgtgttccctattgattggaagcaccatctagaaaggggagaatgctgatattaatcatcttattcactgcaggttttaggataaattgaaagacagtcagaaaattataaggagaaactgaaaagaacacaggtaaacattcaaacaccttagcaatatatggagaagacatctagacacttgcctagctgcttaatgcatcactgtattttcacttatacctcagtaataatgattaaattattaggaaaattataatcatgttggtttcattttatgtagtcatggagatgtatagtataatttgatgacgtgttaagtaaaatgttcttcattcaaaagtataattttaagttttatttttatcattcaattgtagcattccaagtataatggagaaaataggtgctatactacttttgtaggagtaaagttattgaagcttttgttaaccaaaagagaactttcagaagtaaacgtactcagtctacttaaacctgaggtttaagtagactcacgtatttttacattttttataacttaagaatgatttaacatatacaaataggatcgacgtaaatattcaaaaaacaacgccaagtagtttaaattcacttatttcaataatagtctatctcaaaagatactgtactacaacttgaattttctgattttaaacatgaccaaaataaatatctcagtgcatatttctacagacttttattcagtacctccagaatcaagaaagtatgtaatacatgggcctccattgtcagaacttctaaatttatcttctttctcactttttacaaacagtacagtgtactttttgagactaataggctttaaatgtttccaaaaagatgtagtaaagaaagcaattcaacaaacaatttattaataatctaaagcttattccaagggtttatcccaaataatatttttatatatcaatgtttaagtactgtttttatatatcatgtataatgtgtaccaattataaaaattcaataaaataaaaaatatattctgtagatcatatttctttgggctgcctaggcaaataattttaatttgagtcattgaaatatgcgttagccaaattgctatatttaatgcttaacccatatatatgaaggaaaactgacttctatatttatttataatacctcctagcattatatacatttgttgttgttaatcccagattgcatcaagctacatataggattgaagatttgtttcagaacagtagtacagaaaattatttgcatctccaatattaaatatctaatcatgagcatactaggaatcatattgcatgcttaatgtacaaaactttgtatgtaagtacaattgtactaaattcaataattggattatccgccttttttctcccccacacagtgttcttgtagtgtgtatattcataatatataacaatattagattaaaatttcatgtgacaactacggcttttctatttctcttagaagatatggcatgatacactactcatccaacagtattgtatggtgcttaagaaaagtgatcatctttttactttttatgttagatataattttaccttgggttattttactgtaagtagcatattaaatttttttcaatccaattacagtcattatttttagtgcttaaaatatttacatttatacaattaactacatttttgggttttctgcagtcaccttgtttcaagctctctatttttatcattttcattcatatttagactttctatatgtctatttttatacattatagataattttaagatattatatgatcattttaatttccattagttgaaattacctatagggtttgctataaaagtgtaaacttattatttcttgttccaactttcaaacgctaaataaaattaaaggtataaacgatcataaaaatatttcaataaatttaaattttgactccccactggaggaaaaaaacacacatactaacacaaaatatcttgaatatagaagaccattcactcatatacacagagaacttactgccccgtactaggagttgctactggattattttctccccaggtagttttagagaagatggatttgcataagggaatgattgcaaaaagtaaaatgattgtctttatataaaagtgagtcacatcaaatgaacaaatattcatgttatattaaagacttgcactgtttctctctcctagtattttttaggtctaagcaagacacacttttgctatggatagggagtgagctcataacatcctgacgatgtatatattcatcttcagccaaagttcatgtggccacagctttatgcctgcagagcctgattaatgggcattaagatgttggttttagaaacacatttatcacacttatttttaacatcaaagatagctgttaagttttgcttctctgaatgtggctggcatttcatcacttcatactcatttggtctcagaaactcaaatcctgccaactctagtgttatatgcatatctaaagtagaaaataatttttccagctttatcttttgtagtagtttcatcaaacagataccaaaagcctacagagcattagtcagggacagggtgattagtttctctctttatggatgggtaattaatataaaaaggatggaaaaaatccttaatcccattacacttgatccatcatttagcaatgctttttgactcttcaaggtaaaatctg

SEQ ID NO: 701716 - DNA, 1051 bp, Homo sapiens
acatctgtttctagctaggagactgctctcgggaaacactttggcaaatgttcccctcccacctcgcagccccacccttaggccaacccctcctcaccgcccgctccacgtaaaaagcaagaacaaggggcacgaagtccaggaggtctgtggtcctggctgctggagcccgcgcctggctctcggtgctcagcgctgagtttccatgaggctccccaggtgaggacctgccagagcacagcaacgcggcatgggcaggcacctccaggcctggctggcagcgccctgggagtggtcccctggtacctctgcggcggaaagagggtaacaacaggcttcctatctgaggctaacccctaggtcgacgtaccaggtctccagctgttattctgactgcctccatctccagctgcggtgtgattgctggagcccccgtccttcaccgtcggccctggaaacttcccagtgaaagatacaagaaacagggagaggtggccggcttagtccgatttgtgctgctctaacagaatacctgaaactgggtaatttataaaggaacagatatttatttcttacagttctggagactgggaagtccaagatcaagggcctgcatctggtaagggcctccttgtggtgttatcccatggacgaaggtagaagagcaagagaggaaggaggccgaatttatcctcatgtcaggatcccatcctcaataacgaacccactccctcaggaacagcattcatccactcactagagcagagccctcatctcctaatcacctctcttaaaagtcctgcctctcaacacaattgtgttggggattgagcttccaacacatgaactttggggacacgttcaaaccatggcaatggctgtcctcatgttgaatattaactgagataaagtctatctactagacttgaagaccctgcaggaattaccactaattcatatgtctaaactgcaataaattatagcaggaaataaaatggaatttccaggagctaaaygagaagatcttatgaacacaaagaagaaagcaaca

SEQ ID NO: 701717 - DNA, 1096 bp, Homo sapiens
tgaaaatatgtatacaattcttaataccgcacctggcacatagggaatacaaataaattgtccttattttcctcaattctcaagtctcagctggccccgctgctgggcagatggttcatactagtttcctaggtgctgttgttatattctgaagctcccattttctaaaccacagtcttggaagcagttggttatcatggaaactcatttttggcttattgatacaccaactgggtagaggtgaggtatattatctattatcttagggttcaaaatttaccaaaattacaggcctgtgggtgtgatgtcatgttagcagagacatgctttgcactacaaaaggacatctcagcgtgtagttggaggtgctcattcagcagaccattttgccaaatactgtctaccagttcctgagcctgtggattgtcaataatcatactcttttttttttttttttgagacagagtcttgcactgtcacccaggctggagtgcagtggggcgatctccactcactgcaagctccgccttccgggttcatgccattctcctgcctcagccccctgagtagctgggactacaggcacctgccaccacgccaggctaactttttgtatttttagtagagacagggtttcactgtgttaaccaggatggtctcaatctcctgacctcgtgatacacctgcctcagcctcccaaagtgctgggattacaggggtgagccgccgcacctggccaataatgacactcttaccagccctgtccagtgtcctcaggtttatggacactgaagctcctggacaaaggtctatgaactgatgttggaggtggaacctgcccttggggacccaccagctcaccctgaagctgacaacttcacctctgaggaagggagctttctgtagaacattagtgagacacacccagactggagctctgcctgcctatctccacccagcacacccacagcagagttaaggttctgctggtgcmatgaaacatacttctcagagaagtgctgcctgctcagtacttgtttttgcatcacttatgtgtccagcaggggcaggtggggcatcgcctgcacagagccga

SEQ ID NO: 701718 - DNA, 594 bp, Homo sapiens
aagttccctggatgattctgctgtgtagctagagctgagaaccactaggtagggtatacaccagcagaaaacattaactctcagaatttatgtgagaatggttatatgtcaaagaacatactaaaaaattaaaatttaaggcctgaaaccctcaatcaaaatcccagatgagaccttcagaagctgggcatcctgttttagggtgrctttgagtcagagaaatttcctagtgaaaacatttttaacatacagaatacataggaattgtatctaaatctgatttgcaagggtatggggagtactttgggttgacttgctatggaaagagctatgtaaccaggagaaaattgagaaatcacctcccaaaatgtaaacagccactagacaggagtgaattttaatcttatttatgtaaaattgcagtactttttctctgtaaatgatacatgagtttcaatgcccataaatccccagcccattcggtgggaaacagctctgcaggaggtttaatctagggggcaaagattttcaatttcttatgtcccacccatccttatcctgccctgccccatgagctacaggtgattgggcctt

SEQ ID NO: 701719 - DNA, 569 bp, Homo sapiens
ccaagaagtcaaggcttcagtgagccatgatagcaccactgcactccagcatgggcaatacagcaagaccctgcctcaaaaaaaaaaaaaaaaaaaaaaggaaaaaagaaaattttcccaagagattaaatgaccttctctggatcccacagctatctgagttgctattaacacccagctccttaaaccatggcatgggtggccaaatggcatctggtrgcaaaatgtatttgtcctgtcactccctaagctgcactagattttcatgagaagtaaatgaatacatagcaaaagatgttttcatgcagtttaccatccttagggtaaaattccaagaacaagtcctctactgtgggcttgtgatgcccccatatacggtcacccgagaacatatagaactctctgcactccttttgctgcaatgtgatgacagtgactgtttggcttgtaaagcctaaaatatctaccacctggccctttaagaaaaaatttacccatctgtgacatcagatattacaatactgtacagttagtgtgacaacagaggtaagtgccaagagctatgggag

SEQ ID NO: 701720 - DNA, 618 bp, Homo sapiens
tctatctgtctatctatctatctgtcatctatccatccatctacctatttatctatccatcctatttgttgtgtgtctctggagaaccttgactaattcaaacttcaatttacatccctgtagcagccactctctattagatatcattgggtctttccccagacatgtgcagcctagccttcaaccaataacccaaggaagacccacacrgactttcccctacctacttcacagccagtcaactttattctctctaatgccctttgttctctctgatgctctcagcttacatttcatctccttgcattgtggtcagaaaaatgctgccaagcaaagagccagggtgaatatgggttaaagcttacaaatcttaggggtttccttttgccaaggagtgtatatatatatatatatatatatatatatatatatataataatatatgtaatataaatatatatgataatataaatatatgtatgtatcaaggacccatatttttgttatcttttccttctgccattttcctatgtgttatgttttcaaccttagtttgttgtctcatggttgcaaggtggctgccactgctccagacatcacatcctcacataggtgttt

SEQ ID NO: 701721 - DNA, 583 bp, Homo sapiens
tcaatccaccattctttggagacccagctgaaatgccacctcttccatgatgccattcacaatatttccaattgcaactgatctctattatctctgttctcctattgtacctaccatgctccattgtaggatatttagtggcaaatgtatttmgattccgttttactcagttgtgtatccttacattgccttctagagggatggcagatacacagcacagaagccacaaatccctatttgtgagcccatggaagatattactatatgattacaatatgattttctactaagcctaaatgtacatcaaggcatctcaggacattattaattgattaacaactgcttctggcagttattactagtggattacatgaaatccacattctatctctagctacatttatggccttgttcataatcaaagcttaatgctttggttagttgaagtgaatttcactacatagattccatgattggtttccaccaatgactacatttatttgggagatggtagaaatctagaggattataatgctatagcattacagcatgtggcggagcaaaccacatggaagaaatgcgc

SEQ ID NO: 701722 - DNA, 819 bp, Homo sapiens
caaagttgctagctaatcagcctctatcccttctggtacacatatttgagtgagtacacgggtcacccacccattgggctacagctttctgactcaagcccagctttccccgtaacctctatctcctccagacttttctgctcaaatggtgctgattctgacataggggaaggtactgttactgttgtttgctgcatcctctcaacagataatgggttgaacattgtcgaacacaacttattaccttctcccgtcttgtagtagagtttaaggatattgcatgcaagagctgctattccattcaacttctcaagcagatcttaaacacattcatttttcccatatacatgctgccttccctctaagttcatacaccattctatcttgcctggaactctaaaatagcctcacaaaatgagctctctcctcccacttttgcttctgttccaaccarttgtcatcttggccagtttgattttttttttaaagcaatcctgaccataatccatgcttagaattcctcaatgcacctctagactcttgtaataaaatacaaactcaagaacactgcctacatggccctgtatgaacttgcctctccccatctctccattcccaccacatacacctctcctcccctctttatatgtcatagctattgctggcatctttcagatcttcaaataagcctacctccttcctttctcagggggctttgcacatgctgctcctttttcctaaaatgtccttgccccaactcttaacctgcttgagtctgattccctttttaggtttcaattcaactgttgcttcctcaga

SEQ ID NO: 701723 - DNA, 637 bp, Homo sapiens
tcaagaagacttgcagctgatctacatctatgtatagctgtagctgattcatatcttgtatagcacatgcatggttagttttctgcatgyacacacatatatgtttcttttcctgctgagccaatcatttctatttaagtacccatcactgtatccatattagttcctgggccatacaaaagaaccacaaacttattctcttacagttctggagaccagaagtctgacattaggtgtcagctgagtttgttcctctggaggctctgaggatgaattagcctcctttcctctttcctggcttctggtgtttgtggtaatccctgacatccttgggttgtaattgcaccactccaatctctgtatccatcttcacattgcatttctctctgggtctgtgtgtctcaaatctcttataaagccaccaatcattagatttatggcctactctaaatctaggataatctcgtcctgagattcttaactcaattttatccacaaagatcctacgttcaaataaggtcactttgggaggtgctgaagcttaggactcagacatatctttttggatgacactgtttaacccgctgcaatgtccagacgggacttagcttcccatctttggttagagatgatttat

SEQ ID NO: 701724 - DNA, 668 bp, Homo sapiens
gaagattctattctatggagtatcaatcacataatacattctactttcattggtccaaaagcaaggacacrtagattttccacctggcattattcttcccattaggcctatttcttctcttcagtcacttatgggtagctttgatttcttcccttcagcttctctcccacctggcatgtggctgccacacacggggcagggaagggtcgggggaggggtgaatgggcagtgtggaatggggctggaggaaagaagagtagatagctgggtgttgtttttgctctaatattattgtctagccaatatccaagatgctgtccctctctcgttgctgtgtactctttgctctttaacttagaagtgtttattatgataagctgtgagcagatggactgaagtgaggagagaaatttgacccaagaagatgtcacttaaacagctgaggctagtatttcaccagatgtccaagcggctaacccattgagagctttatgaagagcagtagcaattttttcatttgctgaactcttaattactaatttttctaattagttaatggtagcaagtatttgcaaattataaagcatattttatattttaaaacattcatatttagtatcctctttgatgcattcatcaatccagagagataatctgcctcggatgat

SEQ ID NO: 701725 - DNA, 668 bp, Homo sapiens
gaagattctattctatggagtatcaatcacataatacattctactttcattggtccaaaagcaaggacacatagattttccacctggcattattcttcccattaggcctatttcttctcttcagtcacttatgggtagctttgatttcttcccttcagcttctctcccacctggcatgtggctgccacacacggggcagggaagggtcggggsaggggtgaatgggcagtgtggaatggggctggaggaaagaagagtagatagctgggtgttgtttttgctctaatattattgtctagccaatatccaagatgctgtccctctctcgttgctgtgtactctttgctctttaacttagaagtgtttattatgataagctgtgagcagatggactgaagtgaggagagaaatttgacccaagaagatgtcacttaaacagctgaggctagtatttcaccagatgtccaagcggctaacccattgagagctttatgaagagcagtagcaattttttcatttgctgaactcttaattactaatttttctaattagttaatggtagcaagtatttgcaaattataaagcatattttatattttaaaacattcatatttagtatcctctttgatgcattcatcaatccagagagataatctgcctcggatgat

SEQ ID NO: 701726 - DNA, 2480 bp, Homo sapiens
ctgaattccctaagaaacagacattttcacacaggaaggtgttttgatagcttttctttctttggaagtcacgacgtacatgtgagttttaagggttccttattcagcagggaaagaaaacctaagatgggatgataacaatgtgaattataccctatttaaatgatttctgcctttctattttttccttttttttttttttgcactttatcagaagcaagcatgattcaaattataatattggcagaacaaatttgtagtttctaaagaagatattgtcacatctgcaccactattgagctgcataatgttgcccaagctcctcaatctctcttagacctaggccagagggactcttgtcctgggccatggactttagagggcacatgacaaaccccaaaatgcagggttttttcttttcaatcttaaatagaagttttgtttgttttcttaatttaataactgactaagccaatgggagggactcacctgaacttggactccagaccggagggtgctgaactgagagcccatgagagaatgaaccacagcctctgtccttggaaaccaagacgaaataggtgtttagtgttgaagtagacaggatcccccagataactctgttgtctcccttctccttgttcagaggatgtaatctgagaggcacttagaacccctggaaggcctgagtcagacaagtggggcctggaagtgaagaatctgccttacttgcctccctggggagcttgagcaggtcattaccacctgctcaggtttggtgagcccaggagtcttgggcgtggttccaactcccacctagccctgccccagcagatcagtgctgccacacagcctctttagtctgcagggctggcccaggggagactgaagctccaggcagagggctgcagggcccaggagagaaggcaggcatagcttaattggaccattggcatacttagatatttggtctgcgggtctctgttagcacttctccaggccccagcaatgctagagcaacttgcttctagttccttctctaaaaataacaggactcaattaaattgctctacagtttggacctgctctacaaaatcattatattttcatttaagtaccttaagataaagtgacataaaaattgcaattcaagatgtcagaaaaaaataataaactaaaatttatttttccagagttatttcaagaagaaagctttaaatgaattacagcttctggcttgccctttcctacctctcaggttgcatgccctataaaaaggatgtcattaagtaaaactatggtttgaaatgcataaggatccgcacacataaaataccacaaatactacactgtaaaattctccatgtggcataagaatcacagtttatcacactctaatgatcaactggcaattaatccttaaccacctcccagcactgaagatcctttctaaaatatacaaagggaaaaaattatgaagagattaccctaagactcagcatccaaacaataactttataaagaataaacgagccaggcatggtggctcatgcctgtaatcctagcactttcggaggccgaggcgggcaggttgcctgagctcaggagtttgcgaccagcgtgggcaacatggtgaaaccctgtcacaaaaaattagccaggcatggtggcatgcgcctgttgtcccagctactctggaggctaaggcaggagaattgcttgaacccaggtggcagaggttgcagtgggccgagatcccaccactgcactccagcctgggcgacagagtgagtctctgtctgaaaaaataaaataaaataaaaagaagataaaaagaataaacgaaagccatgctaaaagcagatraagactagaaacactgagaagtatttactattattacttgggagcattaacttagaagtacctagagatgtcaactgtgaaatactaatctgagttttaatttttctcatttttatactaattacaaagacagatgtgcttactacgcgcactgcttaaacaagtatagtaaaagaaacagctttcccccttctgatcggaggcataaataatatttctgtagtatgttctattcccatatatcacagaactggctgaaatgtatctctggcttccataaatcataagtacagttaagcagaacctcctcctccaatgtagaaaacaaacatagagcaatgaaatctagagttacacaatatttgagtgtgagtttcttcatagtccattttaattgatttatacagacaggaaagagggggaacattaaaccttttacaaaccttcccgagtttgcctaattaggccagtcctgcataaagagcttcatagttttggaaaatccaagagcaatgaaataaaaatgagataaattaggggaaaacacacatattctaacacctgttcttaaatcctgtgcttctaacaaagggaaagttataagtaatggacac

SEQ ID NO: 701727 - DNA, 585 bp, Homo sapiens
aggcaaacactgattttttaattaactgcctcgagggggtcctgccaaaagtgcaggcttggagcaagaggctggggaggggcacagaagctctgggaagagctggtgagggctcagttcatgctccaaagggggacagctgacacttctagatcaggggctgtggggcttgtattaagattttctgtctgtgcatttcaaagtaagttttgttcctgcttctacctatcagcagacaggagcagaatctgggggatttggagctccagagcctgttctctgtccactagagtcagtagagccacgctrgaaaagctcctgggtttcaacctggacatccttgtgcaacaccttcctcttcagaatccctccctgcacacatatgcacacgcacactcacacacacatgcacaggcacatgcaagtccttccttccagacaaaacaatctgttatcagtcatttacacccacttgtcctcacaagccaccactttcatctcccaggagagctctcatctctgtgcaattagatttgaggcccaggaagcaaccctgtaattggtgaggcaggacaagattcccct

SEQ ID NO: 701728 - DNA, 585 bp, Homo sapiens
aggcaaacactgattttttaattaactgcctcgagggggtcctgccaaaagtgcaggcttggagcaagaggctggggaggggcacagaagctctgggaagagctggtgagggctcagttcatgctccaaagggggacagctgacacttctagatcaggggctgtggggcttgtattaagattttctgtctgtgcatttcaaagtaagttttgttcctgcttctacctatcagcagacaggagcagaatctgggggatttggagctccagagcctgttctctgtccactagagtcagtagagccacgctagaaaagctcctgggtttcaacctggacatccttgtgcaacaccttcctcytcagaatccctccctgcacacatatgcacacgcacactcacacacacatgcacaggcacatgcaagtccttccttccagacaaaacaatctgttatcagtcatttacacccacttgtcctcacaagccaccactttcatctcccaggagagctctcatctctgtgcaattagatttgaggcccaggaagcaaccctgtaattggtgaggcaggacaagattcccct

SEQ ID NO: 701729 - DNA, 794 bp, Homo sapiens
tatcttccagcctccctgccgcttagaaaaatattcatattaaattcttttagcgctatccttgtttccaccacttgatggcaataaagaccccttaaatactgaakgttcatttttctttttggaaagttggaaggtctgtttgaaaaattcagcagtctactcctttatccatactttccagtttcatcctgttcaagatgctgagtgttcttctggaagtagaatgccccaaccattccctgggtcgatcgcctttgcaggaattcacggaatgatactttctccttgatttttctaataaatttagtaattttctaccgccaatccccacccgtccacaataaactaaaacttctcggatttttttcttaaaatagctccgaactaccaactcattgctgtttggccctatcccatccacacaggtaactcctatgacctgtatctatagtccaccgcaggttttgagacactgacactttgtaaaatacagctccagctgggcgcgctggctcatgcctgtaatcccagcacttcaggaggccgaggcgggcagatcacctaaggtcaggagttcaagacctgacctacatggcgaaacccggtatctactaaaaatacaaaaattagccgggcatggtggtggacacctgtaatcccaactacctgagaggctgaggcaggagaatcgcttgaacccgggaggcagaggttacagtgagctgagatcacgccatttctctccagcctgggcgacagagcaagactctgtctcaaaaataaataaataa

SEQ ID NO: 701730 - DNA, 1151 bp, Homo sapiens
ttaggtaatgtgtgcaccaaaatatcagaaatcaccactaaagaacttacccatataatgaaacaccacctgtttcccccaaaacctattgaaataataaaaaagaagaggttgtgcaaataagaggtcctaaaggttaagctccatacatttaaatgtgaattcacctcttggtgagaaggtctagttctgtaaatggacgtcatcaggtagtggaggattttaaagccataggaatgaatgaagtcacctataaagtggatataaataaaagagcccctgaatcctgggagaatcctgtgtttcaagatttagtgtgatcagaaatggagattgagaaatgaccactgagatatactygataaaataatgggactttctctatacatttacctcatgcttgctctcctataggctgctatttatttttattacaccttttaatctactacaggatggagagtctctgatcatttgactttcaacatctgtatttaaaaactaggagtagcatcaaactaactcagtttaaaatgaaattcagcattaaatcagcagtataaggaggaaaaaaactgtctataggtcaagagattaaatcttaacttctacccctgtcaccaatttgttaaatcacttgctcaaggtcacataaattctcaagacctttctgtgtgcatcaataaaatgaagaaatatattattttctctagagtcctttctgactctgccatttggcctaggcattccatcttgaggtgggctgggcctcaggactagatcacatcagtttccaggatatgtgtttaattgcattcattgatttaagtatacatttcaaattccctatttgctttacattgattaagatgtgatacaattgagggtaataaataaatgaaatatgaaaccttcaaaggatgtttggcaacaaaatggaatgactgtagttgaggagctcaaagtcaagtgtgggaagtattgtttaatgcccttataaatctcccctttattaaagggatttaattaatcaaagattttaggtaataaataatttaatcataaagaaacaaactgtattagttttttagggctgctgtaacaaagtaccacaaaggaagtggcttaaacaacagaaatggcccatctcc

SEQ ID NO: 701731 - DNA, 1208 bp, Homo sapiens
ggcaacgtcctcatcgacaagaagaggctagagaagatcytgctcctgagttacgtctgcaacacgcaggcaggtgagcctcagcctccccttgtcaatgccctcccaggacctggcccaacctaagccaagggtccaggctctcccacccagcccctcctccccaaccccctcttcgccacagagtaccagcagggcttccatgagatgatgatgctcttccagctgatggtggagcacgaccacgagaccttctggcttttccagttcttcctgcagaaaacggtgagggcaaggcctgagctcagggacgcccctccccaaccccccactactccccaaacaactctttgaggatgggcaggcattggccaccccagccattccttccaggcttctgggtctcagaggagcctgggagggtgacgctaaacccagtggttcaaagtagtggtggtggggaggcactgaagtggagaagggggatggagcaaagctctgggtccacctctcaacaaaccttgaaagagcatggctggccaggcccagggaaggtgccctctcctggcattttcttccccaagcacggttctcctccctcctcgctgcttcttcctcaatggctccctgtggcctccagaataaaatccaataaccttagccagtcattcagggctgttcccttcacataacctgaattccaggcacaccaggggactcaatagtccccaggggctccctcactgtccaagttgaggggttttgaaggtgcagctccctggaacacctccctggaaagcctttcctcatgatctgcgagaggctgcccagaaccctccctcatccctccctccaccccaccatccctgcacatgtgcttgctgcccttcccttgtcccagttggctctgccccaacactattgtgtgagggaagaactgggcaactgggctcactagactgtgagccacagttgagaatctctactacacacacatacacacacacacacacacacacacactacacagccacccagaggcgtacaacatatacagacaaacttgcatacacagatcacagtcacatagatatgtatgcacacactcacacacacacactcagactcatagagacatgggcccagcgcacagacagacacacagagcctccagaagtgaagctgggggaagcagagttgactcttcc

SEQ ID NO: 701732 - DNA, 621 bp, Homo sapiens
  misc_feature 3, 4, 5, 6, 7, 8, 9, 10, 11, 12, 13, 14, 15, 16, 17, 18,19, 20, 21, 22, 23, 24, 25, 26, 27, 28, 29, 30, 31, 32,33, 34, 35, 36, 37, 38, 39, 40, 41, 42, 43, 44, 45, 46,47, 48, 49, 50, 51, 52, 53, 54, 55, 56, 57, 58, 59, 60,61, 62: n = A,T,C or G
  misc_feature 63, 64, 65, 66, 67, 68, 69, 70, 71, 72, 73, 74, 75, 76, 77,78, 79, 80, 81, 82, 83, 84, 85, 86, 87, 88, 89, 90, 91,92, 93, 94, 95, 96, 97, 98, 99, 100, 101, 102: n = A,T,C or G
cannnnnnnnnnnnnnnnnnnnnnnnnnnnnnnnnnnnnnnnnnnnnnnnnnnnnnnnnnnnnnnnnnnnnnnnnnnnnnnnnnnnnnnnnnnnnnnnnnnngaaatgagtcagcacagcccctcattatacagatgggaaactgaggctcggaggggggcaagcccctggcaaatgttgcagggcaaggtagggactgaaaacaggtctttgaatttcaatgtgggttttttacatagtaccatgtctcattgttctraaatcagtagatggaaagtttgttcatctttattcattgccccctccccaggatacttttgggtacccggctagtgctgaggcttggggagacccaggattacgtgagagccactctctcagttgggccttcctccctacttagtgttcaggagccacggcatgggttggtaactatgaaaggggatgtgctgcaataaagctaccagcagagcaaagggggatacaggaagacaggagacagaaggggagggattttactcacttataccttacttcattcccaaaagattgatggtggcagagaggctgtgaacctacaaaggtttcagggtatgagctggtcttaaagagtgaacagga

SEQ ID NO: 701733 - DNA, 2292 bp, Homo sapiens
tatgcagcagtcttcttacatgtgtcaaccaactaaaagttttaccaactctatgaggcacacattggtacaattatcaccaagttaaaatgcataaacttgggcccagatgaatgaatgcttttctcaaggtcacataaaaaattaactgttggtgtcagcattctcttctcattctttctcatgcaaagaccacatttgttccacctcacactgggaaaagtgaagagatgagttggatgactagacatttgttctgtcagaaaagtaagcattattgggctttgaacataatacactctgtcctttcatttctgtcacaaaggattgtccctaagcctcaaaggacacaagtaaactctctgaaacctgaagtagttggtctcaatctattctttggcatcaagcaagtgcaagggtcaaagataaaaactgtattgcttgcttcttggatgccacagtccgaaatacctctaaccaaatgtaagtcacacccaggacatgacaagaatctttaatagtggcccaagatttagctatggctttggagttctacagtcattcttgctcataccagttagaagctcatgcactctgaaatggctttgtttggttttggagcaatagtcagcaaactatggcacaggatgaaatccagtcctccacttgcttttgtaaataaaacattattagaacatagctacacccatctatttacatatcatctgtagctgcttttgctctacaaggcagagttgactatttgcatcagagactgtttagtccacaaagcgatactgtctggctctttatatraaaatgttttcaagccctgttttatgaattaggaagaaagggctttctaagtctttctcactacaaagtttatttctcagaatcaaccagaatgaactgtccagggctgaggtagctgtgctgactccaagaggtggtgcagttgtacagaacatggactctgaacattagacaaacctgagttcaaattttaacaactatctggctgtgcactcagaaaagtcacttaactactctgagtttcctcgtctgtgaagtgcccattagaattctgaccttgcaggacctctgaagattaaattgcatgggatatttgtagcaccttgcccagtgtcaggcacatagtagtattcactccgtgatattttatatataattctcaaaggactgcatgcccacataatgaagacctcagttaaactgacattttgtgggtatgcacgctggagctcactatccctgggctgttccagcatgacagattcctctttacatcccagtgataagtgacccacaggaggctgtgtcttcatgctctaagaatagaatggaaaaccacgctcatttcaaaaaaggagcagaaccccctcttatttccctttcctggtttctcttcctcatgccagaacttgttatcctgcaggcatttcaacctgctcactctgagaaataaaaaatgcaccaggcaattgctaattgctgatagctctctccctattgatctctccatttggctcaaacatctcagattactgagtgatcacagttgagataggtcaggacaaagaggccctgcttaaatatttctatggaagaatgacagagtgtctgcaggaaaaaaaggtagaaatgcatttcaagaggcaaggaccttcaagttaagagttttgtaacatatttaaagcatggggcaggggtggtggggaggtgatccatcagcaaaatggaaagggaaggacttggaagaacctgcaaagggaaggaagcccttggaggtggaggccttagaataagatcagaagtttgatatgaggtaaaattacttcttttcttggatatgacctttttgtcaaatggtattctgctaatgtatttgtcagggttttagtttaagcagaaagaaatttattaagggcaattagttacagaatgtcttggaggttcatgcagctaaagcttgggtcctgcccagctgtaagcaatgcagccaggagaaatggccgaccacttggtacagatgttgcaattgaaatcctgaggctgtcactgcagtcccttggtatccattagactgcagaccatagaacagaaattcagtttcaatatctacaggaaaacagaacaaaacaacaaaaacaaccgattccaccacatttatctttgccttcaaaatctcgagtgacagagttggcttggtaacagtcagattacctgtggaactctgactactaaggagtctgggaaatttagacttta

SEQ ID NO: 701734 - DNA, 1247 bp, Homo sapiens
tgaggtattcagttgtgtttaatgcttaattcttagctattgcttaaataagtatcaacttttaaaaaacatgattagctatataagtgaagctcagatttttgaatctattttttaaagaatgcaatactgctcagaggtgaaccctgagaatctatggaactagatagcctaaacttaacctccggtcatcactctagtagcaaatgcaggcattctgatcatgtgttcatggcaccagggacagagacgaatgggcctttgtctggtgtcattataaattattctaaaataagtaaagccaagctagggaaagacagactttttccctctttgcttgtttgaatttcactttctctaagaacttcaacattaagaagaactttattattaaatttcttaaataataaatgctgaggaggcatgttacccaaaggatggatttagtttcaggaggtagcaaatatttcagaggcaaacagtcaaagaattctattccttgaactgaaggaaataatatagcatttattgagcttcagttttatatttgttatctcatttgacttatttctttcaacactttcccatggatttattaatattcctatcttatagtagagaaaactgagatttgcttctgaggcttttttctaagatcacacagttcaccagactaagaacagagattttaaaagtcagattttctgatgcgatgaccagaactacttcctcttcttgttgttcttactggtagcattctgtaaagcatgccaccatctctctgataatacaagacatcacaatcgagaagtcaaacaatcttatgttctattcaaatgtgaaaatttgcataactcaacctttttggattttattttccttgattaaaccatgaaaaccgtgagttgagtagaatcagacagagctacacagagatgaaaaaagggccttcttagattgctttcatttatacagaaagaactcatcactgcaaggtgtctgccctgatcatgttgcttcaagccagccatatcctcaatcattgctccacagtgaatctagtcaatgtgggaacattgcatwacagctgatgggaatagtcttagaccctgctgatttgctcgcaaattttattcagtctaactttacacctttggcatttttctccaatttagttttactccaaatttctggacacaaacatctccatacccttcccattgcatataacatagtttaacataaca

SEQ ID NO: 701735 - DNA, 1178 bp, Homo sapiens
taagtgaattgagtaaatccaaactaatttttatatacttgggggttaaatgtgaaacatttctcacaagacataagaaaaactcaccctgacacttcataccagcagaatccagtgtttgttgtgttgagcacacatcacatttgttagtattttagctgtgttaacagaacagaatatyagggcagtggtcattcactaaatcgctaaatcactttgtgttgatatatgcctatcagcaaaggctcaggacagccctttttacattaaagaaaaactcaacaaaatcaattagtgactctctttcttaataaatgccttttaaaaaattgttagtgtaccaaataaaattagcaataaaaattatttttaaaatagccttgagttcttctgaatctcaacattttctccttcactcaggagtcccatttcgtggtatgctgtttggaggagattttcacaagtgatgataacctgtttttcttccaactctgactttggaaaacatcgtaaaagataaagaagttgtaatacaacatggatgaaccctgaaaacattatgccaaatgaaagaagccattcacaaaagatcatatattgtatgattccatttatatgaaatgttcagaatagacaaatccacagagacagaaagtagattagtcatccccagagtctagaataggggagggggagagattgctaatgagtacagggtttcttttttggggtgatgaaaatgttctaaaattaggttatggtaaaagctgtacagctctgagaatatattcaaagtcactgaattatacactttgggtagattttatgatatgtgaattatatctcaataaagctgttaaagttttagtataccactttagaatagtaaatatgttacatgtggactaaatcattagcctagcttcattttaatagaatgtaatatccacactgtaatatgtgaatctatacagctctaaaagatgactgtttaagacatttgtgtcttcttcaaccacatgatcagcagagttaaaaatgcacttgttcagcaaagatttgtggatttttctagtgtatactgggtactgtctcatatgttgtttaatttgtttgtttgttgttgctattgtttttgagatgggcttactttgtctcccaggctgtaatgcagtgtg

SEQ ID NO: 701736 - DNA, 1451 bp, Homo sapiens
tcctttaataaaatggtgagaagtacccaacaaggtgatttctttgactatgtctgcgccaaagttctaaaattatagaagtttcattaggttgttcacgtctactgcttcagatcccagagctgaggagagtggtcccagcagacccagcctgctggtgaggggcttagcaccgggatgcctgtcagccagtcactcgcgaagaccccttgggctgctggcagctctgggtgcaacagtttctcagttgctagagcaacatgtgaagtcactaactccggttccaagaaatacactgcacacggcaaaaggcatccagaacaagagcccactgagaaatgccaatcttatggctgagagctgggcacaaaaacggagcagggtgcccacacccgagcagggacttggcagcttggacaaactgcactgagttgtatttccatctgttgaaacatggtgagccccatgaacacgagagccctgtgagcagctggaagaaagcaaaggaggcatgaggcactctcgcgaaggcgcacacagcgggcctgccccggygcagtgactgcgggatgcttgtgtgtggacggggcatgtgcagaggcccgagtccagagccccagcccttcgctcagggcagaggccaggaaacaggacaccaacccattaatcccacgccctcatgaccaagcattgtaggttccaggaacgcaaacagctttcactgctgagaaagttctgaggtctatataatcagaggaacattcggggtaaaagccaggccccaaggctctgcaccccaggatgacggcagcagaaggggtggcgtcctgcagctgaggagccagggcagggcgtggggagaaagactaggttctagttcagatcctcccggcctggctcagctgtgaacctcgggtaccacggggcctctcccttgagctgcccaagttagaacggaaggtatgttgctgtccagggaaaaatacgtcttccccaccctccaaagggaatgcatctgctcctcttccagaattccaaagcatcaccaaaccttcatagagttcaggacccacacgaaacaggcaccagccctgcgtggggcttctggctgggttcaggggacaagatacagccccacagcttcccctttctaggcctttaccatccctggctgacactgagcaccaggcattgtggtcactcatgtacttacaccgtcgaagccacccccaacacagggcctgtggctgcatcctcgctctagaggtgagaagactggggtgcagagacagcgtcttggtcaagggcatacggctcaccagtaaagagaaaaatgcaaacccaggcagcctgagctctcagccccctcccctgcgataccactaggcctcccagtgaggccagagaccatggtattgcacacaaatttcagaaagcacaaatcctacaga

SEQ ID NO: 701737 - DNA, 1120 bp, Homo sapiens
ggttcagtttttgtattttgtttgcttttgtttttaatctcaggatttgttagtgagatcatcttgatattttcctctaaaaagtcatcatgaatttatccatactctgcagccttcgaaaagtacgtttttaaaaataacattacgagctttactaaaatgcttaccataaaatagtttaaaaagcatcattctaaaaaatatcatagtatgattccaaattcataaactatttccatatacataaatataaatatagccaaatatagatggaaataaaattaaatggtaaccaatttatatccctgtggctatttggctctacaggtagatcaatgctttatgttttatcttttccaatatctaaatctgttacagtcggaaaaaaaagttatttaaaaattgctaagattagctgggtatggtggcatggacctgtaataccagctactcgtggggctaagacaggaggatcacttgagcccaagagttataatgctgcagtgagctgcaatcacaccatggcaccacactcgtgggtgacagagcgagaccctagccccataaaaaataaaattaaaaataaacaaactgctaagaatgtactatatcacttattttaacacagtgagtaaccaaatgagaagaattcagatgctgagggtagaggagacccaagtttctctattttgttcaaaaccagctacagtagaggagaaactaggacacttggagggggaggaataaattgaacacaacgaagataacatgacayaggcaaaaatctttacataacacaggcaaggtttggtgataacaacataggcttgaatttcctcacatggtcttaaatccctcctaactcgcgttagctttttcttccaatgccttacaaatgtgtggtttacatgcttcataaggtcctacaatcaactcactataacaaaacatctgaaaggcaaattgtttcatcaagaagggggaaaggtctcctgcatctttaaatgccattcagtaaacacaatacgatgtacctcttctgctcaaagcatttgaaaagaccccaagatttgtatcctcaaaacatttagaatctggcagctacagacagttcctaatt

SEQ ID NO: 701738 - DNA, 404 bp, Homo sapiens
tacatagtggatagctaactaacctcaccatcttattatgtttatttctcagaaaactaaaaatagaacatgtgattttcataatttagagaatgattttttaatcctaaatttagatagaaaaattactttgaaaaaatatcttttctagttagagattcaaccagytactttaaaagggaatttatttattaatcaattaaaaatgtgaatgtataatttaaaaatattcagcaacatactaggcaatataagaaatataagctgtagttagggccaggtgcagtggctcacgcctgtgatcccagcactttgggaaactgggatgggtggaccacatgaggtcaggagtttgagaccagctcagccaacatggtaaaaccccgtctctactaaaaatacaa

SEQ ID NO: 701739 - DNA, 612 bp, Homo sapiens
cacctgtttatcttagcagggtctgcagagagagggagatagattccccattaactctcattcagaggagagtttagaaaagagagtgtatggtgaccttctctgytctctggaagggcactggcgccaggtagaagggcccgctatttgtgtctacaaacaaaaagtcttcctaaatttctcacttttcttgttgagcccgtttgtagaattctttcaattcacatagctgaattgtctacaatcataaaatgctaatatgatacgtttccagaaacatattttaaggcttgtaattttttaaaaaatgaaaaccatctttcagtttgggttcccatttgatgcagttgcagatgagaaatgtctttctcatccttcctagtagattaggcaacctagttgggggatgggacgtgatgtatttgtctcccccaaaggaatgtttaatgatcctcctccttttaagatattattaagtcaagttagtaataagtaggaaataagtaaaattatctttttaactttaaacagaaacagttattttaatacaacttgatatatataaataataaaatatatataatatatgttatacatatatatatatatata

SEQ ID NO: 701740 - DNA, 643 bp, Homo sapiens
gcctaattccctggcttgaacctccagtataatgctgaacagatctggtgacattcttgtcttgtttgtgatcttaggggaaaagcctgcagtatttcaccataaagtacaatgttagctgtgggttttttagagatgtcctttatcaggttcagcaagtttccttttatttctagtttgctgagtgtttgttaccatgaaagggcacgkggttttgtcaaatgtattttctgtatcccttgaaaagattatgttttcttctctctttactgtattaatgtggtatatcacattgattgatttttgcgtgtcgaaccaaccttgccttccttgcattcagtgccacctgatcacagagtctaatcctcttgtagatgctctctggctgtaacatctgctgggatatactggatatgctaagccagacaacagtctggtaaaggaagaaaacagaagacctgggtctaaagaagtgaggaatgaagtccagggacttggattaacacagtgagttcacaggcaagattgtggacttttatttttactacttagtgcagaccagagtgtctcaaactttaatgtgcataagaattacctagagagttaaaacacaccactggaccctaccccctagggatgctga

SEQ ID NO: 701741 - DNA, 643 bp, Homo sapiens
gcctaattccctggcttgaacctccagtataatgctgaacagatctggtgacattcttgtcttgtttgtgatcttaggggaaaagcctgcagtatttcaccataaagtacaatgttagctgtgggttttttagagatgtcctttatcaggttcagcaagtttccttttatttctagtttgctgagtgtttgttaccatgaaagggcacgtggttttgtcaaatgtattttctgyatcccttgaaaagattatgttttcttctctctttactgtattaatgtggtatatcacattgattgatttttgcgtgtcgaaccaaccttgccttccttgcattcagtgccacctgatcacagagtctaatcctcttgtagatgctctctggctgtaacatctgctgggatatactggatatgctaagccagacaacagtctggtaaaggaagaaaacagaagacctgggtctaaagaagtgaggaatgaagtccagggacttggattaacacagtgagttcacaggcaagattgtggacttttatttttactacttagtgcagaccagagtgtctcaaactttaatgtgcataagaattacctagagagttaaaacacaccactggaccctaccccctagggatgctga

SEQ ID NO: 701742 - DNA, 643 bp, Homo sapiens
gcctaattccctggcttgaacctccagtataatgctgaacagatctggtgacattcttgtcttgtttgtgatcttaggggaaaagcctgcagtatttcaccataaagtacaatgttagctgtgggttttttagagatgtcctttatcaggttcagcaagtttccttttatttctagtttgctgagtgtttgttaccatgaaagggcacgtggttttgtcaaatgtattttctgtatcccttgaaaagattatgttttcttctctctttactgtattaatgtggtatatcacattgattgatttttgcgtgtcgaaccaaccttgccttccttgcattcagtgccacctgatcacagagtctaatcctcttgtagatgctctctggctgtaayatctgctgggatatactggatatgctaagccagacaacagtctggtaaaggaagaaaacagaagacctgggtctaaagaagtgaggaatgaagtccagggacttggattaacacagtgagttcacaggcaagattgtggacttttatttttactacttagtgcagaccagagtgtctcaaactttaatgtgcataagaattacctagagagttaaaacacaccactggaccctaccccctagggatgctga

SEQ ID NO: 701743 - DNA, 643 bp, Homo sapiens
gcctaattccctggcttgaacctccagtataatgctgaacagatctggtgacattcttgtcttgtttgtgatcttaggggaaaagcctgcagtatttcaccataaagtacaatgttagctgtgggttttttagagatgtcctttatcaggttcagcaagtttccttttatttctagtttgctgagtgtttgttaccatgaaagggcacgtggttttgtcaaatgtattttctgtatcccttgaaaagattatgttttcttctctctttactgtattaatgtggtatatcacattgattgatttttgcgtgtcgaaccaaccttgccttccttgcattcagtgccacctgatcacagagtctaatcctcttgtagatgctctctggctgtaacatctgctgggatatactggatatgctaagccagacaacagtctggtaaaggaagaaaacagaagacctgggtctaaagaagtgaggaatgaagtccagggacttggattaacacagtgagttcacaggcaagattgtggacttttatttttactacttagkgcagaccagagtgtctcaaactttaatgtgcataagaattacctagagagttaaaacacaccactggaccctaccccctagggatgctga

SEQ ID NO: 701744 - DNA, 987 bp, Homo sapiens
ttcttagggaagattttttttgtttctacctccaacttagactcagggttggagatagttgattttctagtagttaaccagagagtaagtgcattctaatttgctcttaggctaaaggtgtaatgaaaatcacaggttttggtgggtgggcagatacactggccttatggtgggacattggctttgaactttgtccagcactccgtgtggccttgaaaactgaatcacgccttcaccctttcggcaagtgtcctctgggtgatggctgatttaattgctctatttacctctcttagcttctctctagagtgtggttggcctctggtggtctttatattcttaaagggttaccgatgcaattaaaaagatggtttctgtttatttctaggaaaattcctctaaaaattgaaaagtggtggtattttatttgctttcatcactgaggtcggtcaggaagcatggctgctggaaaggagtctccagtagcagatgatggacaaggccaggcaggggagggcacagccwcgggtcttcctctgccttgcaccccacgcgagactcactttccattctgtttcacgctttatcactgaacttgccaagtccagatgatgcttactgggcttgcatattttgtttggcaattagactatacccagttatgatgtggtttccaagattaaacagttgctaacccaaataagcaattccaggatggatattgatgtcactcactgaagtaagccaggcatgaagagaagacttcgattttgaagtttgagatggcttcatttgacatgtccaagtgaagatgtaaactctgctgctggtgtgggctcacaggagaaatatgggctagaaacataaatgtgcaacaatttggggcaacaataagaaaaatagatattttacattgtcagctagatacagctgtctgccgttagtggagaagagtgaatgttagctgaaattcacaaagaagacttc

SEQ ID NO: 701745 - DNA, 1321 bp, Homo sapiens
cccgagagagcttgagaatgttggacagcagagtattccaagaggaggaccacagggagacgcactggagtgctcacagctcagcacattcaaggaatagagaggacatgacacatgcaggaaagagargcatgggcagccagcagggggcccaggccagcagagtggcaggggatgaggctagcagagcagcagggggccaggccagcagagtaccagggaaccagcccagcagagtaccagggaaccagcccagcagagtaccagggaaccagcccagcagagtaccagggaaccagcccagcagagtatcagggaaccagcccagcagagtatcagggaaccagcccagcagagtaccagggaaccagcccagcagagtatcagggaaccagcccagcagagtatcagggaaccagcccagcagagtaccagggaaccagcccagcagagtaccagggaaccagcccagcagagtatcagggaaccagcccagcagagtaccagggaaccagcccagcagagtatcagggaaccagcccagcagagtatcagggaaccagcccagcagagtaccagggaaccagcccagcagagtaccagggaaccagcccagcagagtatcagggaaccagcacagggggccaggccacagagcagcagggagtcacatcaggcctgtggggtgtggtggaaaccatcagaaggtagttagcaggggaacagcgcagttggatttccctgtgaagggctccctctgggttctaggtcaaaaatagactgcattacacaggcaggaggagaagctcaaactaattgggaggcaagagagagattagggcagtttggattggagcctatcaaaggaattggtgaggatttcaaattctggatttattttgaaaagagtctgctgagatttgccacataagcagaaagaaatgcaacatgatgcacttcctggtctctggcttgggaaactgcaaagagggattctcatcccctgagatgcaggtggcagttctgtgtaggaacagaggaacgaggcctcggttttggataggttatgtggtgatgcctattgaatatccaacaaaagctgtcaggtagacagattgagaagtctggagttcagtggagggaggctgaaatatatactcaagattacagaagttatttaaagcaacaagatgggaagaacagcaaaggagtagtgtatctgtagagagaaggaaagggccaagggagagacctgggctgctccagcactgggtaatgtctccaggaggactgccccagggggactttgaagagcccagga

SEQ ID NO: 701746 - DNA, 1321 bp, Homo sapiens
cccgagagagcttgagaatgttggacagcagagtattccaagaggaggaccacagggagacgcactggagtgctcacagctcagcacattcaaggaatagagaggacatgacacatgcaggaaagagaggcatgggcagccagcagggggcccaggccagcagagtggcaggggatgaggctagcagagcagcagggggccaggccagcwgagtaccagggaaccagcccagcagagtaccagggaaccagcccagcagagtaccagggaaccagcccagcagagtaccagggaaccagcccagcagagtatcagggaaccagcccagcagagtatcagggaaccagcccagcagagtaccagggaaccagcccagcagagtatcagggaaccagcccagcagagtatcagggaaccagcccagcagagtaccagggaaccagcccagcagagtaccagggaaccagcccagcagagtatcagggaaccagcccagcagagtaccagggaaccagcccagcagagtatcagggaaccagcccagcagagtatcagggaaccagcccagcagagtaccagggaaccagcccagcagagtaccagggaaccagcccagcagagtatcagggaaccagcacagggggccaggccacagagcagcagggagtcacatcaggcctgtggggtgtggtggaaaccatcagaaggtagttagcaggggaacagcgcagttggatttccctgtgaagggctccctctgggttctaggtcaaaaatagactgcattacacaggcaggaggagaagctcaaactaattgggaggcaagagagagattagggcagtttggattggagcctatcaaaggaattggtgaggatttcaaattctggatttattttgaaaagagtctgctgagatttgccacataagcagaaagaaatgcaacatgatgcacttcctggtctctggcttgggaaactgcaaagagggattctcatcccctgagatgcaggtggcagttctgtgtaggaacagaggaacgaggcctcggttttggataggttatgtggtgatgcctattgaatatccaacaaaagctgtcaggtagacagattgagaagtctggagttcagtggagggaggctgaaatatatactcaagattacagaagttatttaaagcaacaagatgggaagaacagcaaaggagtagtgtatctgtagagagaaggaaagggccaagggagagacctgggctgctccagcactgggtaatgtctccaggaggactgccccagggggactttgaagagcccagga

SEQ ID NO: 701747 - DNA, 1321 bp, Homo sapiens
cccgagagagcttgagaatgttggacagcagagtattccaagaggaggaccacagggagacgcactggagtgctcacagctcagcacattcaaggaatagagaggacatgacacatgcaggaaagagaggcatgggcagccagcagggggcccaggccagcagagtggcaggggatgaggctagcagagcagcagggggccaggccagcagagtaccagggaaccagcccagcagagtaccagggaaccagcccagcagagtaccagggaaccagcccagcagagtaycagggaaccagcccagcagagtatcagggaaccagcccagcagagtatcagggaaccagcccagcagagtaccagggaaccagcccagcagagtatcagggaaccagcccagcagagtatcagggaaccagcccagcagagtaccagggaaccagcccagcagagtaccagggaaccagcccagcagagtatcagggaaccagcccagcagagtaccagggaaccagcccagcagagtatcagggaaccagcccagcagagtatcagggaaccagcccagcagagtaccagggaaccagcccagcagagtaccagggaaccagcccagcagagtatcagggaaccagcacagggggccaggccacagagcagcagggagtcacatcaggcctgtggggtgtggtggaaaccatcagaaggtagttagcaggggaacagcgcagttggatttccctgtgaagggctccctctgggttctaggtcaaaaatagactgcattacacaggcaggaggagaagctcaaactaattgggaggcaagagagagattagggcagtttggattggagcctatcaaaggaattggtgaggatttcaaattctggatttattttgaaaagagtctgctgagatttgccacataagcagaaagaaatgcaacatgatgcacttcctggtctctggcttgggaaactgcaaagagggattctcatcccctgagatgcaggtggcagttctgtgtaggaacagaggaacgaggcctcggttttggataggttatgtggtgatgcctattgaatatccaacaaaagctgtcaggtagacagattgagaagtctggagttcagtggagggaggctgaaatatatactcaagattacagaagttatttaaagcaacaagatgggaagaacagcaaaggagtagtgtatctgtagagagaaggaaagggccaagggagagacctgggctgctccagcactgggtaatgtctccaggaggactgccccagggggactttgaagagcccagga

SEQ ID NO: 701748 - DNA, 1321 bp, Homo sapiens
cccgagagagcttgagaatgttggacagcagagtattccaagaggaggaccacagggagacgcactggagtgctcacagctcagcacattcaaggaatagagaggacatgacacatgcaggaaagagaggcatgggcagccagcagggggcccaggccagcagagtggcaggggatgaggctagcagagcagcagggggccaggccagcagagtaccagggaaccagcccagcagagtaccagggaaccagcccagcagagtaccagggaaccagcccagcagagtaccagggaaccagcccagcagagtatcagggaaccagcccagcagagtatcagggaaccagcccagcagagtaccagggaaccagcccagcagagtatcagggaaccagcccagcagagtatcagggaaccagcccagcagagtaccagggaaccagcccagcagagtaccagggaaccagcccagcagagtatcagggaaccagcccagcagagtaccagggaaccagcccagcagagtatcagggaaccagcccagcagagtatcagggaaccagcccagcagagtaccagggaaccagcccagcagagtaccagggaaccagcccagcagagtatcagggaaccagcacagggggccaggccacagagcagcagggagtcacatcaggcctgtggggtgtggtggaaaccatcagaaggtagttagcaggggaacagcgcagttggatttccctgtgaagggctccctctgggttctaggtcaaaaatagactgcattacacaggcaggaggagaagctcaaactaattgggaggcaagagagagattagggcagtttggattggagcctatcaaaggaattggtgaggatttcaaattctggatttattttgaaaagagtctgctgagatttgccacataagcagaaagaaatgcaacatgatgcacttcctggtctctggcttgggaaactgcaaagagggattctcatcccctgagatgcaggtggcagttctgtgtaggaacagaggaacgaggcctcggttttggataggttatgtggtgatgcctattgaatatccaacaaaagctgtcaggtagacagattgagaagtctggagttcagtggagggaggctgaaatatatactcaagattacagaagttatttaaagcaacaagatgggaagaacagcaaaggagtagtgtatctgtagagagaaggaaagggccaagggagagacctgggctgctccagcaytgggtaatgtctccaggaggactgccccagggggactttgaagagcccagga

SEQ ID NO: 701749 - DNA, 1514 bp, Homo sapiens
tgctttacttttcataattgaaggcattcctttcctcctggaaagcaccacctgaaacattaggataatgttgcaaacattaggatgatgcctccttgtacccacaaagcaaatttgccaatcttgtgttggttttccccctctgcccctctctttgactacagtgctatggctttgtcctcattccttttccctctggagccacaacttttctcaggggtgtagagatactttaccattcagagtgtgctgtcacgagcatcactggtcagaaaaccattcatgcattgccagggtcattagtgagtgcctaccttgagccaggcaggtgctagcatttccccagaggaacaatacaagttgcattctggtgacaggtctcgtgaaaacttttggtggtcaaatatgttagggaaatccagagttacacaacatttaaaagatgactgcagaatgtttctttttcctaatacgttaatgtgtctcctatatttgcgtgagaggtgtagacaacagaacatacactgttcttcttcccaacttgtttgaccaggtaatctctctttcacaagtgtggagttcctctgaatccgctttgggaaagacaagtttctaaaagactcacatcagctcttaaaccagctttgccatttttattgtttcctgtagataaacacatgtttagtaaagacggggttgcaccaggttggccagactggtctccaactaaatgttctcacatacttttttttttctttttctggtgagacagggtccctatctgccacccagactagagtgcagtggcgcaatcacggctcactgcagcctcgacctcctgggcttaagcgatactcccatctaggccacccgagtagttgggattacagacgcacgccaccatctggttaatttttgtggagacaggggtctctccacgttgaccacgctggtctcgaactcctgccctcaggtgatcctcccgcctaggcctcccacatcgctgggattccaggtacgaaccccgtgggcgcctccatcttctaatttgtggctgagccagatgaggattcagggaaaaaagggacttccggttttaaaatggcggcttgacttccccgcccccccaggaagccaaaaacaaatatgcagccccgagattttccccagcaacaatctggagctcagatttgaggatgagacagatcccgggggcacggagaagtgaaaatcttccragcaggcgataagaaaatcgggttttcacatccgccacgcccctccccatcactgagccccacaccaagcgcggggaaactttccctccgcgcgcggattccgtggtgagaaaagtgaggcccaagtgtcaaccaagtttcccaccatgttgggtttcctggcaggaggcgcgtccttgcctcagccatggaaaacgtggtgcctgctgaggggagccacatccccaggactagcagagacaaaggggacggtgggcggaccaccatccccagccc

SEQ ID NO: 701750 - DNA, 1514 bp, Homo sapiens
tgctttacttttcataattgaaggcattcctttcctcctggaaagcaccacctgaaacattaggataatgttgcaaacattaggatgatgcctccttgtacccacaaagcaaatttgccaatcttgtgttggttttccccctctgcccctctctttgactacagtgctatggctttgtcctcattccttttccctctggagccacaacttttctcaggggtgtagagatactttaccattcagagtgtgctgtcacgagcatcactggtcagaaaaccattcatgcattgccagggtcattagtgagtgcctaccttgagccaggcaggtgctagcatttccccagaggaacaatacaagttgcattctggtgacaggtctcgtgaaaacttttggtggtcaaatatgttagggaaatccagagttacacaacatttaaaagatgactgcagaatgtttctttttcctaatacgttaatgtgtctcctatatttgcgtgagaggtgtagacaacagaacatacactgttcttcttcccaacttgtttgaccaggtaatctctctttcacaagtgtggagttcctctgaatccgctttgggaaagacaagtttctaaaagactcacatcagctcttaaaccagctttgccatttttattgtttcctgtagataaacacatgtttagtaaagacggggttgcaccaggttggccagactggtctccaactaaatgttctcacatacttttttttttctttttctggtgagacagggtccctatctgccacccagactagagtgcagtggcgcaatcacggctcactgcagcctcgacctcctgggcttaagcgatactcccatctaggccacccgagtagttgggattacagacgcacgccaccatctggttaatttttgtggagacaggggtctctccacgttgaccacgctggtctcgaactcctgccctcaggtgatcctcccgcctaggcctcccacatcgctgggattccaggtacgaaccccgtgggcgcctccatcttctaatttgtggctgagccagatgaggattcagggaaaaaagggacttccggttttaaaatggcggcttgacttccccgcccccccaggaagccaaaaacaaatatgcagccccgagattttccccagcaacaatctggagctcagatttgaggatgagacagatcccgggggcacggagaagtgaaaatcttccgagcaggcgataagaaaatcgggttttcacatccgccacgcccctccccatcactgagccccacaccaagcgcrgggaaactttccctccgcgcgcggattccgtggtgagaaaagtgaggcccaagtgtcaaccaagtttcccaccatgttgggtttcctggcaggaggcgcgtccttgcctcagccatggaaaacgtggtgcctgctgaggggagccacatccccaggactagcagagacaaaggggacggtgggcggaccaccatccccagccc

SEQ ID NO: 701751 - DNA, 879 bp, Homo sapiens
aattataggtgaatctaatctcagaataaagagcagacatttgagttgaatacatttagcyaaaaaataagaacccaatggcatcatcattcttgtgattttgctatggagaggtaaaaatctggtgggcatggactgtaaacaggcacctgagaaccactagactaaaaagtctcaaattttataattgatgaatttgcttttctgagaattcctttattcaagtctgctcctttcctgtctctatctttctatatcttatagcagacgaacagattttcatagagtgttttgagccctgaattctggactggctacataatttgtggtgcctggtacaaaagaaaactgtgaggccccttgttaaaaaattattaggaattcaagacaatgaaggcacagcattaaaccaagtgtgaagccttgctaagcacaggccctgggaagctgcatgggttgcacatttatgaagctattgctgcctgtaattcctgatacaatcccccaaattgatttcccaaagcacagctttttaaaaatgatgtttcagtatctaagaatcttatcaaaagaaacatttctggaatgaggttccagctaggtggagtctttgttactggtcagtaaattacatcctgcaagtcaaagcttaaccccaaagtactatagattatgaattgagatattgccttaatctcctggcagttaacatttctttagtcagtttatgttaatctttctatctgtagggttattattgaagcttaagaataatattctaagaatatatgatttgatcaaaaccacctggatgtttcaaaataacctccatgtggagaaaaagcactgacagtcccaagccctgcaacaggaaacaga

SEQ ID NO: 701752 - DNA, 879 bp, Homo sapiens
aattataggtgaatctaatctcagaataaagagcagacatttgagttgaatacatttagctaaaaaataagaacccaatggcatcatcattcttgtgattttgctatggagaggtaaaaatctggtgggcatggactgtaaacaggcacctgagaaccactagactaaaaagtctcaaattttataattgatgaatttgcttttctgagaattcctttattcaagtctgctcctttcctgtctctatctttctatatcttatagcagacgaacagattttcatagagtgttttgagccctgaaytctggactggctacataatttgtggtgcctggtacaaaagaaaactgtgaggccccttgttaaaaaattattaggaattcaagacaatgaaggcacagcattaaaccaagtgtgaagccttgctaagcacaggccctgggaagctgcatgggttgcacatttatgaagctattgctgcctgtaattcctgatacaatcccccaaattgatttcccaaagcacagctttttaaaaatgatgtttcagtatctaagaatcttatcaaaagaaacatttctggaatgaggttccagctaggtggagtctttgttactggtcagtaaattacatcctgcaagtcaaagcttaaccccaaagtactatagattatgaattgagatattgccttaatctcctggcagttaacatttctttagtcagtttatgttaatctttctatctgtagggttattattgaagcttaagaataatattctaagaatatatgatttgatcaaaaccacctggatgtttcaaaataacctccatgtggagaaaaagcactgacagtcccaagccctgcaacaggaaacaga

SEQ ID NO: 701753 - DNA, 662 bp, Homo sapiens
cagtagagaaaaatccttttaggtagaaggtatactatgaattgatcaaggacacatacttatttagacccttttcaaggacaaagtataactgttgcattatgattttaagtgacaattacacagttgtttaattgcctgggtggctgaggacacatgctctaatcacaatatgataaaactaaaaatgtcatgtacagccttatattttccaggatcctttatatggatgacaacatacattgcagagtggatcttacccttgattaaacttatagacaacattattctttaatttaactcatatttgttcattgcctactttgtgtcgggcgccatgtgaggttctaaggaagcacaagtccccaaaaaccacagggactccgctccagagggaattctctgtcrctcaagaatcaatgctatagaaaaacagtcttaacctggaggaactcaggaaatacttcactccagagttatttttgaagaatatactacagatcaaacttcatcaaaccaagagataactaggacaacttcatcaaaaggaatggtaatgagcattagatatatttaatatacatgtaaggttaattcaaaagtggatacatgagtggaagaagaggaagtaaatgtcatgtattcataaaataaaatagaaa

SEQ ID NO: 701754 - DNA, 933 bp, Homo sapiens
taataatgcaaaaatatgcaaattatgacatcaataaaataaggtatgtgggcgaagaagtaaaattgtaatttttttctgtgagtaaaataaattgttattagcttacaatatgctgtgtgactatagagtatatttttgaaattttatggtaaccacaaaaaataatacatactaaagatgcacaaaagaaaaagagaaagaaataagaaatttaaaaatattactatgaaaaaacaacaaaacccataggatggcagtaagagagaaaaggagaaacagaaaagactatttaaaaagatagaaaataattaacaaaatggaaatagtaaattatttcctatcagtaattactataaattaaactcaccagtcaaaagacattacatggttgaacagataataagattcgactatatgctatcaacaggaggctcaccttagatattaggatacatatgtactgaaagtgacgggatggaaaatatatcctatgcaaatggtaaacaaaagacagcagggatagttatacttacctcagacaaaatagactttgtctattcagttctcgctgtgggctcttcagtggtcctgcaactcagttccagcccctcatagctacgaacctgggcagtactacttgctcaggaagccaccaagttgcctggktgccacacccatctatgcacctaataatagactttctatctagggatgcttaagtagatgtgcatcccagcactcgcctatagaccaaggtcctggagagtctggtttactaaggatgcagacagaattcatgtccactaaagcataggctcatcaaccatgggccccactgcagcagccacatagtccattttcagtctcattcaactgtgatcctagaggcaatcccatcaccctgggaatctaagaagttttttttttttt

SEQ ID NO: 701755 - DNA, 1012 bp, Homo sapiens
tttcggcattttggtgtctggcactagtccttgcctcctggtaaagccaggcttgggtttaggctttcagcatcctcccttgtttcctggcccttgggtccccttttctccagatacccccttagctctttctctccctatctttggccaaaaactgagcctgaacaggatccactgggagcccctctaggactggtctgtcacgctgtgctcccctcccccaattctgcyatctcttcactccagctggccccttgccttccctgggtggccctgcttggcttcccactgactccccagcccctgcctcaggagtccagcagcacaacccctgaagtgcttctgtttctgtcccctgccctggacttggccgccccagtcctccattcctgttctctcttctaaccggacagggcatttgctcctgaccatgacacccaagttccccacagggaccacacccaccctgctttgggtcctcatctctaaaatggcgccccggcctcttccagtgggctgtgatgcttgcacgcactgtctgccatccagcagggcttggcaccccagctagcagccctgagcacctgcataggtgaggggggcagccggctgggacggccatggctcattccttggatctgaggccaggagtcaatgggtccttgagacagttatcttacgggatgtgttgcagctaggtgaagcaaatactatgttgttttaaaatgttttgctgatagaaatactgacagccaagcactcccagctaaggacatcactggggtttcacacccacctctcccacgctccatgacactgcccagactgcagatcccagccagtgggctattgacggtggtcctgggagggaagaggtggactggacacccccacccccattctcttgacaggactggggaaggggcgccctgcgcctggtgttcttatactccacacattcagaagggagggtgtgtggttttgaataagggtcccatattcttttttcttc

SEQ ID NO: 701756 - DNA, 1012 bp, Homo sapiens
tttcggcattttggtgtctggcactagtccttgcctcctggtaaagccaggcttgggtttaggctttcagcatcctcccttgtttcctggcccttgggtccccttttctccagatacccccttagctctttctctccctatctttggccaaaaactgagcctgaacaggatccactgggagcccctctaggactggtctgtcacgctgtgctcccctcccccaattctgctatctcttcactccagctggccccttgccttccctgggtggccctgcttggcttcccactgactccccagcccctgcctcaggagtccagcagcacaacccctgaagtgcttctgtttctgtcccctgccctggacttggccgccccagtcctccattcctgttctctcttctaaccggacagggcatttgctcctgaccatgacacccaagttccccacagggaccacacccaccctgctttgggtcctcatctctaaaatggcgccccggcctcttccagtgggctgtgatgcttgcacgcactgtctgccatccagcagggcttggcaccccagctagcagccctgagcacctgcayaggtgaggggggcagccggctgggacggccatggctcattccttggatctgaggccaggagtcaatgggtccttgagacagttatcttacgggatgtgttgcagctaggtgaagcaaatactatgttgttttaaaatgttttgctgatagaaatactgacagccaagcactcccagctaaggacatcactggggtttcacacccacctctcccacgctccatgacactgcccagactgcagatcccagccagtgggctattgacggtggtcctgggagggaagaggtggactggacacccccacccccattctcttgacaggactggggaaggggcgccctgcgcctggtgttcttatactccacacattcagaagggagggtgtgtggttttgaataagggtcccatattcttttttcttc

SEQ ID NO: 701757 - DNA, 321 bp, Homo sapiens
ccaagaccgcaccactgcactccagtgtgggtgacagagtgagactctgtckcaaaaaaaaaaaaaagataaggacagcgtcctggagtttgtggtggtgaggggctaaaatggcatacggccaggctcatataggtgctcagtcattggaataaaaagttaagccaggaagacatggaacgttcagagatgcactggggtgacagttcagagacaagggcctggcagtggcagtaaggaagccctgcctggccatggaaggccgtgcagaaccaaggcagccagtatgtggataatatttatttgtatcttatctataga

SEQ ID NO: 701758 - DNA, 603 bp, Homo sapiens
aaaaggccacttgctagttaaaatctattttgttattcgttcttagacttctctgaggctgtgaccatatagaaaaatcttgtatataaaaaaaaaaaaagagagagagagaaaaaaaaaagagaaatctgggttatggagtatcacacctattttcagaaggcraaaaagaattgaagttattccctagattatttttgaccatcttagcgtcagatatcaaacacaaatggctctgtaaaggcctcatgaatcttcaaaactccttgaggcaaagttctctgtgaactcttttcacgatgggtatgcactctgaaaacaatcctctgaaacaactactcagaggtgttctaattgataaattcacacgaggagaagagccaaaaactggagctggttcagcagaggatagtgtaaagtagtgtcatatatagcagaaaaaagttcaccccaaataatctatgaaattatgtttaaaacaatttttgagtgacaaatacttctttgttagatagtattaaaacagatataatactagtaaattttcttttaccatataacagatcatggttgaaaagccaataaattgtttaatgttatcaa

SEQ ID NO: 701759 - DNA, 603 bp, Homo sapiens
aaaaggccacttgctagttaaaatctattttgttattcgttcttagacttctctgaggctgtgaccatatagaaaaatcttgtatataaaaaaaaaaaaagagagagagagaaaaaaaaaagagaaatctgggttatggagtatcacacctattttcagaaggcgaaaaagaattgaagttattccctagattatttttgaccatcttagygtcagatatcaaacacaaatggctctgtaaaggcctcatgaatcttcaaaactccttgaggcaaagttctctgtgaactcttttcacgatgggtatgcactctgaaaacaatcctctgaaacaactactcagaggtgttctaattgataaattcacacgaggagaagagccaaaaactggagctggttcagcagaggatagtgtaaagtagtgtcatatatagcagaaaaaagttcaccccaaataatctatgaaattatgtttaaaacaatttttgagtgacaaatacttctttgttagatagtattaaaacagatataatactagtaaattttcttttaccatataacagatcatggttgaaaagccaataaattgtttaatgttatcaa

SEQ ID NO: 701760 - DNA, 757 bp, Homo sapiens
actccagcctgggcagcaagagcgaaaccgcatctcaaaaaaaaaaaaattaaaattaacttgtcacactactgcctttaggttttgcatcaaaattctttaaaggttacatgtgttttcctgtgatatttttaaagtttttatttaaatcttgaaaccacctaaaatttatgtcactgttccccaggaatgaaggagaaattcagcttttttctcctcccaaatggctacttatcccaacacaagccgtattaattgcatgtaaggctgctgtattctagcacaatgcatgctttcagaaatatttgctaaatgaataaatgaaaagcagtatytgtttattctttctacaaatatgcattgagtaccgactgcatataaccactatgctaggctttgcatataacagtaatgactcagaagccaggaagcatatcatctagcggtgaagataagcattaaataagtaatcatatagcaatattttgaacaggataaaattcctcttacagtcaacactcaaatgtgctggataaaatatgacattttggccgggcgcagtggctcatgcctgtaatcccagcactttgggaggccaaggtaggtggatcacctgaggttaggagtttgagaccagcctgactaacatggtgaaactccgtctctactaaaaatgcaaaagttagccaggtgtagtgtaatcccagctactcaggaggctgaggcaggagaatcgcttgaacctgggaagtggaag

SEQ ID NO: 701761 - DNA, 757 bp, Homo sapiens
actccagcctgggcagcaagagcgaaaccgcatctcaaaaaaaaaaaaattaaaattaacttgtcacactactgcctttaggttttgcatcaaaattctttaaaggttacatgtgttttcctgtgatatttttaaagtttttatttaaatcttgaaaccacctaaaatttatgtcactgttccccaggaatgaaggagaaattcagcttttttctcctcccaaatggctacttatcccaacacaagccgtattaattgcatgtaaggctgctgtattctagcacaatgcatgctttcagaaatatttgctaaatgaataaatgaaaagcagtatttgtttattctttctacaaatatgcattgagtaccgactgcatataaccactatgctaggctttgcatataacagtaatgactcagaagccaggaagyatatcatctagcggtgaagataagcattaaataagtaatcatatagcaatattttgaacaggataaaattcctcttacagtcaacactcaaatgtgctggataaaatatgacattttggccgggcgcagtggctcatgcctgtaatcccagcactttgggaggccaaggtaggtggatcacctgaggttaggagtttgagaccagcctgactaacatggtgaaactccgtctctactaaaaatgcaaaagttagccaggtgtagtgtaatcccagctactcaggaggctgaggcaggagaatcgcttgaacctgggaagtggaag

SEQ ID NO: 701762 - DNA, 661 bp, Homo sapiens
ccaaaatgccacccagaagaatgaacacagtacttcagaaactgattctgtttttggttttgagaagcaattacaaatacaggttaacatcctgggatatggaaacagtatttttatggatggagaaaaagtgtgacttaccaacaataaatctgagatgactgtaattccttcttcatgtcgatagacttcctccttcgagttttcttgctcagagacttcccagactctggatatgagaccgatgagctcaagcctcactcctttgtcaatcacaaatggccccgagaactggccttgagcaaggagtgcccgggtgtacttgaggatgagaaccgcactcataaagcctagctgcatgaacagaaaagatgtaaataaaatgcctggccttgagcaaggagtgcccgggtgtatttgaggatgagaaccgcactcataaagcttagctgcatgaacagaaaagaygtaaataaagtgcctcatggcatatgatgcatatattcttgcctttttcattattataaggaattaaaatgactgaactacgggctaagagaactggatttaagtccaggtttggtctctaggtgactattggccagcttcctaagtagcaagctgctttttgatattcggcctcttgaccaaaggaaaacaa

SEQ ID NO: 701763 - DNA, 661 bp, Homo sapiens
ccaaaatgccacccagaagaatgaacacagtacttcagaaactgattctgtttttggttttgagaagcaattacaaatacaggttaacatcctgggatatggaaacagtatttttatggatggagaaaaagtgtgacttaccaacaataaatctgagatgactgtaattccttcttcatgtcgatagacttcctccttcgagttttcttgctcagagacttcccagactctggatatgagaccgatgagctcaagcctcactcctttgtcaatcacaaatggccccgagaactggccttgagcaaggagtgcccgggtgtacttgaggatgagaaccgcactcataaagcctagctgcatgaacagaaaagatgtaaataaaatgcctggccttgagcaaggagtgcccgggtgtatttgaggatgagaaccgcactcataaagcttagctgcatgaacagaaaagatgtaaataaagtgcctcatggcatatgatgcatatattcttgcctttttcattattataaggaattaaaatgactgaactacgggctaagagaactggatttaagtccaggtttggtctctaggtgactattggccarcttcctaagtagcaagctgctttttgatattcggcctcttgaccaaaggaaaacaa

SEQ ID NO: 701764 - DNA, 661 bp, Homo sapiens
ccaaaatgccacccagaagaatgaacacagtacttcagaaactgattctgtttttggttttgagaagcaattacaaatacaggttaacatcctgggatatggaaacagtatttttatggatggagaaaaagtgtgacttaccaacaataaatctgagatgactgtaattccttcttcatgtcgatagacttcctccttcgagttttcttgctcagagacttcccagactctggatatgagaccgatgagctcaagcctcactcctttgtcaatcacaaatggccccgagaactggccttgagcaaggagtgcccgggtgtacttgaggatgagaaccgcactcataaagcctagctgcatgaacagaaaagatgtaaataaaatgcctggccttgagcaaggagtgcccgggtgtatttgaggatgagaaccgcactcataaagcttagctgcatgaacagaaaagatgtaaataaagtgcctcatggcatatgatgcatatattcttgcctttttcattattataaggaattaaaatgactgaactacgggctaagagaactggatttaagtccaggtttggtctctaggtgactattggccagcttcctaagtagcaagytgctttttgatattcggcctcttgaccaaaggaaaacaa

SEQ ID NO: 701765 - DNA, 1371 bp, Homo sapiens
ctgggctgccacagaaaggagctgtcctgaacagctgcccagttcacattggacttggcacaaatgagaaataagggttgcgttgttaagtcgctgagatttgggggtttatttattatcatagtctagcctaacgtgactagtacacctttcaattagatagtggctaactatatcatgcataggagggaaaggaaacatctagaaagtatggtaagtttgtggttttaagagaatcctgtggctgggtgcagtggctcaggcctataatcccggcaatttgggaggctgaggtgggagaattgcttgaggccaggagtttgagaccaccctggccaacatagcaagaccctgtctcaaatttaaaatttaaaaaagttaattaaaaaaacaaaaaaaaaaagcccgggcacagtggctcaagcctgtaatcccagcacttcaggaggctgaggtgggcagatcacaaggtcaggagatcaagaccatcctggctaacacggtgaaacgctgtctctactaaaaatacaaaaaaaaattagccggtcacggtggcaggcgcctgtagtcccagctactcgggaggctgaggcaggagaatggcgcaaacctgggaggtggagcttgcagtgagccgatatcacgccactgcactccagcctgggcgacacagcaagactccgtctagagaaaaaaaaaaaaaaaaaaaacactacagctcaaaggccaaatccagctcgctacctatgtttgcaaataaagctttattggaacacgtgatccacacttgtgtgtatgtgttgtctatggctgctctcacaatacagtggcagagctgagtaactgcaacacagattctgtcttgcaaaactgaaatatttatctgaccctctatagaaagtttgccaactcctgccctagagtatttgtgaagccacccttctgagatgccccccatcttaaccccttcctcccccaaatgacagctaggcccagagacagcccaacccaccctacccccatagccccaagcccaacatttacaaaggccagccttggagagggaaagtgcagctttgtccagcctgrgccctatcccgcctcccttcctgacctcttactcaccacctccatagaataccaccatgccagcaaccataagcactgggtgccagttgaacatgtagatgctgccattccaggcaaagccaccacgccagtactgcatccagtagatagtgaagaggatgcacatagagcccagggaccccagcagcaggcaggacaagtagaaccgtccagacaccattctgatcacgcactcctagaagaaggagaagtcacaaatctccactggctcagatgcaccca

SEQ ID NO: 701766 - DNA, 1539 bp, Homo sapiens
aaagggactttagaaaatgaaaatgtatatcttgtgcacatatgaagacaggaaatcccactgagtatgtgtgtgtatatgtgtatgtgcacacacatgtgtatctgtgagattactgacaaggtgattctagaaatgtacacagaagcataaaaaatgaagacaggtcccacactcctgaagaatgacagcatgtagggagacttgtcctaccagagatcaagacttattacaaagctatggaaattgacaatgtggtatttgcccaggaatagaaaaaaatgaacaatggaatagaatagagagctgaaaaacagactcacacaaaaatgaagagtagacataacagaactggcatagtacattggtagagaaaaattgattactcaataaatagaaataggtaattttttcaagtggaaaaaaatccttcttacacctctcataggaaaccattctaggaagatcaaagttttaaatgtaattcaatcagtggttattgagcactgtttcaaagagcaaccatgaaagacatgactatgcataataaacaggacaaaattcaccctggttttaaatcctattgtgaaagctacagacacgggatttattgtttttatcacatgttcacctgccatctgcaggatacaaaattaatattgtgtgttatctaaatcaatgctcattttatttttcagaaaaaattcaataattgtcagctataggaattgtgctgtctctttatgataatggagtaactgtatagctaaggaatggttccagattacaggagagttagctaactaaataccatgcttgacactggatttgacactagagtgggggaaaaattgccatgaaggatgtgaactggaaaactggtggaatctgaacataactattagacaacagtattatatcaatgttagaagttccttattttaatcaatgctcacgtaagataacatccttggttttagaagataaacactcaagtattcagtggtaaagggacctggtgtcttcaacttaatttcaaacggttcgcactaataatgataacgttaataatgtgtgtctgtgtatgcacatgcacaaatgtggcaaaatgttaacaattagagaatctaggtaaagggtatacaggaggtgtttttactattctggtaatttttctgtatgtgtgaaattatttagaaataaaaatttaaaacttgtatctgtattaactttcagtgcctatcaaagttttctatagagtggatatataataaatggtaaacaaaatttcctcaacaaaataataggaatagaaaagaaattgcaaagatatttctaaacgaatttctatacgtacttgaaactgccagtttcccaaatgatcaacatctwtaatatatacatggtaatggcctccgtagcagccacctttgtgtataataactgagaagaggtcatatatatattctaagtcatccaattcactctaaaagaaaaaagaacaaaaatattgatatagttttcataaaatgctgataa

SEQ ID NO: 701767 - DNA, 1200 bp, Homo sapiens
acaaccaaagttctcctttgctcaatttttgattaattaaagcacagtggtctttctgcattttgtggagccattttacgacagagattcagactgggactgtgctttctggatcagcagattctcacagcaaatacttctgcctgggacttggtgcaaatatactgaagatatttgtacgtggagaagactagcctatcacagttactcagactaaacatttttatatcattcttgactcacctctttgtcttacacccatgtctagtctattggcaaaccctgttggcattaccttaagaaatccagaagtgaccactcctttccaccgttgttacaaccactctcacccaagccctgtcctctcacctgtaatattgctattgtcttctaactgatgcctcggtgtctacccttgcccctcatcaactcatttacatgccaaccacagtgattctgtcaaaacatagtgtaatttaactgaaaataaataaaaggaaatgagtgagaaccttgaaaacagatggctgtctcaatgaagatttttactttcagtaaaatccaaagtccctaataaatctagcaaggccctacatgatctgcatgccacctctcctctctggcttcatctactattccacccccaccccatgctcatcatcaactgtgccaggcacgctgccagcttggctgtgctctgtaacatacagataactgcatggcttagtctctcactccctcaggtctccattaaagagtcaccttttcagtgaggacttccttggccatttgatataaaattgcaaccagmtccccattttatttttgtccgtagcacatatcactaaatacatacatactcagagtgacatcagcaatatggtgaaataggaggtccccagcttttgttcacccatagaaacatggacttgccaactatccacagaaaaaagtgccttttgatgagctttgggacccaagttggaggttgcaccaccccagtggagttcaagaccaaggaaagctgctttgaaaaagcagtctcatgcttctagtagcaggcctgtcaatcaggatcctggctgcagatccagaatcagcctcatctcctgtggactcagtccagcatcatttgtccataattttgccaccagacccaccctcccatggtcttagcagaaactatgcctgcttaacacc

SEQ ID NO: 701768 - DNA, 1200 bp, Homo sapiens
acaaccaaagttctcctttgctcaatttttgattaattaaagcacagtggtctttctgcattttgtggagccattttacgacagagattcagactgggactgtgctttctggatcagcagattctcacagcaaatacttctgcctgggacttggtgcaaatatactgaagatatttgtacgtggagaagactagcctatcacagttactcagactaaacatttttatatcattcttgactcacctctttgtcttacacccatgtctagtctattggcaaaccctgttggcattaccttaagaaatccagaagtgaccactcctttccaccgttgttacaaccactctcacccaagccctgtcctctcacctgtaatattgctattgtcttctaactgatgcctcggtgtctacccttgcccctcatcaactcatttacatgccaaccacagtgattctgtcaaaacatagtgtaatttaactgaaaataaataaaaggaaatgagtgagaaccttgaaaacagatggctgtctcaatgaagatttttactttcagtaaaatccaaagtccctaataaatctagcaaggccctacatgatctgcatgccacctctcctctctggcttcatctactattccacccccaccccatgctcatcatcaactgtgccaggcacgctgccagcttggctgtgctctgtaacatacagataactgcatggcttagtctctcactccctcaggtctccattaaagagtcaccttttcagtgaggacttccttggccatttgatataaaattgcaaccagatccccattttatttttgtccgtagcacatatcactaaatacatacatactcagagtgacatcagcaatatggtgaaataggaggtccccagcttttgttcacccatagaaacatggamttgccaactatccacagaaaaaagtgccttttgatgagctttgggacccaagttggaggttgcaccaccccagtggagttcaagaccaaggaaagctgctttgaaaaagcagtctcatgcttctagtagcaggcctgtcaatcaggatcctggctgcagatccagaatcagcctcatctcctgtggactcagtccagcatcatttgtccataattttgccaccagacccaccctcccatggtcttagcagaaactatgcctgcttaacacc

SEQ ID NO: 701769 - DNA, 609 bp, Homo sapiens
gcttttaagagataaacacttttttattcatcttgaaaatggttgtgcttagagctcagcaggtacccagttaatatgtataggcttcagtgctaagtactatgcatggcaaatcttttgctctcaaggggtttacaatgtaagggaaggaaggcattcttatgcagtgctggcaaacactgcccatggcagacagtacaagttgaytagtgtgcctcctgcagcagacattagaagtcgattactgcacttttcctgacctaagagatagcctgatgccttctccaacccagccctcccttaaaggtgcctgtgggtctcagggtctagaagctgctcaccacgtggactttgtggggcattgaagcctgaggggatgctcggagaagaagaggattcttgaagacttgagtgcctgagagcatttatgtgttcagttcgtctctgagtcagtcaacaaacattgatggtgtctgtgtcgagggtggccataaagggacacggacacgtaaacatgtagttaaaacacaatgagataggagccttgaccttggcaggcacacaggcaagacagacccctgcctggcctggcagggggtggtcccaggg

SEQ ID NO: 701770 - DNA, 853 bp, Homo sapiens
gatctcagctcactgcaacctccgcctcccgggttcaagtgattcctctgcctcggcctcctgagtagctgggattacaggcrctcaccaccacacccagctaattttttttttttttttgtatttttagtagagacggggtttcaccatgttggccaggctggtctcaaactcctggcctcagccaatctgcccatctcagcctcccggtgctggggattacagtcctgagccaccacacctggcccccaaatgatttttaagttctgttatctatgagaagttacataaaaatcaaggactcagacactgacaatgttgccttgtggccttacatccaccttaagccttcttgcaagagttactgactcccctcgagatgcttcaggggcctaatggggtcaggggctggatgtccaagtatatcatatcagtgcatctggcagccccaagaatcaagaaaagagtagctgtgagcctggctaaatgtggacaccttcaggtacagagtcagaagattgaactgtgaagagaaaagcgaggccggcacccaaaaaactgctaactgctcccacctcctaagagcagtatagcacaagggtagagaatacaggctgtggattcagacgcatggctctatcatttacaaggtgaatttagacaaggtacttctgttgccctgaggggttacagtttaccctaactcaccagagcccagtacagtggaaaatgaattgtgggattattagcaaatagtccattatttatttaaatttaaatagttatataagttagattggcttacaattttacagacatttacaaaatgttacaagtgtaagaattctatata

SEQ ID NO: 701771 - DNA, 1391 bp, Homo sapiens
attcatgagcatgtagtcacagattatttagttaacagataacacattggtgtaatcctaagtaatgagagattcgctttctttgctttggttgctctaatcacactctagaactgatggagtccgtcagggatgcacttctccttgtttccatttgaacactttattcttctttagaattttatccttctaagtttgctatgtctgaatctccaataggtttgctattagtaattattcccctagtgaaagaatttattcagtaaattggcactaagttattttgttgtcttaattatatcctttgcaacctaaaatgcttctgagtacagaaaatatcaaaactaataagaaactggaggttttttctaagattatatctttcatgtgttaatattatacacactctgagtaagtagtgggtttttctcactttctggttttacagttaaaaaaaaaacaaagtaggctgggcgtggtggctcacgcctgtaatcccagcactttgggaggccaagacgtgcggatcacaaggtcaggagttcaagaccagcctggccaatatggtgaaaccctgtctctactgaaaatacaaaaattagccaggtgtggtggcaggtgcctgtagtcctagctactcaggaggctgaggcaggagaatcgcttgaacccgggaggcagagtttgcgtgagctgagatggcgccattgcactccagcctgggcaacaagagcgaaactctacctcaaaaaaaaaaaaaaaaaaaaaaaaacccaaaaaacaaagtaaaacatgtagtgatttaacattatacgtccctgtctcctttttgggtatatttggtgcttcagattttcccattatttttaattgttcctattaccttttgttattctttgtttgtcccaacttgtctttggtaatacaaagtcctttaaatcggctgggtgcagtggctcacgcctgcaatcccagcactttgggaggccgagacgggcagatcacgaggtcaggagatggagaccatcctggctaacaaggtgaaaccccgtccttactaaaaatacaaaaaaaattagccgggcgtagtggcgggctcctgtagtcccagctactcgggaggctgaggcaggagaatggcatgaacccgggaggcggagcttgcagtgagccgagatggcgccactgcactccagcctgggcgacagagtgagactctgtctcmaaaaaaaaaaaaaaaaaatcctttaaatctgtgtttttctgggaacttttgtaaaactgtgccactttgtaacatttgtgtttggttacttgtttcttccttcacgtatgtccttttaaaaactgagctcatttcattttaaccctttcaggatttattgagttta

SEQ ID NO: 701772 - DNA, 916 bp, Homo sapiens
taaaatgtggtttaaatatttctgtcggggagaggacgccacacttctactcaatgaagacaaacatttttacgktccagaggtcttttattttattttatttgaacacctatgatgtcatgaattcacagggaatagcttccagcagctcaggttccttccccttggttctcgcaccgtgagcttttctgggtggagcaggctgcagctttagttgaagcaggtacctttctctgcggcttctttctttttctgatcattttcctccacacatttcaggaagccacttagagtgctccgtgtgctccatacgcacataattctctcggcaggaatcttgcccttgtctgtttgcaacagcacgctggagaacgcggtcgactcccagctttgccgcggtcacacctgcggagcttcctttttgaacaatatctattcccttgatgtctacagtatcacctttcttatagactcgcatatacgtggccaaaggaacaactccacgttttctaaaaggccagagaacatccatcgggagcctctcccctttcccctcctgttggtcatttgggccaatgacggaagatggcggttccggccgaaaggaagcgtggctgaactctagttgtgcattaccatgtccatctctagatgaatattttaacttaaaacataatagcataagcttcttggatcacttattatgcaataattcttccaaaaatttgcccagagatagtgcgctggatgcgtctcatcataattctctgaatatgtaaatactagcgtcagttgctaacaaagtatgttttgtaaggcagaacagctacgtaaaggcttttcattccttctgctcaggtgtaggaaacagctttggggaactgttattttgttgttgttttgagacaaggtgtcc

SEQ ID NO: 701773 - DNA, 916 bp, Homo sapiens
taaaatgtggtttaaatatttctgtcggggagaggacgccacacttctactcaatgaagacaaacatttttacggtscagaggtcttttattttattttatttgaacacctatgatgtcatgaattcacagggaatagcttccagcagctcaggttccttccccttggttctcgcaccgtgagcttttctgggtggagcaggctgcagctttagttgaagcaggtacctttctctgcggcttctttctttttctgatcattttcctccacacatttcaggaagccacttagagtgctccgtgtgctccatacgcacataattctctcggcaggaatcttgcccttgtctgtttgcaacagcacgctggagaacgcggtcgactcccagctttgccgcggtcacacctgcggagcttcctttttgaacaatatctattcccttgatgtctacagtatcacctttcttatagactcgcatatacgtggccaaaggaacaactccacgttttctaaaaggccagagaacatccatcgggagcctctcccctttcccctcctgttggtcatttgggccaatgacggaagatggcggttccggccgaaaggaagcgtggctgaactctagttgtgcattaccatgtccatctctagatgaatattttaacttaaaacataatagcataagcttcttggatcacttattatgcaataattcttccaaaaatttgcccagagatagtgcgctggatgcgtctcatcataattctctgaatatgtaaatactagcgtcagttgctaacaaagtatgttttgtaaggcagaacagctacgtaaaggcttttcattccttctgctcaggtgtaggaaacagctttggggaactgttattttgttgttgttttgagacaaggtgtcc

SEQ ID NO: 701774 - DNA, 916 bp, Homo sapiens
taaaatgtggtttaaatatttctgtcggggagaggacgccacacttctactcaatgaagacaaacatttttacggtccagaggtcttttattttattttatttgaacacctatgatgtcatgaattcacagggaatagcttccagcagctcaggttccttccccttggttctcgcaccrtgagcttttctgggtggagcaggctgcagctttagttgaagcaggtacctttctctgcggcttctttctttttctgatcattttcctccacacatttcaggaagccacttagagtgctccgtgtgctccatacgcacataattctctcggcaggaatcttgcccttgtctgtttgcaacagcacgctggagaacgcggtcgactcccagctttgccgcggtcacacctgcggagcttcctttttgaacaatatctattcccttgatgtctacagtatcacctttcttatagactcgcatatacgtggccaaaggaacaactccacgttttctaaaaggccagagaacatccatcgggagcctctcccctttcccctcctgttggtcatttgggccaatgacggaagatggcggttccggccgaaaggaagcgtggctgaactctagttgtgcattaccatgtccatctctagatgaatattttaacttaaaacataatagcataagcttcttggatcacttattatgcaataattcttccaaaaatttgcccagagatagtgcgctggatgcgtctcatcataattctctgaatatgtaaatactagcgtcagttgctaacaaagtatgttttgtaaggcagaacagctacgtaaaggcttttcattccttctgctcaggtgtaggaaacagctttggggaactgttattttgttgttgttttgagacaaggtgtcc

SEQ ID NO: 701775 - DNA, 916 bp, Homo sapiens
taaaatgtggtttaaatatttctgtcggggagaggacgccacacttctactcaatgaagacaaacatttttacggtccagaggtcttttattttattttatttgaacacctatgatgtcatgaattcacagggaatagcttccagcagctcaggttccttccccttggttctcgcaccgtgagcttttctgggtggagcaggctgcagctttagttgaagcaggtacctttctctgcggcttctttctttttctgatcattttcctccacacatttcaggaagccacttagagtgctccgtgtgctccatacgcacataattctctcggcaggaatcttgcccttgtctgtttgcaacagcacgctggagaacgcggtcgactcccagctttgccgcggtcacacctgcggagcttcctttttgaacaatatctattcccttgatgtctacagtatcacctttcttatagactcgcatatacgtggccaaaggaacaactccacgttttctaaaaggccagagaacatccatcgggagcctctcccctttcccctcctgttggtcatttgggccaatgacggaagatggcggttccggccgaaaggaagcgtggctgaactctagttgtgcattaccatgtccatctctagatgaatattttaacttaaaacataatagcataagcttcttggatcacttattatgcaataattcttccaaaaatttgcccagagatagtgcgctgratgcgtctcatcataattctctgaatatgtaaatactagcgtcagttgctaacaaagtatgttttgtaaggcagaacagctacgtaaaggcttttcattccttctgctcaggtgtaggaaacagctttggggaactgttattttgttgttgttttgagacaaggtgtcc

SEQ ID NO: 701776 - DNA, 672 bp, Homo sapiens
gatacgtgtgacatgaggtttatttataacttagccccacaagaagatgcagttaaatatctgtgttagtggaaattaattagaaggtcacaaaaatgtttttgagttaaataattttagagtcaagactcaacaatacagcagtgtcagaaataggtgtcaaaatcctatcattattggaagaaatattattagttcaaacctactgcaataatctattttctggttcatctttctgatgtgaatgaattctgcaaaataagtactgttgaaaaaagtttccaaggctacagattactgtggaagagaatactaatttcccccctaagttaattttctcctttttcctttaatattagattcccaagttttagctgagcacaagtcctctgtaaatacagattttgttggctaacctcccttgcagtcaggcatggccaagtaactaagttctggccccacaggaggctgtgtcccctcgggctggagccacaggtagctcgtggcagatccccaggccagaacccccggactttagagggasatcacctactgctacttctaagtcagttctattattagatacagaaaccaagtgctccttaattaatataaacacttcatctctgaaaaagtggtcacctgttcctagaaattgactgcaccttgtca

SEQ ID NO: 701777 - DNA, 2441 bp, Homo sapiens
aggctttttaaggaccgtggaaacctcatctctttcacactcactggatagaaaaaacgggttgctgatacagccaatgagctggtaatcatgcagaagcctaggcacacccaagagaagttattacagggtgaaatgctatctgtgggtgtctggccatgggaaaaaccagttaatctatgggataaattacaagtcttttagagaacaaacaggtttcaccaggttctgtctacttcttcaaccactaacgcatgacataatttctgctccagaaacaccacttatcatggcacacatacgtacctttttatttcacatctctatttatttgatcacatggtctggccaccttatctaataccaattcatactaatgtttttaccgaggtttatctcctccaggaacccttcctctatgagttagattggaaagatttcttttatcatggtacttactacattgtattataaatatctgcttataggtgggacctgctttgatgtgggagtgactttggaccaggggctgcttttttttttttctttttgagacagagtctcgttctgtcacctaggctggagtgcagtggtgcaatctcagctcactgctacctccacctcccgggttcaagcaattctcctgtctcagtctcctgagtagctaggattacaagtgcacgccaccatgcccagctaatttttgtatttttagtagagacggggtttcaccgtgttggtcaggctggtctcaaactcccaacctcgtgatccgcccaccttggcctcccaaagtgctgggattataggtgtgagccaccgcacctggccagggctgcattttattaattcattttagtatccctaacacagaatccagtgtgtggaaaatgctggaatctagccaattgcccaaacttccttcctctgggattttaaccggttggtcccagacataaagatcacatgaaaatctaagtaaagtgtcatctttatccctagttgggcaggggccagtaacaatgcaaagtttctgattaactgcattgacaagtgtggcttaggcttagagtcaagcctgggcttcctacctcctctccatcaaaaccttaacagtcaggctgaaagaggtgctgagagaaagaagttttgttaccagcattatcagcagaaagagctgatgctgataaacgatgaaaccagccaatgtttgactttttctagaaagaccatgagttgttttttcttatgataaaacccataaggattacaaaatgtactgcagagaaataggcttcagcaaaaatgaagtgcagtcatttcctgagacacttggacaaaattgcaggggggagtcaaagtaaagctttgatggtccatattatccaccaaatgtatttctagcaaataccaacaaattctgtggctactggaggtcactgtgtcagctgtcccgcttcactccacctaaagatacaactaagaaaaccataaagggatagagtgatagaatgaggatcccaccatctgcctaagggcttacatgtgacttcggaaactggcataaagaggaaggcgagggccagacgtggtgactcatgcctgtaatcccagcactttgggaggccgagatgggaggatcatttgaggtcaagagttcaagaccagcctggctaacatggcraaaccctgtctccacccaaaacacaaaaattagccaggtatggtggtgcacacctgtaatccaaggtactcaagaggctgagacaggagaatcagttcactgattctccaggaaacggaggttgcagttagctgagatcgtgccactgcattccagcccgagcgaccaagtgagactccatctcaaaaaaaaaaaaaaaaaaaaagaggaaggcaaggtgatgtcatggagtggattcactagaaaaatataaaaacatctattaaaaatgttttaagttacactaaaagcaatggcaacaaaagccaaaattgacaaatgggatctaattaaactaaagagcttctgcacagcaaaagaaactaccatcagagtgaacaggcaacatacaaaaatgggagaaaatttttgcaatctatccatctgacaaaggtctaatatccagaatctacagagaactcaaacaaatttgcaagaaaaaaatcaaccccatcaaaaagtgggcaaaggatatgaacagacacttttcaaaagaagacatttatgcagccaacagacacatgaaaaaatgctcatcatcactggccatcagagaaatgcaaatcaaaaccacaatgagataccatctcacaccagttagaatggccatcattaaaaagtcaggaaacaacagatgctggagaggatgtggagaaataggaatacttttacactgttgggagtgtaaactagttcaaccattgtggaagacagtgtg

SEQ ID NO: 701778 - DNA, 2441 bp, Homo sapiens
aggctttttaaggaccgtggaaacctcatctctttcacactcactggatagaaaaaacgggttgctgatacagccaatgagctggtaatcatgcagaagcctaggcacacccaagagaagttattacagggtgaaatgctatctgtgggtgtctggccatgggaaaaaccagttaatctatgggataaattacaagtcttttagagaacaaacaggtttcaccaggttctgtctacttcttcaaccactaacgcatgacataatttctgctccagaaacaccacttatcatggcacacatacgtacctttttatttcacatctctatttatttgatcacatggtctggccaccttatctaataccaattcatactaatgtttttaccgaggtttatctcctccaggaacccttcctctatgagttagattggaaagatttcttttatcatggtacttactacattgtattataaatatctgcttataggtgggacctgctttgatgtgggagtgactttggaccaggggctgcttttttttttttctttttgagacagagtctcgttctgtcacctaggctggagtgcagtggtgcaatctcagctcactgctacctccacctcccgggttcaagcaattctcctgtctcagtctcctgagtagctaggattacaagtgcacgccaccatgcccagctaatttttgtatttttagtagagacggggtttcaccgtgttggtcaggctggtctcaaactcccaacctcgtgatccgcccaccttggcctcccaaagtgctgggattataggtgtgagccaccgcacctggccagggctgcattttattaattcattttagtatccctaacacagaatccagtgtgtggaaaatgctggaatctagccaattgcccaaacttccttcctctgggattttaaccggttggtcccagacataaagatcacatgaaaatctaagtaaagtgtcatctttatccctagttgggcaggggccagtaacaatgcaaagtttctgattaactgcattgacaagtgtggcttaggcttagagtcaagcctgggcttcctacctcctctccatcaaaaccttaacagtcaggctgaaagaggtgctgagagaaagaagttttgttaccagcattatcagcagaaagagctgatgctgataaacgatgaaaccagccaatgtttgactttttctagaaagaccatgagttgttttttcttatgataaaacccataaggattacaaaatgtactgcagagaaataggcttcagcaaaaatgaagtgcagtcatttcctgagacacttggacaaaattgcaggggggagtcaaagtaaagctttgatggtccatattatccaccaaatgtatttctagcaaataccaacaaattctgtggctactggaggtcactgtgtcagctgtcccgcttcactccacctaaagatacaactaagaaaaccataaagggatagagtgatagaatgaggatcccaccatctgcctaagggcttacatgtgacttcggaaactggcataaagaggaaggcgagggccagacgtggtgactcatgcctgtaatcccagcactttgggaggccgagatgggaggatcatttgaggtcaagagttcaagaccagcctggctaacatggcgaaaccctgtctccacccaaaacacaaaaattagccaggtatggtggtgcacacctgtaatccaaggtactcaagaggctgagacaggagaatcagttcactgattctccaggaaacsgaggttgcagttagctgagatcgtgccactgcattccagcccgagcgaccaagtgagactccatctcaaaaaaaaaaaaaaaaaaaaagaggaaggcaaggtgatgtcatggagtggattcactagaaaaatataaaaacatctattaaaaatgttttaagttacactaaaagcaatggcaacaaaagccaaaattgacaaatgggatctaattaaactaaagagcttctgcacagcaaaagaaactaccatcagagtgaacaggcaacatacaaaaatgggagaaaatttttgcaatctatccatctgacaaaggtctaatatccagaatctacagagaactcaaacaaatttgcaagaaaaaaatcaaccccatcaaaaagtgggcaaaggatatgaacagacacttttcaaaagaagacatttatgcagccaacagacacatgaaaaaatgctcatcatcactggccatcagagaaatgcaaatcaaaaccacaatgagataccatctcacaccagttagaatggccatcattaaaaagtcaggaaacaacagatgctggagaggatgtggagaaataggaatacttttacactgttgggagtgtaaactagttcaaccattgtggaagacagtgtg

SEQ ID NO: 701779 - DNA, 1674 bp, Homo sapiens
agtaaaggaatgtgtgaaacaaaaagcaaggccaggcatagcagctcacacgtgtaatcctagcacttgggaggccgaggcagatggatcacttgaggtcaggagtttgagaccagcctagccaacatggtgaaaccccgtctctactaaaaatacaaaaaattagcacagtgtggtggcacatgcttgtaatcccagctacttgggaggctgaggcgggcggttggttgaacccaagaggtggatgttgcagtgagccgagatcgtgccactgcaccagagtgagactccatctcaaaaataaataaataaatagataaataaataaagcgaaattaccatctccctaagccagtcttcaaaggtagccattttgaatgacctgtgaatatgaagatattaatacataccttcatattctatttctaagcaatcatttcaatgtagtgtgtgtgtgtgcgtgtgtgtgtgtgtgtagctttttcactgttaaggtgttgattgcatgattgtatatgtaagtcaattttttttacaagaatatggatagtgatttaatgtattcctgcaacacaaattatctaatctattccctattaatgagaatttaggctgtttactttttttactatttgacaatgcagaaataattatctttgtatgtgcatctttgtgcacttttggagacattttggttcattaaattcttagtattgacatatcagcaacaaaggatacgtacatttaaaatatctaaaaataactgccaattgctctccaarcagtttagattgtaacaaagcaaattcccaatacagtgcttaaaaattcatcaagtagtaatgactgctttataatttttaccgttgtgatagaagaaagactgagattctttttttaaacatattttacaaattaaataataataattacagtttcagagaggtgattttttgcccaagttcacaggaacagtgagtggcagagctgaatcacaatcctgggctatttgactcctaagtatgtgcttttcttttctccagtgattcccaagccagcagatcactggaaacacacacagagctttaaaaaacacagctttgctccagcagagatccatctgcattttttaagttccttggttgactcaaatatcagttctatctctaattagatataagaaagtgttataaagttaacatactcagtaaagcaggctgaccggctggaaacttaacctgtatgtgtctcttctgtgggtgcccttcatggaggggcaggaggagtgaaccctgtggctctttagccaggtatggaagagaaacattctccttctaggaggtggaagggctagtcttttctatgtctaaggtccaaactcttcctaatgggacagtgggaatggagtaacctcaccatggagtgaatccatcagtggagggctgccctggccaggcaggaagctgaacttatgtgggactgcaatggcagtgaaccagtgtgagcagagcctgacatgaggagcagcacggggtctgcagtagccaccagtttggacaccaaccccaggcctccaacctcaccatctgccagaggcaaggctcaagccttccaaattattgaatgaccagagagagaaagtaatccggagtttctgccacttgatggttggca

SEQ ID NO: 701780 - DNA, 728 bp, Homo sapiens
ccgcctctgagctgctgagatccatcagggtctccccttatctgggggcatctccctttcacctctggtcagtgcctcgtgttagtctgtctgttgctggaacagatgacctcaaagtgctcagcacggcccacgtgtgtgacctcagcttttgtgtggataacctggaatccaagcacacctcagctaggtcctctgcttgaagcctccctcgcatgaggctgtggtctcagggtcartggggctgggcttgctgctggtcggatgtggctccttctgggctgctggactgagggcctggattcctccagctgttggccagagcgcactcagctcctggccgtgtggcccacagtgtggagcttgcctcatccagccagcaagatgaagccagatctcttctcatctaatccgctgagggacccctgcctgcgtgctggtcagaggccagccgctctggggcagggactcataggccaccaagtccgagggccatcccagacgctgccgaccatgggcctcttctgctcggcttccctggttttcagcctcctcatgtcacagcttcacctctgccagctctgctttttttatctaccctccagctggaggaggcgccccgactgcgggctctcctgtccgactcagtgctgtgctgacatcgcctcctggcctggtctgttttgtcgctgactaccggcacgtggttccccttcaatcaggtttat

SEQ ID NO: 701781 - DNA, 666 bp, Homo sapiens
catggtagggtgggcacttgacagtgggcgactgatgttaccgagtttcttcactttcattttatggtgggatctcaaagggaatgaaatacactcatgctgggaatgtccgggcttatttagtagctcttagygctttccacaagatggaactggggtctgctttttctgtcagatatgcctcaggtaatcttttagcaagaaaggattaagccaggtttcagaataaatacacttctctcagagccgcaaggttgccagcttcctcatttagggaagctgctccccgttgcccccattctgttttccacaagataccgtacctgtcacagaggagccaaggctactgtaaacggggtcacaggccgggtgacagcgggtcgctccagccctaccccgggattctcagctcttggaaaacagatgagcctgtttcttcatgaagcacctttgaggcagtcatgtcacaagtttgagaattttctaatgttactatgtatcatttaaatttaaaatttaaaatgtcttctacatctgtgatgacttcctcttttgagctctaatttggtgacttggaatctgactgttgagtcatttactacttgtgagaccttgggcaaaatgcttaaaccccgtgcctcagtttcctcatatgcaaaatgagaa

SEQ ID NO: 701782 - DNA, 632 bp, Homo sapiens
tcagacccctgcggcaggtgagacacaaaggccattccggaccgcactccacagtgaggccagcacccgcatccatgcaccaggccaccaagaagggccgtctgtccgccagcaccgtctggtgctgctaggtctctgggaaggactccagctcctgacttaygggcactggcaagtactaggtagacagactggagctcgaggggacatcagagccctctggacaggcccagagaggggctgcatgtggcccaaagcacccagcccaaggactcagaccccaccaggttgtgtgccctcctcaacctcatagcagatagggctctgaggcaaagcccctcccctgcctgcctcccttttgagaagcctgaagccccatctgatcagccctcgaatgtccactaaatgcctctaaacaggaggtggggttcagcctctcacagacaagtgtgcctgagagcctcaggtgagccaggggccactcagcagaggcacaggctggagggacagggccctggacaggtgcagtttgatgagggtagaaggacacagatgacgcctgggccagcgtcacccacacaccagcccctggccacacagctgctgatcactctgtacatggctggtgagac

SEQ ID NO: 701783 - DNA, 632 bp, Homo sapiens
tcagacccctgcggcaggtgagacacaaaggccattccggaccgcactccacagtgaggccagcacccgcatccatgcaccaggccaccaagaagggccgtctgtccgccagcaccgtctggtgctgctaggtctctgggaaggactccagctcctgacttatgggcactggcaagtactaggtagacagactggagctcgaggggacatcagagccctctggacaggcccagagaggggctgcrtgtggcccaaagcacccagcccaaggactcagaccccaccaggttgtgtgccctcctcaacctcatagcagatagggctctgaggcaaagcccctcccctgcctgcctcccttttgagaagcctgaagccccatctgatcagccctcgaatgtccactaaatgcctctaaacaggaggtggggttcagcctctcacagacaagtgtgcctgagagcctcaggtgagccaggggccactcagcagaggcacaggctggagggacagggccctggacaggtgcagtttgatgagggtagaaggacacagatgacgcctgggccagcgtcacccacacaccagcccctggccacacagctgctgatcactctgtacatggctggtgagac

SEQ ID NO: 701784 - DNA, 632 bp, Homo sapiens
ggtaacatgatggaaaaagacccaatccctgccctcaaggagtggcagctgttgtatttggttgatttccccccagttgatgatattaaaaccccacgtggcctgagtagagttgctgaaagagcggtgagagaaaacagcaaatgcttgtctgagttcacgtagccctgggagttggcaattccaatcacaattacagtcttttctgtcagggttgacctttaaggagattgcctcaattataaaaggtcaacatctcctggttctggcacaagcaagtcctgagctcggtaataaaatatagccaaataaccccatggagtctcttacctctgccacccagcaatggcctgtggctgttagacttctttggaacatagtggtcatgtagctgtcagatgcaaggtgtgtactgggaaatttgtatttacatcttaatgtcagtcagcctgtggacttttaaattagcaattcaaactttgsttttatagctagttagtcattacgcccaaacaagtcaatttcaaggattatgcacttctccatacaaaagttaaggtatgtgagttaaggctatagtatgtaacttttagaggactcattcctccaggtatgagggcaagtgggcaaga

SEQ ID NO: 701785 - DNA, 635 bp, Homo sapiens
agacagctttaaggaagtcaagagacaaatctcatagacatgctatcaaagagctggttaccctcagctttttttttttttttttttttactgaaataaacagcctaaatgggataccttaaaatggccttcagagggccgaactccaaacagggtgattaaaatagccttttccttttaaaatgacctgaagcttgaggcatttagttcaraaagactgttttttgtttctttgcttgtttgtttttcagttctccatgaatctatgacaaacagcagccaattgtcaacagttgccaggtagaaaagaattgaactaatctgacttggcagctcttctcccatcccaaacttgacatttttcatgttatgctggaattatgtgcccagaaggacttaaatcctcttttctgataaccttataccttaacaccagctctaagttgtagaagaaataaggaaattttacagtgctgaaaacggcccctttgtgacatagtattgctcagtttggtatctactctggttgagaacattctctgaaccccaaacatgccagaaattcataaccgctcctcctctgggggatgggaatatggcttctcctgatactagaatcccagttacaagctgat

SEQ ID NO: 701786 - DNA, 1407 bp, Homo sapiens
tagtgcccttataaaagaggcttgagaaagctttcttgcccattccatcatatgagggcacagtgttcgtctcttctgccatgtgaggacaccacaacaaagtgccatctttgaagcacataaaaaaaggaagtcacatgagcaatggtatagatattacaaatctctaccttcaccaccttcctggtactttcatctctaccttctgtaatcccactctttccctcttcacagttctcagtgagaaaaatacaagggtaagatcaagactgggaattcacaaggagtgccccaaataggtccaagaggggagagttgggaaamctgagttgagggcaaggaaaagtgaagaccagaagtaggttgcaaagttataggggtgagcactgatccaaagtcaggcaaacagcagttccagaaacagagctaaagggcagataacacattaatgatgttctatataaagaatcctacaggccaggcaccgtggctcacacctgtaatcccaacactttgggaggcgaaggcgggcggatcacctgaggtcaggattttgagaccagcctggccaacatggtgaaaccccgtctctactaaaaatacaaaaaaaaaaaaaaaaaaaaaaatagccaggcctggtagcgggcacctgtaatcccagctactcaggaggctgaggcaggagaatcgcttgaacccaggaggtggcggttgcagtgagccgagatagagacactgcactctagcctgggcgacagaatgagactctgtctccaaaaaaaaaaaaaaaaaaaaaaagagaatcctacaaatcattaagaaatagacaaatcataagcgagagaaagcaaatgatacaaataggcatttcacagaataagaacaagtgaccaaaaaatacaaaaaattctaaatcatgaataatcaaagaaatgaaaatttaaaaaattaggagatactattggtttttccaattggcaacaatgaaaataaataagatcgagcaatggcgataagggaaactactctgttcgtacacaatttatgggtgtgtaatttgacagatggtttcaaatgctcggccttggaaactaaaataaggaaatgctcctccaaggacatacagtagcatggtttaaaatagctgaagattggaaataaccttaatatctgttaatattgaatggttaagtaaatcaaagtacatttgtcttattggataccacatagccataaagaatgaaatttatctatattgaagctgtcctcacagggttaacaagaattctggacagaaatatagttataattaagcattaatgaggctgcaagttggcccacatccttgtaaaatcatgtagcactagatactgatgatttggatccccattgctccaatagataaga

SEQ ID NO: 701787 - DNA, 1407 bp, Homo sapiens
tagtgcccttataaaagaggcttgagaaagctttcttgcccattccatcatatgagggcacagtgttcgtctcttctgccatgtgaggacaccacaacaaagtgccatctttgaagcacataaaaaaaggaagtcacatgagcaatggtatagatattacaaatctctaccttcaccaccttcctggtactttcatctctaccttctgtaatcccactctttccctcttcacagttctcagtgagaaaaatacaagggtaagatcaagactgggaattcacaaggagtgccccaaataggtccaagaggggagagttgggaaaactgagttgagggcaaggaaaagtgaagaccagaagtaggttgcaaagttataggggtgagcactgatccaaagtcaggcaaacagcagttccagaaacagagctaaagggcagataacacattaatgatgttctatataaagaatcctacaggccaggcaccgtggctcacacctgtaatcccaacactttgggaggcgaaggcgggcggatcacctgaggtcaggattttgagaccagcctggccaacatggtgaaaccccgtctctactaaaaatacaaaaaaaaaaaaaaaaaaaaaaatagccaggcctggtagcgggcacctgtaatcccagctactcaggaggctgaggcaggagaatcgcttgaacccaggaggtggcggttgcagtgagccgagatagagacactgcactctagcctgggcgacagaatgagactctgtctccaaaaaaaaaaaaaaaaaaaaaaagagaatcctacaaatcattaagaaatagacaaatcataagcgagagaaagcaaatgatacaaataggcatttcacagaataagaacaagtgaccaaaaaatacaaaaaattctaaatcatgaataatcaaagaaatgaaaatttaaaaaattaggagatactattggtttttccaattggcaacaatgaaaataaataagatcgagcaatggcgataagggaaactactctgttcgtacacaatttatgggtgtgtaatttgacagatggtttcaaatgctcggccttggaaactaaaataaggaaatgctcctccaaggacatacagtagcatggtttaaaatagctgaagattggaaataaccttaatatctgttaatattgaatggttaagtaaatcaaagtacatttgtcttattggataccacatagccataaagaatgaaatttatctatattgaagctgtcctcacagggttaacaagaattctggacagaaatatagttataattaagcattaatgaggctgcaagttggcccacatccttgtaaaatcatgtagcactagatactgatgatttggatccccattgctccwatagataaga

SEQ ID NO: 701788 - DNA, 1498 bp, Homo sapiens
caaaaattagccaggtgtggtggtgcatgcctgtgatcccagctactcgggagactgaggcaggagaattgtctgaacctgggaggcggaggttgcagtgagccgagatcataccactgcactccagcctgggtgacagagtgagactccgtctcaaaaaaaaaaaaaaaaaatctcaaaccaatgtctttctctaaggcacaacaatatttcctctttcctcttttcagtctagtttttatccaattacagaaaacctcttcctttccttttgttaaaaatagtaaagctctaatcacagcttttaagtttagtgtacaaaacacacacaccccaaatcttccactcaagtttttaagccagccacataaggagttcagctgtaatgtaaactgtgagttgctggttaacagaatgcaagatcgtcaacgacaaggatttgggattttgtctgttttgttcagatactggcatgaaatgggggcctttgcacacagaaggcactcagtgaacataagaattggctggagggttacagactaaatactattagactgttctgaattctttacttctcagtgggttggtagctcagagtaaataaaagcagaaagcctcccaaagctcaacaaaatctcctatataatcttaacatttggagtgctttgaattaattatgttcccccacccccacttttgttttttttgagacggagtctcacttttgcccaggctggaatgcagtggcgcgatttcagctgggttgaacctccacctcctgggttcaagcgattctcctgtctcagcctcctgagtagctaggattacaggcacatgccgccacacccagctaattttctgtattttagtagagatggggtttcaccgtgctgccaggctggtctcgaactcctgagctcagacaatccgcccacctcggcctcccaaagtgctaggattataggcgtgagccaccaggcccagtcatgtcctctttttaagggactaagaaaggccacctgtgttcaacagaaaatgccatttccccacctcagagataaatgctttagtcagaacaaggaaaaggaaaaacactgcccaaataggttaaacacccatgctgacacttctagattctcctactcataagaacatccagtaaccagcccttttcaatgcgaggagtgctcttgatacctacaatcaagaaaataaaatgcgattagatttaaaaatgagttgacattactctcargcttaaaagcgcttcgcaagccttcaaactcttacaaattactctacatattattgatcagaactgcttcttctctggcaaacaacacttattcatttgttttattttcttgtatattatacgtttgaatctacctgataacataactgcattttaaaagttttctataaaagacaaggttttttcctatttctagcacacaaatgtacttttcattcacaactgattctgaagtgaaggcca

SEQ ID NO: 701789 - DNA, 2962 bp, Homo sapiens
gctctagccttcctgacccacttgcctttctcctctccacaacttctgcagagatgaattcccattaccaccaaataacaactttctttccagctacaacctataccagatggcagaaaatgtgaaagacagttttttacaacatctgcaagattttcttaatagacaaccaaatatggaactatatacatacaaagtaatataacacaggaatttattatataaagacattgaaagagtaagcaagcagacaggcaacagagagatataaaagttagaagaaatgattgtttttccaaggaagaaagaagtaaataaataaaaaattagagtgtaatgacagaacaattcacttgagataaatatttcttttcacttttaagattaaacttatgtgatatactatgagtctgaatatcttgaattccaaatgtcaacatggaatgccaaaaatagggaaaaattatttgaagaaaagtgaaattttttttcagacttgggctgcccaggtcatcttaattactttatatatttcattcatgtaatgccaactacacatgtttatatgattacctatttaacaaacttccttagaattttgtttcatattttatgtatttcccagtcttccaaggggaaaaaaagagggaaaatatttcaggaaactgtctttgagggaatttgtaaaatattttctgtattacagtgtgacttgaagatagaaaaaggatactatagaaatctcagaggatcatcttgtcacaatgatgcatttgacaagtatttaattagtcttacatattttaaaggtgagaatgtttttataactcaattcccatgattagaaaacatctacttaaataaatcacatagtaaatgttagtgcctttcttcattttgagttagcgaaaatcccagaaattttcctgtgtgtaccaaattaagacatgtttctatgtgtgccttcaaactcatacactattacaattttatttttgcttatctggtttttgttttgttttgtttcttttctttttgcgaaaagtctaagtaactggagttacctaacttttattttcccttttcatttcagaaagtagcaaatatctggcatatgattgttattgttcatgttgtagaaagagtgtattgtccttgatcatataatcctgtattttttttccaaaagggctctaattttaaatgttgaaagcaataagcctctttatttacttatttatttacaaagtaaacccaaggaatttgtcttatttttaagaataaaaaataatttcatttgtaaaattttccccaaagtgtttcttacatagaattctatcatgttccagtgtaaaccacacttgaatcaatttccataagaaagcattatatgagtttacaagtatcagggacatctcaaccaaagggtaatgatagacggaagtgcacaaaatgacactaatgtgtgcagccaaatggtacaggattaggtgttacacctagttttttaacattctcactaacaaacacttagctgtggtaaacaacaaattaatttacagtgaacatgactttggaaaattttgtgggtatttttatagtgagaaaaactgtttagtttctcaaaatattttaaaatcaaatttacataatatgttttatgcacttattaaaataaaaattaaagtatatacagtacagattcttggatatttcctttaaaatatataaagaagctgcatttgtctaagattttataaatgcatcgaagaagtaaagtatctcataacaagaagcttatctgccattctgcaagaataatttcatgaagccttgaaaactgtatacgctaatgagtggataatgcaataaccttgaggccttctgcactcagattgccctatcataaaaatgtgagcaaacttgagtaacataaaaacaaatattcacaaatttattttaatggagcccacacaaaaatgtgtaaggcagaaacaaggttaaagtatataaaatgataatgctattaaatttaataatcaatgagaaaagtggtagagaatcatatttgctctttgacatgtcttgattactattgtggaagagtccaagactaggaatccactgtaaacccaggatacagaggtggctatggaaggttgcctgctccaactgattaatgtgcctctggtatatgaggcaaatgctgctccttgaattggcacacaactcctctacctaacttcacaggaaggttcaatcagtctcattgttctactctagctgtataggatataatctcaaacgataagaaattgcagctatccttgtactaagcaaatcaagacctgtctttttaatctgcaggtgaaatttgatacgtcctttgaaaactaagtatgttattggtaattgattacggatttgaagcttttattcctagatttcttaaagggccagatatgtatctagctattggaattgacacttgtttacactgaatttctgagtcataagcaacaaaggataaatagaggaaagagtaatagtttgaaaaatgagaaaataacaaagaaagtttatgrtagaatttatttctaaactaccatggacatactgtccctgtttctggttaatttaaaaatgagtaaaattattcttctgaaaagcaatttcttataaattgggtatgtgaatataatgcatgaagaaagtagagcagagagatgaaatatgtaggctctttaagactacagtttagggccaaatctcgagccataagttgttagccatgtgatgtttggtagaatcaatatactgtctgtgcttcagtgttctcatgtgaaaaatcgcattgcaatactatattccaaaaatgtttgaaaatattaaatcaaatgatatatgaacagtgattagaatagtgttggtgattatgaacactttaagattaagtgtacat

SEQ ID NO: 701790 - DNA, 2962 bp, Homo sapiens
gctctagccttcctgacccacttgcctttctcctctccacaacttctgcagagatgaattcccattaccaccaaataacaactttctttccagctacaacctataccagatggcagaaaatgtgaaagacagttttttacaacatctgcaagattttcttaatagacaaccaaatatggaactatatacatacaaagtaatataacacaggaatttattatataaagacattgaaagagtaagcaagcagacaggcaacagagagatataaaagttagaagaaatgattgtttttccaaggaagaaagaagtaaataaataaaaaattagagtgtaatgacagaacaattcacttgagataaatatttcttttcacttttaagattaaacttatgtgatatactatgagtctgaatatcttgaattccaaatgtcaacatggaatgccaaaaatagggaaaaattatttgaagaaaagtgaaattttttttcagacttgggctgcccaggtcatcttaattactttatatatttcattcatgtaatgccaactacacatgtttatatgattacctatttaacaaacttccttagaattttgtttcatattttatgtatttcccagtcttccaaggggaaaaaaagagggaaaatatttcaggaaactgtctttgagggaatttgtaaaatattttctgtattacagtgtgacttgaagatagaaaaaggatactatagaaatctcagaggatcatcttgtcacaatgatgcatttgacaagtatttaattagtcttacatattttaaaggtgagaatgtttttataactcaattcccatgattagaaaacatctacttaaataaatcacatagtaaatgttagtgcctttcttcattttgagttagcgaaaatcccagaaattttcctgtgtgtaccaaattaagacatgtttctatgtgtgccttcaaactcatacactattacaattttatttttgcttatctggtttttgttttgttttgtttcttttctttttgcgaaaagtctaagtaactggagttacctaacttttattttcccttttcatttcagaaagtagcaaatatctggcatatgattgttattgttcatgttgtagaaagagtgtattgtccttgatcatataatcctgtattttttttccaaaagggctctaattttaaatgttgaaagcaataagcctctttatttacttatttatttacaaagtaaacccaaggaatttgtcttatttttaagaataaaaaataatttcatttgtaaaattttccccaaagtgtttcttacatagaattctatcatgttccagtgtaaaccacacttgaatcaatttccataagaaagcattatatgagtttacaagtatcagggacatctcaaccaaagggtaatgatagacggaagtgcacaaaatgacactaatgtgtgcagccaaatggtacaggattaggtgttacacctagttttttaacattctcactaacaaacacttagctgtggtaaacaacaaattaatttacagtgaacatgactttggaaaattttgtgggtatttttatagtgagaaaaactgtttagtttctcaaaatattttaaaatcaaatttacataatatgttttatgcacttattaaaataaaaattaaagtatatacagtacagattcttggatatttcctttaaaatatataaagaagctgcatttgtctaagattttataaatgcatcgaagaagtaaagtatctcataacaagaagcttatctgccattctgcaagaataatttcatgaagccttgaaaactgtatacgctaatgagtggataatgcaataaccttgaggccttctgcactcagattgccctatcataaaaatgtgagcaaacttgagtaacataaaaacaaatattcacaaatttattttaatggagcccacacaaaaatgtgtaaggcagaaacaaggttaaagtatataaaatgataatgctattaaatttaataatcaatgagaaaagtggtagagaatcatatttgctctttgacatgtcttgattactattgtggaagagtccaagactaggaatccactgtaaacccaggatacagaggtggctatggaaggttgcctgctccaactgattaatgtgcctctggtatatgaggcaaatgctgctccttgaattggcacacaactcctctacctaacttcacaggaaggttcaatcagtctcattgttctactctagctgtataggatataatctcaaacgataagaaattgcagctatccttgtactaagcaaatcaagacctgtctttttaatctgcaggtgaaatttgatacgtcctttgaaaactaagtatgttattggtaattgattacggatttgaagcttttattcctagatttcttaaagggccagatatgtatctagctattggaattgacacttgtttacactgaatttctgagtcataagcaacaaaggataaatagaggaaagagtaatagtttgaaaaatgagaaaataacaaagaaagtttatggtagaatttatttctaaactaccatggacatactgtccctgtttctggttaatttaaaaatgagtaaaattattcttctgaaaagcaatttcttataaattgggtatgtgaatataatgcatgaagaaagtagagcagagagatgaaatatgtaggctctttaagactacagtttagggccaaatctcgagccataagttgttagccatgtgatgtttggtagaatcaatatactgtctgtgcttcagtgttctcatgtgaaaaatcgcattgcaatactatattccaaaaatgtttsaaaatattaaatcaaatgatatatgaacagtgattagaatagtgttggtgattatgaacactttaagattaagtgtacat

SEQ ID NO: 701791 - DNA, 2962 bp, Homo sapiens
gctctagccttcctgacccacttgcctttctcctctccacaacttctgcagagatgaattcccattaccaccaaataacaactttctttccagctacaacctataccagatggcagaaaatgtgaaagacagttttttacaacatctgcaagattttcttaatagacaaccaaatatggaactatatacatacaaagtaatataacacaggaatttattatataaagacattgaaagagtaagcaagcagacaggcaacagagagatataaaagttagaagaaatgattgtttttccaaggaagaaagaagtaaataaataaaaaattagagtgtaatgacagaacaattcacttgagataaatatttcttttcacttttaagattaaacttatgtgatatactatgagtctgaatatcttgaattccaaatgtcaacatggaatgccaaaaatagggaaaaattatttgaagaaaagtgaaattttttttcagacttgggctgcccaggtcatcttaattactttatatatttcattcatgtaatgccaactacacatgtttatatgattacctatttaacaaacttccttagaattttgtttcatattttatgtatttcccagtcttccaaggggaaaaaaagagggaaaatatttcaggaaactgtctttgagggaatttgtaaaatattttctgtattacagtgtgacttgaagatagaaaaaggatactatagaaatctcagaggatcatcttgtcacaatgatgcatttgacaagtatttaattagtcttacatattttaaaggtgagaatgtttttataactcaattcccatgattagaaaacatctacttaaataaatcacatagtaaatgttagtgcctttcttcattttgagttagcgaaaatcccagaaattttcctgtgtgtaccaaattaagacatgtttctatgtgtgccttcaaactcatacactattacaattttatttttgcttatctggtttttgttttgttttgtttcttttctttttgcgaaaagtctaagtaactggagttacctaacttttattttcccttttcatttcagaaagtagcaaatatctggcatatgattgttattgttcatgttgtagaaagagtgtattgtccttgatcatataatcctgtattttttttccaaaagggctctaattttaaatgttgaaagcaataagcctctttatttacttatttatttacaaagtaaacccaaggaatttgtcttatttttaagaataaaaaataatttcatttgtaaaattttccccaaagtgtttcttacatagaattctatcatgttccagtgtaaaccacacttgaatcaatttccataagaaagcattatatgagtttacaagtatcagggacatctcaaccaaagggtaatgatagacggaagtgcacaaaatgacactaatgtgtgcagccaaatggtacaggattaggtgttacacctagttttttaacattctcactaacaaacacttagctgtggtaaacaacaaattaatttacagtgaacatgactttggaaaattttgtgggtatttttatagtgagaaaaactgtttagtttctcaaaatattttaaaatcaaatttacataatatgttttatgcacttattaaaataaaaattaaagtatatacagtacagattcttggatatttcctttaaaatatataaagaagctgcatttgtctaagattttataaatgcatcgaagaagtaaagtatctcataacaagaagcttatctgccattctgcaagaataatttcatgaagccttgaaaactgtatacgctaatgagtggataatgcaataaccttgaggccttctgcactcagattgccctatcataaaaatgtgagcaaacttgagtaacataaaaacaaatattcacaaatttattttaatggagcccacacaaaaatgtgtaaggcagaaacaaggttaaagtatataaaatgataatgctattaaatttaataatcaatgagaaaagtggtagagaatcatatttgctctttgacatgtcttgattactattgtggaagagtccaagactaggaatccactgtaaacccaggatacagaggtggctatggaaggttgcctgctccaactgattaatgtgcctctggtatatgaggcaaatgctgctccttgaattggcacacaactcctctacctaacttcacaggaaggttcaatcagtctcattgttctactctagctgtataggatataatctcaaacgataagaaattgcagctatccttgtactaagcaaatcaagacctgtctttttaatctgcaggtgaaatttgatacgtcctttgaaaactaagtatgttattggtaattgattacggatttgaagcttttattcctagatttcttaaagggccagatatgtatctagctattggaattgacacttgtttacactgaatttctgagtcataagcaacaaaggataaatagaggaaagagtaatagtttgaaaaatgagaaaataacaaagaaagtttatggtagaatttatttctaaactaccatggacatactgtccctgtttctggttaatttaaaaatgagtaaaattattcttctgaaaagcaatttcttataaattgggtatgtgaatataatgcatgaagaaagtagagcagagagatgaaatatgtaggctctttaagactacagtttagggccaaatctcgagccataagttgttagccatgtgatgtttggtagaatcaatatactgtctgtgcttcagtgttctcatgtgaaaaatcgcattgcaatactatattccaaaaatgtttgaaaatattaaatcaaatgatatatgaacagtgattagaatagtgttggtgawtatgaacactttaagattaagtgtacat

SEQ ID NO: 701792 - DNA, 2046 bp, Homo sapiens
tgtaattggattaaagtggatcatcaaatacctttatatatagcaacataattttcactctttgtaaagcttttattctacatattactttrtctttttcccatatatgtctttatggaaacttttttttaaaaaaggagtccaatataatttttaggttatttactcaaaatgtattatttgatgtataccttcatatattacatcaatttgtcagaagctggcagtctatagcacatgatggcataggcacttattaaaataaaatctgtagtactttgtgaaccagtccagatgaagagcaaatgtgaggccacgcggggattccatagtggaaatttggttcataatttatcactaaaataagtaagacataatgagaaagaaatttttattctttaacctccataacactggcacattttggtatgtgtttcaacagtcatgagaagtcagcctgaggtaacaagttaggccatgttaaaaatgagtagagtgttcatctatttttttctcaattagtagaatatttccatattcctctaagaagaacctatgtactttaagtaggggcaatatattttagattacagtttccttatggttattaattgattatgggtgtgtgcatgaaacaaaaagtcaattgatcagaaacactgatgagatattattttatttgaagtcaaagagagagaaagtctctcaattccttgccagtgatggagatgtgagcttttgtagctgtcagtggccattctcctgccatgggagaatgttctgcagcataagagaatgagccaagaagagaaaccgaggcaaatgtgaagagagaacactctgacagcctttgagaacttgactttaattgccccataaacccaggtgaccctctatttgtctcatgtattatataaaccagtacatttttcccctagtcttgttttaattgagatcctataatttacgtagaaagaagtcctaatatcctgagaagaccgtatgtatgtgtgtaatgattacatgaatatacaaagagaaaaagatggtagagagaatagtgtagctgactcatagagggaagcaaaaagaagcagcaaatagagcctgaaagacagagaacacccttagtttcaaaatcgtcaggtgtcagagccacttggcaaaatgccaacaatactttatttatataaaatgtccacaccaaaatacagtgtttaaaagaatttaaaagaatttaggctttggactaaaataaataaataaacaaataaataaacaacaaataaataaataaataaaagtgtgcacttactacatgtctaaacttggagcttggaaaatcatttaactttcattttgctcagctgtgaagtgggaataatgaacataattttcatagttgaatatgagaatttttgctaatggaatcgaaagcacttaaccctagtgcctaatgcttagtaaagctcggtaaaatataagtgaaaagttatgcttattgcaataaataagaaaagttaatttgtttttatgtgctaaaaactccttggataaacaaaaagtggcttgtctaacagaactccatttcttttttcaagccaagttaaagtatttaatgaatagctatatactagcatttttctaagtgctgtagaaatgtaaaacacataagttgacatacaatttttaattaattcatttatttaccaattcaacaagccaattaacatttatacaaatttgtagcagctctattttatactgaattaacgaaggtatacattttactggtaaataaaaaaatataaaaattttatttttcttcagtgactttgtttaatgagaaaatagaaataacactgaattagtcgtgactcaaaaataatgtgcagaaccaatagaataaatacatccatatatagagatatttattttaagggattggcacaggtgactgtcagggctggcgtgtctgaaatccatagggcaagctggcaggctggaaattcaggtaagacttgatgttgcatcttgcatgcaaaa

SEQ ID NO: 701793 - DNA, 2046 bp, Homo sapiens
tgtaattggattaaagtggatcatcaaatacctttatatatagcaacataattttcactctttgtaaagcttttattctacatattactttatctttttcccatatatgtctttatggaaacttttttttaaaaaaggagtccaatataatttttaggttatttactcaaaatgtattatttgatgtataccttcatatattacatcaatttrtcagaagctggcagtctatagcacatgatggcataggcacttattaaaataaaatctgtagtactttgtgaaccagtccagatgaagagcaaatgtgaggccacgcggggattccatagtggaaatttggttcataatttatcactaaaataagtaagacataatgagaaagaaatttttattctttaacctccataacactggcacattttggtatgtgtttcaacagtcatgagaagtcagcctgaggtaacaagttaggccatgttaaaaatgagtagagtgttcatctatttttttctcaattagtagaatatttccatattcctctaagaagaacctatgtactttaagtaggggcaatatattttagattacagtttccttatggttattaattgattatgggtgtgtgcatgaaacaaaaagtcaattgatcagaaacactgatgagatattattttatttgaagtcaaagagagagaaagtctctcaattccttgccagtgatggagatgtgagcttttgtagctgtcagtggccattctcctgccatgggagaatgttctgcagcataagagaatgagccaagaagagaaaccgaggcaaatgtgaagagagaacactctgacagcctttgagaacttgactttaattgccccataaacccaggtgaccctctatttgtctcatgtattatataaaccagtacatttttcccctagtcttgttttaattgagatcctataatttacgtagaaagaagtcctaatatcctgagaagaccgtatgtatgtgtgtaatgattacatgaatatacaaagagaaaaagatggtagagagaatagtgtagctgactcatagagggaagcaaaaagaagcagcaaatagagcctgaaagacagagaacacccttagtttcaaaatcgtcaggtgtcagagccacttggcaaaatgccaacaatactttatttatataaaatgtccacaccaaaatacagtgtttaaaagaatttaaaagaatttaggctttggactaaaataaataaataaacaaataaataaacaacaaataaataaataaataaaagtgtgcacttactacatgtctaaacttggagcttggaaaatcatttaactttcattttgctcagctgtgaagtgggaataatgaacataattttcatagttgaatatgagaatttttgctaatggaatcgaaagcacttaaccctagtgcctaatgcttagtaaagctcggtaaaatataagtgaaaagttatgcttattgcaataaataagaaaagttaatttgtttttatgtgctaaaaactccttggataaacaaaaagtggcttgtctaacagaactccatttcttttttcaagccaagttaaagtatttaatgaatagctatatactagcatttttctaagtgctgtagaaatgtaaaacacataagttgacatacaatttttaattaattcatttatttaccaattcaacaagccaattaacatttatacaaatttgtagcagctctattttatactgaattaacgaaggtatacattttactggtaaataaaaaaatataaaaattttatttttcttcagtgactttgtttaatgagaaaatagaaataacactgaattagtcgtgactcaaaaataatgtgcagaaccaatagaataaatacatccatatatagagatatttattttaagggattggcacaggtgactgtcagggctggcgtgtctgaaatccatagggcaagctggcaggctggaaattcaggtaagacttgatgttgcatcttgcatgcaaaa

SEQ ID NO: 701794 - DNA, 2046 bp, Homo sapiens
tgtaattggattaaagtggatcatcaaatacctttatatatagcaacataattttcactctttgtaaagcttttattctacatattactttatctttttcccatatatgtctttatggaaacttttttttaaaaaaggagtccaatataatttttaggttatttactcaaaatgtattatttgatgtataccttcatatattacatcaatttgtcagaagctggcagtctatagcacatgatggcataggcacttattaaaataaaatctgtagtactttgtgaaccagtccagatgaagagcaaatgtgaggccaygcggggattccatagtggaaatttggttcataatttatcactaaaataagtaagacataatgagaaagaaatttttattctttaacctccataacactggcacattttggtatgtgtttcaacagtcatgagaagtcagcctgaggtaacaagttaggccatgttaaaaatgagtagagtgttcatctatttttttctcaattagtagaatatttccatattcctctaagaagaacctatgtactttaagtaggggcaatatattttagattacagtttccttatggttattaattgattatgggtgtgtgcatgaaacaaaaagtcaattgatcagaaacactgatgagatattattttatttgaagtcaaagagagagaaagtctctcaattccttgccagtgatggagatgtgagcttttgtagctgtcagtggccattctcctgccatgggagaatgttctgcagcataagagaatgagccaagaagagaaaccgaggcaaatgtgaagagagaacactctgacagcctttgagaacttgactttaattgccccataaacccaggtgaccctctatttgtctcatgtattatataaaccagtacatttttcccctagtcttgttttaattgagatcctataatttacgtagaaagaagtcctaatatcctgagaagaccgtatgtatgtgtgtaatgattacatgaatatacaaagagaaaaagatggtagagagaatagtgtagctgactcatagagggaagcaaaaagaagcagcaaatagagcctgaaagacagagaacacccttagtttcaaaatcgtcaggtgtcagagccacttggcaaaatgccaacaatactttatttatataaaatgtccacaccaaaatacagtgtttaaaagaatttaaaagaatttaggctttggactaaaataaataaataaacaaataaataaacaacaaataaataaataaataaaagtgtgcacttactacatgtctaaacttggagcttggaaaatcatttaactttcattttgctcagctgtgaagtgggaataatgaacataattttcatagttgaatatgagaatttttgctaatggaatcgaaagcacttaaccctagtgcctaatgcttagtaaagctcggtaaaatataagtgaaaagttatgcttattgcaataaataagaaaagttaatttgtttttatgtgctaaaaactccttggataaacaaaaagtggcttgtctaacagaactccatttcttttttcaagccaagttaaagtatttaatgaatagctatatactagcatttttctaagtgctgtagaaatgtaaaacacataagttgacatacaatttttaattaattcatttatttaccaattcaacaagccaattaacatttatacaaatttgtagcagctctattttatactgaattaacgaaggtatacattttactggtaaataaaaaaatataaaaattttatttttcttcagtgactttgtttaatgagaaaatagaaataacactgaattagtcgtgactcaaaaataatgtgcagaaccaatagaataaatacatccatatatagagatatttattttaagggattggcacaggtgactgtcagggctggcgtgtctgaaatccatagggcaagctggcaggctggaaattcaggtaagacttgatgttgcatcttgcatgcaaaa

SEQ ID NO: 701795 - DNA, 2046 bp, Homo sapiens
tgtaattggattaaagtggatcatcaaatacctttatatatagcaacataattttcactctttgtaaagcttttattctacatattactttatctttttcccatatatgtctttatggaaacttttttttaaaaaaggagtccaatataatttttaggttatttactcaaaatgtattatttgatgtataccttcatatattacatcaatttgtcagaagctggcagtctatagcacatgatggcataggcacttattaaaataaaatctgtagtactttgtgaaccagtccagatgaagagcaaatgtgaggccacgcggggattccatagtggaaatttggttcataatttatcactaaaataagtaagacataatgagaaagaaatttttattctttaacctccataacactggcacattttggtatgtgtttcaacagtyatgagaagtcagcctgaggtaacaagttaggccatgttaaaaatgagtagagtgttcatctatttttttctcaattagtagaatatttccatattcctctaagaagaacctatgtactttaagtaggggcaatatattttagattacagtttccttatggttattaattgattatgggtgtgtgcatgaaacaaaaagtcaattgatcagaaacactgatgagatattattttatttgaagtcaaagagagagaaagtctctcaattccttgccagtgatggagatgtgagcttttgtagctgtcagtggccattctcctgccatgggagaatgttctgcagcataagagaatgagccaagaagagaaaccgaggcaaatgtgaagagagaacactctgacagcctttgagaacttgactttaattgccccataaacccaggtgaccctctatttgtctcatgtattatataaaccagtacatttttcccctagtcttgttttaattgagatcctataatttacgtagaaagaagtcctaatatcctgagaagaccgtatgtatgtgtgtaatgattacatgaatatacaaagagaaaaagatggtagagagaatagtgtagctgactcatagagggaagcaaaaagaagcagcaaatagagcctgaaagacagagaacacccttagtttcaaaatcgtcaggtgtcagagccacttggcaaaatgccaacaatactttatttatataaaatgtccacaccaaaatacagtgtttaaaagaatttaaaagaatttaggctttggactaaaataaataaataaacaaataaataaacaacaaataaataaataaataaaagtgtgcacttactacatgtctaaacttggagcttggaaaatcatttaactttcattttgctcagctgtgaagtgggaataatgaacataattttcatagttgaatatgagaatttttgctaatggaatcgaaagcacttaaccctagtgcctaatgcttagtaaagctcggtaaaatataagtgaaaagttatgcttattgcaataaataagaaaagttaatttgtttttatgtgctaaaaactccttggataaacaaaaagtggcttgtctaacagaactccatttcttttttcaagccaagttaaagtatttaatgaatagctatatactagcatttttctaagtgctgtagaaatgtaaaacacataagttgacatacaatttttaattaattcatttatttaccaattcaacaagccaattaacatttatacaaatttgtagcagctctattttatactgaattaacgaaggtatacattttactggtaaataaaaaaatataaaaattttatttttcttcagtgactttgtttaatgagaaaatagaaataacactgaattagtcgtgactcaaaaataatgtgcagaaccaatagaataaatacatccatatatagagatatttattttaagggattggcacaggtgactgtcagggctggcgtgtctgaaatccatagggcaagctggcaggctggaaattcaggtaagacttgatgttgcatcttgcatgcaaaa

SEQ ID NO: 701796 - DNA, 838 bp, Homo sapiens
agaattttgcaagttgcaaagcactagcagaaaatattaaaatcatgcactttggtgtgagttagttttataattttgtctaggctctgtcacttagaattgtgtgatactgagcaagtcacttagcccacgacttagcctccttatctccaaaaatggttttgataataatatctactccatagaactgctaggaaaattaaagttcaatagaaattaactgagtgtgaacagtactgactcatcaaaattcataataacaacatgaataataaaaaaagccaagatgagattaaataattaaaaaatgagctacttaaaaaatgtgatctaaatagtattgctatctcagtttatttttctaacagtaaaactatacatcgtccctaatttttccatcattttctagttgaagtccaattgaaacagggtggtcacaggagaataaaaaattccaggcagcagtktcacatgactagcaaaaagaaactttgaaaagctgcagaaggtaggggctgaaaagaccctcaaaaacgtggtgtggaccaagctggttaagaactactggacacaacacagtactggatttgactttgtttttatcttggacccctttatatggtcattagcatattaatcacacacctaccggtaccatgacggttccaagaacagccatatttggtgtaaaaatgggcggcatcacagttctgagaaatctccaccttttcccaggagtctccatgaatattccacccctcagttaaagaaacccataaaggtagcagccccaaatccccttgcatgtgactttattttgagtacacccacactcccc

SEQ ID NO: 701797 - DNA, 905 bp, Homo sapiens
aacaaatgaaaaacactaaactacaattgatgtgataatcatatgttatgccacttaccaatacactctggaaatcagaatttagtgtaatttgtttatgagccagtcaaatcaagttttctgaatgagtgtatctagccattttagaaaagattatacttcatacaagcataatctttaaagtctggcattaaaataatgtgtaaaaagtgatgcaaaatgtcacagagtcatttataatagatactttcccaaaggtaggagaaagaacaaagtagtaagtaagacaaagtctaggaaaagtagcttggttcatatgttcaggttgatcagagcacacgcaaagttcagagtgacggacccaagcttaaaccatgacatagacaaaataatgagactgctttaattatcaaagataaataaattgctgatatggtttcactctgtctccctacccaaatctcaccttatctcaccttgaattgtaataatccccatgtgtcaagggcgggaccaggtggagataattgaatcatgagggcggtttcccccatactgttctcatgatagtgagtgagttcacaagatctaatggttttataaggaattttcccctttgcttgattctcattttctctcttgcctgccaccacgtaagatgtacctttgctccttcttcaccttctgccatgrttgtgaggcctccccaactatgtggaaatgtaagaccattaaacctctttcctttataaattacccagtctcaggtatgtctttattagcagcatgagaacagactaacacaattgccattcacaatcggaggtgaattcaccatcttctgtaagaaacatagccaagaacacagaacatagtcataaaaaaggatggagaaggtagaagag

SEQ ID NO: 701798 - DNA, 1298 bp, Homo sapiens
ttgaacagctatattaagagatatgaatctaccttacttttttcctctactcgaattgctttgtttcaaaatatttattttcatagtcttgaagttattgctttaagtataatagctttaaacattttttagcaactgaatcatagtatttcaaacacataaaagaaataggtcctgagaaaatttaacattttactttggatgaaaaattgcagagcccttgttatctcaatgagatcccagctatttatgaggtcacrgtttgaacaccacagtaggttaaaaaaagcaaacaaacttttacttgctgtcacgaagccagaatgaatagaaaagatcacccttcagccaagagacgtaacttgaaagtgacaagccatgtcactgttccttggcatgaaggaagctctggcttacgaagaaggactactgactcttcactatatgtttcatgaaagggtagggacgggaagagaggaaagaaaaggtgaagcaggtattagttccccaaagtggctagaacagggttggatttgtgatcagcatgtaccatctttcatacgtgggtcacagattgttctactctagcttcaaacccatggaccgaccaaacaatccaggatctagctgtgttctgttcccctaagaaatggagaactgttggccgggagcggtcgtcacgcctgtaatcccagcactttgggaggccgaggcgggcagatcacgaggtcaggagatcgagaccatcctggctaacacggtgaaaccccgtctctactaaaaatacaaaaattagccgggcgtggtggcgggcgcctgtagtcccagctactcgggaggctgaggcaggagaatggcgtgaacccaggaggcggagcttgcagtgagccgagatggcgccactgcactccagcctgggaagcagagcaagactccgtctcaaaaaaaaaaaagaaaaaagaaatggagaactgtcattcagttaggagtttcaccctagcagcttaaatgtattcactgtatatacagctcactgtttaagcaacttgacagcagaatggagaaaggagaaacatcttcaagtatacatttgaaaacatctcccttcaataaaaagacaattaaaaataaagaagcatttactctttacctatcttctatatgatctttataccagagcatgacttcatatattaaggtcacttttcagatttaatctagtaaagcatatattgattgttttgtttctaaggaaaattcaaccaatacggcaaaactgtacaaaatgtgtaataaaa

SEQ ID NO: 701799 - DNA, 1298 bp, Homo sapiens
ttgaacagctatattaagagatatgaatctaccttacttttttcctctactcgaattgctttgtttcaaaatatttattttcatagtcttgaagttattgctttaagtataatagctttaaacattttttagcaactgaatcatagtatttcaaacacataaaagaaataggtcctgagaaaatttaacattttactttggatgaaaaattgcagagcccttgttatctcaatgagatcccagctatttatgaggtcacagtttgaacaccacagtaggttaaaaaaagcaaacaaacttttacttgctgtcacgaagccagaatgaatagaaaagatcacccttcagccaagagacgtaacttgaaagtgacaagycatgtcactgttccttggcatgaaggaagctctggcttacgaagaaggactactgactcttcactatatgtttcatgaaagggtagggacgggaagagaggaaagaaaaggtgaagcaggtattagttccccaaagtggctagaacagggttggatttgtgatcagcatgtaccatctttcatacgtgggtcacagattgttctactctagcttcaaacccatggaccgaccaaacaatccaggatctagctgtgttctgttcccctaagaaatggagaactgttggccgggagcggtcgtcacgcctgtaatcccagcactttgggaggccgaggcgggcagatcacgaggtcaggagatcgagaccatcctggctaacacggtgaaaccccgtctctactaaaaatacaaaaattagccgggcgtggtggcgggcgcctgtagtcccagctactcgggaggctgaggcaggagaatggcgtgaacccaggaggcggagcttgcagtgagccgagatggcgccactgcactccagcctgggaagcagagcaagactccgtctcaaaaaaaaaaaagaaaaaagaaatggagaactgtcattcagttaggagtttcaccctagcagcttaaatgtattcactgtatatacagctcactgtttaagcaacttgacagcagaatggagaaaggagaaacatcttcaagtatacatttgaaaacatctcccttcaataaaaagacaattaaaaataaagaagcatttactctttacctatcttctatatgatctttataccagagcatgacttcatatattaaggtcacttttcagatttaatctagtaaagcatatattgattgttttgtttctaaggaaaattcaaccaatacggcaaaactgtacaaaatgtgtaataaaa

SEQ ID NO: 701800 - DNA, 1598 bp, Homo sapiens
taccaggtttcctgggaagtggtcaaggaatgtgggaagggctrcactgctatttagcaaggctgtatagaccaatgtttccctaattttagtacttactagaccagaaaaaatattttttaagtaggggtgagatgactttttaattttacgaagtgaaggcattagaaaaaaactcccaatacttgccttatttttctaattttgctgtggattgggaaacactcatcacaaaccagcatcagtgctgggaaacgattgacatagagagcacaggcctgtcaaactacaccattgtttattaccagacattgtccccaagtcccagataaccccattcacactacgattgcttcatttgccccatatcacttccttcaaatttgagaatccccgcattatgcatttcaaatttaccactgaaactatgcacagttgacccttgaataacgcaaggattggggtgccagctcccatgcaactgaaaatccatgtataactttgagtccccccaaacagaactactactaatagcctactgtcaaccagagccttatcaataacataaacagctgattaacacatattttgtatgttatatgtattatatactgattcttaccataaagtaagatagagaaaagaaaatattattaagaaagtcacaaggaaaagaaaatatatttattgttcgttaagtggaaatgcatcatcataaagttcttcattcttgttatcttcacactgagtagactgaggaggaggaggaagaagaggggttggtgcttctgtctcagagtggcagaggtggaccaaagtggaccatgcccttcaaacccctgtcgtgaaggatccactgtaattcccatcccatcagacactcctagccacaggaaaaataagtaggaatagtaaaagttaatttagagagaactgctgaataattatttgttaactgacttcacatttcataggaaccaacactaacatttaaagtataataatacatttatccctaaactctcaacgtacagccattggttaattatcaccaactccacttagcatcactgcacatatggtggaaatggaaagaaaaataacccaaaggagaaaagaatttttttgtgggggatagggtctggctgtgttgcccaggctgaagtgcagtggcgtgacctcagctcactgcaacctctgcctcccaggttcaagccatcctcccacctttgcctcccaagtagctggaactacaggtgtatgccaccatgcccacctaatttttcgtatgttttgtagagacagggtctcactttgtccctcaggctggtctcggactcctgagctaaagcaatccacccacctcagcctcccaaagtgctgggactacaggatgagccaccacacccagccaggagaaaagaaaactaaacagcatgaacacttatcagcaacccacctaaacataagaaaagcaaacaaacatttgataacaacttgccccaaaaaacccattctcctaaaattactaggaaaaaaattctgttacagcgtctcaataggtaaggggttgatgagtttgtaatgtgttacataat

SEQ ID NO: 701801 - DNA, 1598 bp, Homo sapiens
taccaggtttcctgggaagtggtcaaggaatgtgggaagggctacactgctatttagcaaggctgtatagaccaatgtttccctaattttagtacttactagaccagaaaaaatattttttaagtaggggtgagatgacttyttaattttacgaagtgaaggcattagaaaaaaactcccaatacttgccttatttttctaattttgctgtggattgggaaacactcatcacaaaccagcatcagtgctgggaaacgattgacatagagagcacaggcctgtcaaactacaccattgtttattaccagacattgtccccaagtcccagataaccccattcacactacgattgcttcatttgccccatatcacttccttcaaatttgagaatccccgcattatgcatttcaaatttaccactgaaactatgcacagttgacccttgaataacgcaaggattggggtgccagctcccatgcaactgaaaatccatgtataactttgagtccccccaaacagaactactactaatagcctactgtcaaccagagccttatcaataacataaacagctgattaacacatattttgtatgttatatgtattatatactgattcttaccataaagtaagatagagaaaagaaaatattattaagaaagtcacaaggaaaagaaaatatatttattgttcgttaagtggaaatgcatcatcataaagttcttcattcttgttatcttcacactgagtagactgaggaggaggaggaagaagaggggttggtgcttctgtctcagagtggcagaggtggaccaaagtggaccatgcccttcaaacccctgtcgtgaaggatccactgtaattcccatcccatcagacactcctagccacaggaaaaataagtaggaatagtaaaagttaatttagagagaactgctgaataattatttgttaactgacttcacatttcataggaaccaacactaacatttaaagtataataatacatttatccctaaactctcaacgtacagccattggttaattatcaccaactccacttagcatcactgcacatatggtggaaatggaaagaaaaataacccaaaggagaaaagaatttttttgtgggggatagggtctggctgtgttgcccaggctgaagtgcagtggcgtgacctcagctcactgcaacctctgcctcccaggttcaagccatcctcccacctttgcctcccaagtagctggaactacaggtgtatgccaccatgcccacctaatttttcgtatgttttgtagagacagggtctcactttgtccctcaggctggtctcggactcctgagctaaagcaatccacccacctcagcctcccaaagtgctgggactacaggatgagccaccacacccagccaggagaaaagaaaactaaacagcatgaacacttatcagcaacccacctaaacataagaaaagcaaacaaacatttgataacaacttgccccaaaaaacccattctcctaaaattactaggaaaaaaattctgttacagcgtctcaataggtaaggggttgatgagtttgtaatgtgttacataat

SEQ ID NO: 701802 - DNA, 1598 bp, Homo sapiens
taccaggtttcctgggaagtggtcaaggaatgtgggaagggctacactgctatttagcaaggctgtatagaccaatgtttccctaattttagtacttactagaccagaaaaaatattttttaagtaggggtgagatgactttttaattttacgaagtgaaggcattagaaaaaaactcccaatacttgccttatttttctaattttgctgtggattgggaaacactcatcacaaaccagcatcagtgctgggaaacgattgacatagagagcacaggcctgtcaaactacaccattgtttattaccagacattgtccccaagtcccagataaccccattcacactacgattgcttcatttgccccatatcacttccttcaaatttgagaatccccgcattatgcatttcaaatttaccactgaaactatgcacagttgacccttgaataacgcaaggattggggtgccagctcccatgcaactgaaaatccatgtataactttgagtccccccaaacagaactactactaatagcctactgtcaaccagagccttatcaataacataaacakctgattaacacatattttgtatgttatatgtattatatactgattcttaccataaagtaagatagagaaaagaaaatattattaagaaagtcacaaggaaaagaaaatatatttattgttcgttaagtggaaatgcatcatcataaagttcttcattcttgttatcttcacactgagtagactgaggaggaggaggaagaagaggggttggtgcttctgtctcagagtggcagaggtggaccaaagtggaccatgcccttcaaacccctgtcgtgaaggatccactgtaattcccatcccatcagacactcctagccacaggaaaaataagtaggaatagtaaaagttaatttagagagaactgctgaataattatttgttaactgacttcacatttcataggaaccaacactaacatttaaagtataataatacatttatccctaaactctcaacgtacagccattggttaattatcaccaactccacttagcatcactgcacatatggtggaaatggaaagaaaaataacccaaaggagaaaagaatttttttgtgggggatagggtctggctgtgttgcccaggctgaagtgcagtggcgtgacctcagctcactgcaacctctgcctcccaggttcaagccatcctcccacctttgcctcccaagtagctggaactacaggtgtatgccaccatgcccacctaatttttcgtatgttttgtagagacagggtctcactttgtccctcaggctggtctcggactcctgagctaaagcaatccacccacctcagcctcccaaagtgctgggactacaggatgagccaccacacccagccaggagaaaagaaaactaaacagcatgaacacttatcagcaacccacctaaacataagaaaagcaaacaaacatttgataacaacttgccccaaaaaacccattctcctaaaattactaggaaaaaaattctgttacagcgtctcaataggtaaggggttgatgagtttgtaatgtgttacataat

SEQ ID NO: 701803 - DNA, 654 bp, Homo sapiens
tctgctgtggcatcttgggtaggtaacttaccatgactgtgccccagattcctccttataaaaaatgattcctaattggtatccatctcatagagttgttgagaagaatggggcaataagaagaatgagggaatacacatatggtgcttagaacaggaccaggttcttaggaaataaatgtttgttggattttttttctttactgccattatgttatcacagtaaaggatagtttacttaaaatgtttgcaactcaccctcaagcaatattgacattcttattttcagatcatttcacttcagtgagcacaatgttttaatttttaaaaacgtttttgcattcttttgatttttctcttacgtggtttaaaaagtgggctttattatatatgcttcctcaattgtagttcaatactttaatactttaaaaccgccattatctgtccaagcatatattaattaaatgacctggtcatttaaatatatgtcatttaatgtcacaactcatgagccacyggaaggatcactatggtatcaactaatctttcttcatagcctatacttccttattgtataccaaaaaacccaaaagattataaataattaagactcataaagttacacattatgcaaatcacaatcactttttaaaag

SEQ ID NO: 701804 - DNA, 671 bp, Homo sapiens
tcctacagtctttctaaaagtccactttactatgtcatccaaaagaattgctacaatgttggccacagtgtaggtaattttttacttaaaaaaattacagattcacaggaagttgcaaaagaagaaagaagactcctatgtacccttcacccagcttcccccaatgtacctttcactcagcttcccacaatgtacctttcccctagcttcccccaatgtaccctttgcctacctttccccaatgtattatctcgttctcacactgctgataaagacatatctcagactgcataattgataaagtaaagtagttttattgactcacagttaaacgtggctcaggaggcctcaggaaacttacagtcatggagaaggggaagcaaacatgtccttctttatatggtggttgtaagaagtacagggtgaaggaggggggaatagccccttatgaaaccatcagatctcgtgggaactcactcactatcacaagagcagcatggaggtaactaccctcatgactaaattacttcccactgggtccctcctacaacacataggcattatggaaactacaattcagggtgagatttgggtgggaaaacagccaaaccatawcattctgctcctgacttctcccaaatctcatgccttctcatttcaaaatacaatca

SEQ ID NO: 701805 - DNA, 1216 bp, Homo sapiens
tcatgagaactttttattattcatgcatttaataaatatttaggagcttacattcgccagacacttaggctaaaagataagaaaagttctgtgttgctgttttgcacttgtggctcttggatcagcagatgaacttgcttgagactccagattttatttacatcttgttaactctaggggaggatctaatatgtgaaatcaaatcctgaaactttgaaggacttcatagtttggtttccttcttctctgaagactgttttgagcagcactatccaggtatcagccactttaaggttcctttcaccaatatgaattttatatgggaggttccctgggggcagattatatcatgacttgagattttatgtcaggtttattgttagttcacagaactacattgactgaaaaaccagttgtgattcatagcttatggtgtgtgagtgagatgatccggaccatctaggtggctccgcattctaacgatgcgttaggaatccacactcacagtagatgcacagwagagcatttacttgcttacgaccttttcaggtcaattctcctaagattaacgacatcaatatgtgactatactttatagacattgttcattttcaagtatttgatttaaaagagaacaaggtttattttaaaggaggcaattatttgagccgtatatttgtcactgatttaacataatagactcagcatgataggatatgtatacttcaggatttattacgatactgtaaacaatgaagtgtatcattagtacaaattccatacaagtgaaaatacatgtgtgtacatgaaatacatatcattgggttaaaaagtgcataaagcagggaatacatagagtaccttttctgctgacaaaaaaataaattgagggtcagtttataaagagttattcttaactgataatattttaataatggctataatttctaaaagaagctctcatgaaattgtgatgatataatcatatgtttaataaagacttggaagatgcttgagatatattggcaaattcccaatatgttctgaaaagatttagagcagtcaaaactaaagcaaacctgaatgataatttgggcatgattttatatatgtgtgaattaagcaaaactggaaacacactggaatcaaagacagagtagcccacgaattatgagaattgaatccaaggttaactggacacataggggtctattcc

SEQ ID NO: 701806 - DNA, 1216 bp, Homo sapiens
tcatgagaactttttattattcatgcatttaataaatatttaggagcttacattcgccagacacttaggctaaaagataagaaaagttctgtgttgctgttttgcacttgtggctcttggatcagcagatgaacttgcttgagactccagattttatttacatcttgttaactctaggggaggatctaatatgtgaaatcaaatcctgaaactttgaaggacttcatagtttggtttccttcttctctgaagactgttttgagcagcactatccaggtatcagccactttaaggttcctttcaccaatatgaattttatatgggaggttccctgggggcagattatatcatgacttgagattttatgtcaggtttattgttagttcacagaactacattgactgaaaaaccagttgtgattcatagcttatggtgtgtgagtgagatgatccggaccatctaggtggctccgcattctaacgatgcgttaggaatccacactcacagtagatgcacagaagagcatttacttgcttacgaccttttcaggtcaattctcctaagattaacgacatcaatatgtgactatactttatagacattgttcattttcaagtatttgatttaaaagagaacaaggtttattttaaaggaggcaattatttgagccrtatatttgtcactgatttaacataatagactcagcatgataggatatgtatacttcaggatttattacgatactgtaaacaatgaagtgtatcattagtacaaattccatacaagtgaaaatacatgtgtgtacatgaaatacatatcattgggttaaaaagtgcataaagcagggaatacatagagtaccttttctgctgacaaaaaaataaattgagggtcagtttataaagagttattcttaactgataatattttaataatggctataatttctaaaagaagctctcatgaaattgtgatgatataatcatatgtttaataaagacttggaagatgcttgagatatattggcaaattcccaatatgttctgaaaagatttagagcagtcaaaactaaagcaaacctgaatgataatttgggcatgattttatatatgtgtgaattaagcaaaactggaaacacactggaatcaaagacagagtagcccacgaattatgagaattgaatccaaggttaactggacacataggggtctattcc

SEQ ID NO: 701807 - DNA, 638 bp, Homo sapiens
ggttcagtcattttgctttgacatgcttcaatgactcaattttaaaatgaaaggattagatgcaaccaactctcaagttctttcagagccataactcaatgatctatagrtatattttaaacatcaacaatcccattttcctcacaactcagcacttataggtatggccctaaatttagcagaaccacttcatgtaattttgaagtatgtactatgtcatatatgctggtaatctctctcctgtgatagagtaaactctctggagggtgaggtcctctatcctaaaatttctagtttccccatagtatttaaagttcagagcctacatcattgtaatattgactttacaactgacactaaaattataacaatgcatatctatcattttactgcttaaaaagctactttcccacatggcatccccatgaaggtcttattcgtaatatacagatagagaaataggttcacagaggctaaagtaactgacatcaccactaactagccttgtgaccatggccaagttccatagtttctgtaaatagagcctgtgagataatagtacttatctcataggattgttgaggattaaatgagttaatattgataaaactttagagcagaacctggcacatagtaag

SEQ ID NO: 701808 - DNA, 1271 bp, Homo sapiens
ttgcttcccgcttcaaaaatactgatgctgggctgggcacagtggctcacacctgtaatcccaggactttgggaggccgaggcaggcgaatcacgaggtcaggagatggagaccatcgtggacaacacagtgaaaccccgtctctactaaaaatacaaaaaattagccgggggtggtggcacgcgcctgtagtctcagctactcaggaggctgaggcaggggaatcgctggaacccgggaggcggaggttgcagtgagccgagatgatgccrctgcacactagcctgagtgacagagtgagactccatctcaaaaaaaaaaacaaaaaaaaaaacatactgatgcttcaaccccaggaataaagattcctgtttaatgggtctgagtctgggtataagaattgggatgttaaaaaatctctccaagtgataaataactaaataactaagttaaagcatctagttcttctaacctgctaacctactatgattctgggaaggccttccaacagaaatgggtggttgggttagtgtgcttattatataggcaataaactgagctgccacctgttaacttggtaacagacacagctactgctaagaaagctagctagctatgcaaggcacatgccctcaggctcagacttgatcaagttaatgaaacacccctccaagggttgttctgctgacacatgtcaccatttatgagttgtaattgggtttattaaaaaaggagtcatggcctgtgctttagcagtttggcctaagggccccaaaaatactgagagaagaaatttgcaagccaaactacagctgaaaactagactggggttgaccttgaggtaggttattgtagaacctgaggctcaatgtaagaaaaaaatcaaatatcaaaaccctgcccaagtccaccagaagctttctctgacaaccaacctcactgatatttccctgtctttgaatgtctattgcacatactttaagaaggacaatggccaaaagtttatttaactcaggtttattcgatggcagtttgatttaataaatttatgctttgatagtgaaattatctggattctttaaaatggaatgttattttggtatggccaagggcacagacttggcatctaagagaactaactctctcttttgtgaacttgaggaaattacttaagctctctgagccttagttgtttttttttttttttaataaaatggagaaaggtggaaatatctcacagtacagatatgaaaatgatctgaacaatgtca

SEQ ID NO: 701809 - DNA, 1271 bp, Homo sapiens
ttgcttcccgcttcaaaaatactgatgctgggctgggcacagtggctcacacctgtaatcccaggactttgggaggccgaggcaggcgaatcacgaggtcaggagatggagaccatcgtggacaacacagtgaaaccccgtctctactaaaaatacaaaaaattagccgggggtggtggcacgcgcctgtagtctcagctactcaggaggctgaggcaggggaatcgctggaacccgggaggcggaggttgcagtgagccgagatgatgccactgcacactagcctgagtgacagagtgagactccatctcaaaaaaaaaaacaaaaaaaaaaacatactgatgcttcaaccccaggaataaagattcctgtttaatgggtctgagtctgggtataagaattgggatgttaaaaaatctctccaagtgataaataactaaataactaagttaaagcatctagttyttctaacctgctaacctactatgattctgggaaggccttccaacagaaatgggtggttgggttagtgtgcttattatataggcaataaactgagctgccacctgttaacttggtaacagacacagctactgctaagaaagctagctagctatgcaaggcacatgccctcaggctcagacttgatcaagttaatgaaacacccctccaagggttgttctgctgacacatgtcaccatttatgagttgtaattgggtttattaaaaaaggagtcatggcctgtgctttagcagtttggcctaagggccccaaaaatactgagagaagaaatttgcaagccaaactacagctgaaaactagactggggttgaccttgaggtaggttattgtagaacctgaggctcaatgtaagaaaaaaatcaaatatcaaaaccctgcccaagtccaccagaagctttctctgacaaccaacctcactgatatttccctgtctttgaatgtctattgcacatactttaagaaggacaatggccaaaagtttatttaactcaggtttattcgatggcagtttgatttaataaatttatgctttgatagtgaaattatctggattctttaaaatggaatgttattttggtatggccaagggcacagacttggcatctaagagaactaactctctcttttgtgaacttgaggaaattacttaagctctctgagccttagttgtttttttttttttttaataaaatggagaaaggtggaaatatctcacagtacagatatgaaaatgatctgaacaatgtca

SEQ ID NO: 701810 - DNA, 1280 bp, Homo sapiens
tttcacagcacatacatatatcaaagcatcacrctgggcatcataaatatatataatttttatttgtcaattaaaaaaataagaagaagaaaaagtagttctgatatatctcaggcaatttcatttgtcccaatgtatacttgcattagaatcccattgttcataatgctatttaatgagaacactggtcttttcaagtgaaagttttattagatttagattgataaaatatctaaatagtgccagtgagcctttttgtgtgtgtttttattgctttttgaaattttctaaaatttgttgacatttgttttaatgtcaaacaccctccacatagaaataagatccgaggtatgagggtttgtactatgtgtcttttttgattatagtataatacaactcctgtgaaagtcataaaaccaaagttcaaaggattagaggaaatgagaaattatagttgtccctggttatctgcagttttgatttccccagtttcagttatctgtggtcaagcacaatccaaaaatattaaatgaaaatatcctgaaataaaccatttttagttttaaattgcaggctgttgggagtagtgtgatgaaatctcacactgtcccattcccattccccaaggatttgaatcttctctttgtccagcacatcagtgctgtctatgctactggcccattagttacatagtagccatctcggttatcagatcaactgccatgggtatcccagtgcttatgttcaaggaatccttattttacctaataatggccccaaagcacaagactagtgatgttcatatattattataattgctttattttactgttagctgttgtaattaatttcttactgtgccttatcttaggtaggtatgtataggaaaaaacatagtatatacagggctcaatactgtccgtgatttcaggcatccacaggaagtctgagaacatatcctctaaagataaggggggactactataaatactgccacagattcacagactattgacaactttactgaaagtttgcttagattatcattatacttaaaagcacagtctaccattatacttaaaagaagtctactctgctgcagctagaagaaaatttaagaaagaaaattagaactctatgccaactctgggatataacagttttagagtgccctagccaacaagggttggccacagatagattcaagatcaccaaatggcattttcttggccttgtctgaaaactgctgccccaagtgttcacaggattgtttctttctc

SEQ ID NO: 701811 - DNA, 1280 bp, Homo sapiens
tttcacagcacatacatatatcaaagcatcacactgggcatcataaatatatataatttttatttgtcaattaaaaaaataagaagaagaaaaagtagttctgatatatctcaggcaatttcatttgtcccaatgtatacttgcattagaatcccattgttcataatgctatttaatgagaacactggtcttttcaagtgaaagttttattagatttagattgataaaatatctaaatagtgccagtgagcctttttgtgtgtgtttttattgctttttgaaattttctaaaatttgttgacatttgttttaatgtcaaacaccctccacatagaaataagatccgaggtatgagggtttgtactatgtgtcttttttgattatagtatratacaactcctgtgaaagtcataaaaccaaagttcaaaggattagaggaaatgagaaattatagttgtccctggttatctgcagttttgatttccccagtttcagttatctgtggtcaagcacaatccaaaaatattaaatgaaaatatcctgaaataaaccatttttagttttaaattgcaggctgttgggagtagtgtgatgaaatctcacactgtcccattcccattccccaaggatttgaatcttctctttgtccagcacatcagtgctgtctatgctactggcccattagttacatagtagccatctcggttatcagatcaactgccatgggtatcccagtgcttatgttcaaggaatccttattttacctaataatggccccaaagcacaagactagtgatgttcatatattattataattgctttattttactgttagctgttgtaattaatttcttactgtgccttatcttaggtaggtatgtataggaaaaaacatagtatatacagggctcaatactgtccgtgatttcaggcatccacaggaagtctgagaacatatcctctaaagataaggggggactactataaatactgccacagattcacagactattgacaactttactgaaagtttgcttagattatcattatacttaaaagcacagtctaccattatacttaaaagaagtctactctgctgcagctagaagaaaatttaagaaagaaaattagaactctatgccaactctgggatataacagttttagagtgccctagccaacaagggttggccacagatagattcaagatcaccaaatggcattttcttggccttgtctgaaaactgctgccccaagtgttcacaggattgtttctttctc

SEQ ID NO: 701812 - DNA, 1280 bp, Homo sapiens
tttcacagcacatacatatatcaaagcatcacactgggcatcataaatatatataatttttatttgtcaattaaaaaaataagaagaagaaaaagtagttctgatatatctcaggcaatttcatttgtcccaatgtatacttgcattagaatcccattgttcataatgctatttaatgagaacactggtcttttcaagtgaaagttttattagatttagattgataaaatatctaaatagtgccagtgagcctttttgtgtgtgtttttattgctttttgaaattttctaaaatttgttgacatttgttttaatgtcaaacaccctccacatagaaataagatccgaggtatgagggtttgtactatgtgtcttttttgattatagtataatacaactcctgtgaaagtcataaaaccaaagttcaaaggattagaggaaatgagaaattatagttgtccctggttatctgcagttttgatttccccagtttcagttatctgtggtcaagcacaatccaaaaatattaaatgaaaatatcctgaaataaaccatttttagttttaaattgcaggctgttgggagtagtgtgatgaaatctcacactgtcccattcccattccccaaggatttgaatcttctctttgtccagcacatcagtgctgtctatgctactggcccattagttacatagtagccatctcggttatcagatcaactgccatgggtatcccagtgcttatgttcaaggaatccttattttacctaataatggccccaaagcacaagactagtgatgttcatatattattataattgctttattttactgttagctgttgtaattaatttcttactgtgccttatcttaggtaggtatgtataggaaaaaacatagtatatacagggctcaatactgtccgtgatttcaggcatccacaggaagtctgagaacatatcctctaaagataaggggggactactataaatactgccacagattcacagactattgacaactttmctgaaagtttgcttagattatcattatacttaaaagcacagtctaccattatacttaaaagaagtctactctgctgcagctagaagaaaatttaagaaagaaaattagaactctatgccaactctgggatataacagttttagagtgccctagccaacaagggttggccacagatagattcaagatcaccaaatggcattttcttggccttgtctgaaaactgctgccccaagtgttcacaggattgtttctttctc

SEQ ID NO: 701813 - DNA, 993 bp, Homo sapiens
gactatcttatagaatactaatttcataagatattacagaaattaggtgaaaaaaattttaggacagcaattcatttggggagtcattgagttaaacaaaaataaatttatctgctgcaagacttttcagagtgcttcacatgcaaaaatatgttgtgaatcaactagaaaagaatacctcataagaataaaaaggatattctaatgcaaatacattgacatagctgttttgatacaatcattttaaarctatgtttaaatgacacaataaaaatgaaaagtcattatgtgtccagtagatatctcacacatttccttcataactaagtgtacccaaattatgggaaactttcactttttgcttcatttctgtatcatttggagttagtatgaatttgcattactttgtaagcaagaaaaaatattttaaaatttccacactggtatgtttgttgtatccttcaagaccatcaatacttcaatataaaagagctctatgttatgaaatacatgtgtgtgtatgtaggtaggtatgtatgtttatcctaataaaaacactcaacatccaagaataaaaggaattttctcaatctgattttttaaaaaagcatccacaaaaagattatgcctaatatcacacttcagagagaaatattgaatgtttccctttaaaactgagacaagattgctccccccaagttcaaatttgctcccaccatgtccattcagcattatactaaaagccacagttagtgcaatatggcaagaaaaaaaatggaaaaggaaaattaaaattgtcttaactcatcagagatatgataaactatgcagaaaattactggaactaataaagttagaaagtctgcgagatacaaagttcaacattttaaaatccactatagttgtatatattagcaataaacatttgtaaattgaaatttaaaaaaatttttgcaaaacccaaaaaattatttaagaacaaatttaataaac

SEQ ID NO: 701814 - DNA, 628 bp, Homo sapiens
tctttgtttaggctgtgtggacagatccaccaaagtcccctccagtcacccctggggtcccacagaggtaaacccccgggttctctctgcccatgtcctgagaggccaggaagtagctacgataaggattccatcagccatagactcagggtgggtgggaaggtggctttctcctagttatcttggagtggggaacaagtaagaggcaggatgtgtgggctggaagggcagagacagaggtgcacagtgaagcttgaaagagagaggcccgcagagtgtgtttgctgagagatttcagcaaagttgtgctggaactctgcagccagcagtgcccagtgctgggtttctggattctgctgcctcctgtagaattcgtgagaactaygtgtgtatgcatgtgcgtgtgcagggggtgatagggtggaggcaagggcctgtcattctcaatttagaggaattactttcagatttcttcagggaccatgcatctggaggagggactcatcttcaatttatgtaaccaactgtcaccttagccattggcttcatgggcaggcctaagtggtgtaactgaatggacgggtgaggggagtccactgatatggcctgtgtgcccagcatcgggaat

SEQ ID NO: 701815 - DNA, 916 bp, Homo sapiens
gaatggagatgggggtgtccccggtttatacatctgcagagaagaggtgtgccgggctgcacctctggaggccgcggtaactgatattagagaagaccccggttgcagctgggaaggctcactggctggaaagaggtgcctcctccttccagcaaagggccctgtttggaagggctgcttctcacctgtctagtggcaccacaggacggtcggcttccactcgaattcccccggacggtatcatcacakagccgggtcctcgcagtgttggtttcccaatccgatgactgtcacctcggtgaggacctgtgctgatggccggagaaccctgcgctgcgggcgcacatggccaggtggcgcctggcaggcgacgtccgggtgcaggacggcgctcttaccgccccaccccaaaccgttgcctgggcctaggtccttcggcttcctgaacaggggtttggggggctaaggacgctgaggctccgggggcaggaagttctctctggttaagcgttctctcttctctccggcatacactcccctacccacccacctcgcctaccctcggggcgagaggctcaccaaggcagggcgcgcccccccatgaatcatcccaaggcctctgagccgcgggggctccgggcaactatccccctcctctcctggcctcaggcaccccagtccaggggtctgcagagaagcccgaagcccggacaaacgcgccggacgtcaacaacctctcatccctggcagcagcaaaggccaatatatttccatttcttatttcagtttgccaccaaaacaaagctgcgcgcggctgagggcaggaaggcgctgagaccgagaagaagggacgtcccggagaaagtgcgcccagctgatcttagaaaccagagtcctccgggacttcgccgagatt

SEQ ID NO: 701816 - DNA, 1025 bp, Homo sapiens
ttccctgccttgcttcttcctttccccctctctcgtcccctcctcctctctccttccactggcccctgccccctcctctccactcttaaggagatgctactaactcgctagcggggattcaacccggaggcgcccgagggcttttccgattctaggcggggctggggagatgccaggatccccagggctcccgaggctaggctgagaattggcggggtgtcggagctttgccttagggcaaagggaaatgcaaattttaatgacaggttaaaaaaaagccccccaaaataaacctaacaggttttgacattcgaagccagggggaccacgggcctgcggatgcaagcgagtcctacggactcctgcgcgcgagctcgcgggcgccgctgcgggccttcccgctggcaccttttcctaggtttccaaccttcctccccattcccgttcctacgggagattaacacacacacaagccttcgtcgtccagtgcatggtcacttgcacgtcttgttaactatttccctctgctgtaagggcgctgggctgggatgtagcggaatctgtgctccctcaagccctggagaagccctgggctgggcccggcttcagaagctttagagcactgccctctgcgctcccgtctagaggccgcaccgttcacgccccacgtctgcgcccaggcgaggggatttcctgccaggcgaagtacagagagcggactctggagaccccctgaccttgcccgatagtcgcgctgtcacctgttcactccttggggtcaggggtcggggagaggggtgagaccgtctcttccctttctggcctcactgcccccgactgtaaaacgaactgcttggttttgataggttgtggtttcaccaccactgcgagcctcaaggcccctggcaccgccacagcaagggaaaaaactttgcgcgtgcagcccctcgatttcgcttcatgacaaccgtgctagagattkgcgcccccaattttctgatgagctaacggaggctcagagaggg

SEQ ID NO: 701817 - DNA, 644 bp, Homo sapiens
tgcaaaggtctccatgcccagcctggcactgcccaactgacagcctgtgggtttggggaagagggctcttctggggtgggtagcacctctgtctggtaaggaagggatggtccttccatcccaccattcagaaaaccgagctgaagctggagagagtcaaaggggcaggcttccatgaggacgggagagggctggcttcttgattctctctggctgatactcaaacttggctctgcgtccacacctccctccctcctttccccactcctactctcctccagtccccagagcccattgttcaaccttgtgccatggcttcactcacaggagggagcatggtccataattcccttgtctcctccccacaactatggccctgggcctccaagagtccttcttctctaaggtttcatttgtctgtccacctgccccgccccccaccccaagagttggtgggcagtcagtggcagctgtgttgactcccattccaaccctccctccrtccccagtatggtctctgggttgggagggggcttctggattcgctccaggacagagctggagtgaggcctctgtgatagtggggaggcctgtggggtggtaaaagtgggaaggaaggaggcagcaaaatgctcggacagtgg

SEQ ID NO: 701818 - DNA, 550 bp, Homo sapiens
gactcatttttaatgaattcataaatttttatgaattcataaatattgtttctgagattgttgcttaagcagtatatacacatgtgtatacatttacataatgtataaattataaaggtgtgtgtgcatgtgtgtgtgtgagagggagagagagagaggaagagagagagaccatcgaataattttatttaaagagaaaatcattagtgaacaatagctataattaatttgtattgtatccttgagggttaaatataaccagtgtatgattctaaaagccataaaattcaacactgcactaaaaattaataaggatgcttctctttatgcattttctatgyttttctgtgaaaggaaactttctcttatattttcttttcaaagagcatattaccatttggaattctggcttatcctaaggcagatcccatataagtaggtatttaattctgtaattgaagcttttaaagtaagagttggatatgatttatttatgtttcagaattatacatttgtagtaatgccaacaatcagtggaagttcaggacat

SEQ ID NO: 701819 - DNA, 616 bp, Homo sapiens
tcttgtataataaataacattctccttacttgagtgaataatcagtgtcccagctttggtggtgataagttctgtgctttttgtgtgtgtatggagggtggtagttctacttctcttttgcctgattttgttgggatttttttttctttttttaagagacggagcttcgctcttgtcgcccaggctagagtgcaatggcacgatctcagcccactgcaacctctgcctccagggttcaagctgttctgcttccgccttccaagtagctgggattacaggctcctgccaccacgcccagctaatttttgtrtttttagtagaaatggggtttcaccgtattggccaggctggtctcgaactcctgacctcaggcgatttacctgcctcggcctcccaaagtgctggtttataggcgtgagccaccgtgcttggccctttttgcctgattttgaattttatgggaacagaatccttttgggccttccttctttcattcagtattgtgctttttgattcttaggttgtatgagttgtagttcattcattttcatttctgtccatttttccattatattaataaattacaatttatcctgttgatcggaacttgggttgt

SEQ ID NO: 701820 - DNA, 2801 bp, Homo sapiens
  misc_feature 1494, 1495, 1721, 1722, 1723, 1724, 1725, 1726, 1727, 1728,1729, 1730, 1731, 1732, 1733, 1734, 1735, 1736, 1737, 1738,1739, 1740, 1741, 1742, 1743, 1744, 1745, 1746, 1747, 1748,1749, 1750, 1751, 1752, 1753, 1754, 1755, 1756, 1757: n = A,T,C or G
  misc_feature 1758, 1759, 1760, 1761, 1762, 1763, 1764, 1765, 1766, 1767,1768, 1769, 1770, 1771, 1772, 1773, 1774, 1775, 1776, 1777,1778, 1779, 1780, 1781, 1782, 1783, 1784, 1785, 1786, 1787,1788, 1789, 1790, 1791, 1792, 1793, 1794, 1795, 1796: n = A,T,C or G
  misc_feature 1797, 1798, 1799, 1800, 1801, 1802, 1803, 1804, 1805, 1806,1807, 1808, 1809, 1810, 1811, 1812, 1813, 1814, 1815, 1816,1817, 1818, 1819, 1820: n = A,T,C or G
atttgtcacacagagttaaattactatatagactatccagagacttaccagaaaacaaaaactcaaagcaaaaagctcagcacttacccgagcatcttggtcaatcagttcataatcaatgacagagccatcctctgctcttctaccctatgggggaaagaaaaagaacttcaaatacatttctttgtgtattttaaaactgaaaatgttttctccccagtccatgtacgccattatttaatttcctaaataagtaaccacgtaagatttttcttactttgaaacatagatggggccgggcacggtggctcacgcctgtaatcctaggactttgggaagccaaggcgggcagatcacgaggtcaggagatggagaccaacctggctaacaaggtgaaaccctgtctctactaaattagccaggcgtggtggcacatgcctgtagtcccagctactcgggaggctgaggcaggagaatcgcttgaaccaggttgctgtgatctgagatcacgccactgcactccaaccctggtgacagagtgagactctgtctcaaaaaaaaaaaaaaaaaagaaagaaagaaaagaaaaagaaaaagaaacctagaccagccaaggagtggtaaaatcattgagcaaggaagtgggggctgtgccttgccatcaacaatcccccccttgatacccagtcctggcctacacaccttacagaatccctgtccccatcccccacaaaaagctgatgagatttagctctttctcacagagagcttgcaatgcagatggaggaatatgtggaaacaaatgtaaagcagcccgggaacccacagcactagaaagacacaaaatgcgggcggaggaagaactctcagagggcagagtcagcaaagagtgtgaacgatgggcctgggcttaagctgaaacttcaagggtcagtcagatgcagctagccaagcagagcgggagagccagctggcacacaagggatggcacagcacgctctcaggtaagtaaggagctgccctgtcagagcagagctgagcgggaaagatgagcaaagaagatgcagggagggtttagaggacctttcacagcagttaggagtttaaatttgatgcagcagaaatggggtttgaacagaggagtaaaatggtgaaagtgtatttcacagagatccgtggatggtggtacatggggcaggtggtagcgaagagaggagagcgagggagaatggcataggagttgttgcagtaatggagatgtgagtgggccggacgcactatctgtcatttgtcatcagggttcccagggtctctcgtccctcccctggcacataagtattaagctacacgctggccagaactagggattcacaggggaaatgccccttcctccatgttaatgtgttaatattagcaatcagctccacaaagacaactccaccccagacaaaggactatatgggcaaattcttccatgagaagtaaacgcagtgnnaaaagaaaccagaaggtcacttcccactgggtcctgcatgaccacagatagaggcaaagtgaccttccctaagtcacacggccaaggctctggcacataaatccaggccaggacttgagagccgccatcgcttctctggctccaaagtcacttgtcatgaggtttgcaggatgagagatctattatacaaattgacactctgcagtgacagtgcagaccgacttgnnnnnnnnnnnnnnnnnnnnnnnnnnnnnnnnnnnnnnnnnnnnnnnnnnnnnnnnnnnnnnnnnnnnnnnnnnnnnnnnnnnnnnnnnnnnnnnnnnnnccagttttatgaaaatatttagactaaacaaagtgaagagaatagaaagctgtatttgcatgtgtgcagtttccttgatcaaagaatattaagcaaaaagagaccaaagcaggagtcactgcaatttaaatgtcgttcctgtctatttcaggacgcagctctactctgttttctttattcttggggtgattatgttgatgacctgtcttgtctctgttgagataaatttaccaccaattgagcactccttattggcagggattgggtgtatcaattccgagaactgtatgattgcaaaggtggaaagccaattcatcaggctattgttttgctgccccattaagtatattaactggaagatgacttcatttcaaccatttcaaatcttaaatacaacagattcagtcctttatggaatgagttaaggtcagaaaatctgtccatcgtctttctcataaatactttaatatcttccaagtatcattggactaagaaagtaattatgggtaataataaagattccaattaagaattagggcaacatgaaaatgctactaatttcgattcacatcgtagctttcaggtccttctcaatatgtttaattacttgtgagaaatacagaagtagtggctggttcggcaagcccatcaccttttatgagaagtagaagactcagttttatcctgtctgaacaggttgcattagccatggggaacattttgtttttgcattcacacatcagtctccccaggttctgtttacacagaggaagagaaagactggctagtttagtagtccatcccaacccaaggcagaccatctctgaggtttagtttttacagtcgtaagatgggaattgcatctgtttgcaaaaactactccaatatcgtcagatgaaatggtccaaggagtagaaattagcataatgartcgctgtgcttcagagtaaaggagagcctcttcataaagactttttgttg

SEQ ID NO: 701821 - DNA, 2801 bp, Homo sapiens
  misc_feature 1494, 1495, 1721, 1722, 1723, 1724, 1725, 1726, 1727, 1728,1729, 1730, 1731, 1732, 1733, 1734, 1735, 1736, 1737, 1738,1739, 1740, 1741, 1742, 1743, 1744, 1745, 1746, 1747, 1748,1749, 1750, 1751, 1752, 1753, 1754, 1755, 1756, 1757: n = A,T,C or G
  misc_feature 1758, 1759, 1760, 1761, 1762, 1763, 1764, 1765, 1766, 1767,1768, 1769, 1770, 1771, 1772, 1773, 1774, 1775, 1776, 1777,1778, 1779, 1780, 1781, 1782, 1783, 1784, 1785, 1786, 1787,1788, 1789, 1790, 1791, 1792, 1793, 1794, 1795, 1796: n = A,T,C or G
  misc_feature 1797, 1798, 1799, 1800, 1801, 1802, 1803, 1804, 1805, 1806,1807, 1808, 1809, 1810, 1811, 1812, 1813, 1814, 1815, 1816,1817, 1818, 1819, 1820: n = A,T,C or G
atttgtcacacagagttaaattactatatagactatccagagacttaccagaaaacaaaaactcaaagcaaaaagctcagcacttacccgagcatcttggtcaatcagttcataatcaatgacagagccatcctctgctcttctaccctatgggggaaagaaaaagaacttcaaatacatttctttgtgtattttaaaactgaaaatgttttctccccagtccatgtacgccattatttaatttcctaaataagtaaccacgtaagatttttcttactttgaaacatagatggggccgggcacggtggctcacgcctgtaatcctaggactttgggaagccaaggcgggcagatcacgaggtcaggagatggagaccaacctggctaacaaggtgaaaccctgtctctactaaattagccaggcgtggtggcacatgcctgtagtcccagctactcgggaggctgaggcaggagaatcgcttgaaccaggttgctgtgatctgagatcacgccactgcactccaaccctggtgacagagtgagactctgtctcaaaaaaaaaaaaaaaaaagaaagaaagaaaagaaaaagaaaaagaaacctagaccagccaaggagtggtaaaatcattgagcaaggaagtgggggctgtgccttgccatcaacaatcccccccttgatacccagtcctggcctacacaccttacagaatccctgtccccatcccccacaaaaagctgatgagatttagctctttctcacagagagcttgcaatgcagatggaggaatatgtggaaacaaatgtaaagcagcccgggaacccacagcactagaaagacacaaaatgcgggcggaggaagaactctcagagggcagagtcagcaaagagtgtgaacgatgggcctgggcttaagctgaaacttcaagggtcagtcagatgcagctagccaagcagagcgggagagccagctggcacacaagggatggcacagcacgctctcaggtaagtaaggagctgccctgtcagagcagagctgagcgggaaagatgagcaaagaagatgcagggagggtttagaggacctttcacagcagttaggagtttaaatttgatgcagcagaaatggggtttgaacagaggagtaaaatggtgaaagtgtatttcacagagatccgtggatggtggtacatggggcaggtggtagcgaagagaggagagcgagggagaatggcataggagttgttgcagtaatggagatgtgagtgggccggacgcactatctgtcatttgtcatcagggttcccagggtctctcgtccctcccctggcacataagtattaagctacacgctggccagaactagggattcacaggggaaatgccccttcctccatgttaatgtgttaatattagcaatcagctccacaaagacaactccaccccagacaaaggactatatgggcaaattcttccatgagaagtaaacgcagtgnnaaaagaaaccagaaggtcacttcccactgggtcctgcatgaccacagatagaggcaaagtgaccttccctaagtcacacggccaaggctctggcacataaatccaggccaggacttgagagccgccatcgcttctctggctccaaagtcacttgtcatgaggtttgcaggatgagagatctattatacaaattgacactctgcagtgacagtgcagaccgacttgnnnnnnnnnnnnnnnnnnnnnnnnnnnnnnnnnnnnnnnnnnnnnnnnnnnnnnnnnnnnnnnnnnnnnnnnnnnnnnnnnnnnnnnnnnnnnnnnnnnnccagttttatgaaaatatttagactaaacaaagtgaagagaatagaaagctgtatttgcatgtgtgcagtttccttgatcaaagaatattaagcaaaaagagaccaaagcaggagtcactgcaatttaaatgtcgttcctgtctatttcaggacgcagctctactctgttttctttattcttggggtgattatgttgatgacctgtcttgtctctgttgagataaatttaccaccaattgagcactccttattggcagggattgggtgtatcaattccgagaactgtatgattgcaaaggtggaaagccaattcatcaggctattgttttgctgccccattaagtatattaactggaagatgacttcatttcaaccatttcaaatcttaaatacaacagattcagtcctttatggaatgagttaaggtcagaaaatctgtccatcgtctttctcataaatactttaatatcttccaagtatcattggactaagaaagtaattatgggtaataataaagattccaattaagaattagggcaacatgaaaatgctactaatttcgattcacatcgtagctttcaggtccttctcaatatgtttaattacttgtgagaaatacagaagtagtggctggttcggcaagcccatcaccttttatgagaagtagaagactcagttttatcctgtctgaacaggttgcattagccatggggaacattttgtttttgcattcacacatcagtctccccaggttctgtttacacagaggaagagaaagactggctagtttagtagtccatcccaacccaaggcagaccatctctgaggtttagtttttacagtcgtaagatgggaattgcatctgtttgcaaaaactactccaatatcgtcagatgaaatggtccaaggagtagaaattagcataatgaatcgctgtgcttcagagtaaagragagcctcttcataaagactttttgttg

SEQ ID NO: 701822 - DNA, 646 bp, Homo sapiens
gaaaaggtaaaaattgaaaaactgcaacagaaaattcagctagctcttcaacacgtcctacagaagaatcaccgagaagatggaatactaacaaaggtgagtgccaaaggcttctagttggcatggcctgaactatcccctggcacaaatcatgctgccaatatggtcatgtaagtcatatgaccaattcccaaaagtatcagaaggcaacaggctactaaaaagaaataaatttccatttcaaaaaaattctgttgagccacagctcattattcagtctaaattatacttactatcgttgattacaaagtgtcctgcagcaataaggcaatgtaggaaaaaaagttacattctagaaattctcttccatcaaagttaggcataaagcagagttaatattctgcactgacataaactgtaaaaataatctttgaatttattaattttttagagacagggtctcactccgtctcccaggctggagtgaagtggcacaatcatagctctatgcaaccctgaacttctgggctcaaaagatcctcctgtctcagcctcctgagtagctragactacaggtatatgtgctaccacacttggctaatttattaattattttttgtagagatgggtatcttgctatgttgcc

SEQ ID NO: 701823 - DNA, 1193 bp, Homo sapiens
agtttaaatattaaaaaataaattatttcacacttataggtataggatatatttattgttttaaaaaattatatctattaatttcattttaagctagtaaaggaggtatcttatttcttataaatacccgtcataaaaagtgggagggtatcagtctgatacggctgagaactactaatttagatctgcatctggacaaagggtgagttacattccatccaaaactactactgattagttttaaattaactttataatactagaataaatacggcaaaaattccaaaagatgacaacactattttagaaatatgtaggtccccaaataaagcaaaaatatttaagaccactctctcagagctaaacaatggataaaaaactactcaaagagctgataaggggatgagagaagaattttggaaattaaaattaggatgcttaggttggctctgaaaataacacaggtaaaaaaaagacacagctactaaagtttctcaaataattgtataaaaataagcatattttaggtaaacaaaatgaacattaactgctgatcttgggagaaatgtattacagcaaattgacttctcactagaaaacgtcttgagagctcttcaaacctaacagtattgtgtcttcactcttaacagtactgcttcacagctgtcactctgaatatgagaacatgtccgtccttgtgccacaaactggcaaatttaattaagctgctgcagcaacaagatgctgactcagatacgccagactaggaatgtcaagaaattctagcagtttaaattggctacattcagcaaagaatgaaatggtagcacatcaagatcatttccttgtgcagtgctgtcaagaacttcatcagggtgtaaaccaaaagcatctgacagggtttctctattcacgtatacagcattatattttattttggttgatggtttgaagttttgcccctgcattttgtcaactacccattctcctttctcaaagtttctatggaaaaamaaaaaacaaaaaacaaacagggtagaatccaaaactttaagtttcctatactttaagtactggtttggtagcttatttaaaagtagcatttggaaatggtgcttctagtctccatttcaagtctactagtatcttctgagtttgatttattttcctaagttaaacgtgttagagcttta

SEQ ID NO: 701824 - DNA, 1193 bp, Homo sapiens
agtttaaatattaaaaaataaattatttcacacttataggtataggatatatttattgttttaaaaaattatatctattaatttcattttaagctagtaaaggaggtatcttatttcttataaatacccgtcataaaaagtgggagggtatcagtctgatacggctgagaactactaatttagatctgcatctggacaaagggtgagttacattccatccaaaactactactgattagttttaaattaactttataatactagaataaatacggcaaaaattccaaaagatgacaacactattttagaaatatgtaggtccccaaataaagcaaaaatatttaagaccactctctcagagctaaacaatggataaaaaactactcaaagagctgataaggggatgagagaagaattttggaaattaaaattaggatgcttaggttggctctgaaaataacacaggtaaaaaaaagacacagctactaaagtttctcaaataattgtataaaaataagcatattttaggtaaacaaaatgaacattaactgctgatcttgggagaaatgtattacagcaaattgacttctcactagaaaacgtcttgagagctcttcaaacctaacagtattgtgtcttcactcttaacagtactgcttcacagctgtcactctgaatatgagaacatgtccgtccttgtgccacaaactggcaaatttaattaagctgctgcagcaacaagatgctgactcagatacgccagactaggaatgtcaagaaattctagcagtttaaattggctacattcagcaaagaatgaaatggtagcacatcaagatcatttccttgtgcagtgctgtcaagaacttcatcagggtgtaaaccaaaagcatctgacagggtttctctattcacgtatacagcattatattttattttggttgatggtttgaagttttgcccctgcattttgtcaactacccattctcctttctcaaagtttctatggaaaaacaaaaamcaaaaaacaaacagggtagaatccaaaactttaagtttcctatactttaagtactggtttggtagcttatttaaaagtagcatttggaaatggtgcttctagtctccatttcaagtctactagtatcttctgagtttgatttattttcctaagttaaacgtgttagagcttta

SEQ ID NO: 701825 - DNA, 602 bp, Homo sapiens
gtctccaatatggaaatggtgagaaaatctggagtcaggatgatgttgatttgaggtaggcggccgtcctcatgaagtaggtactgggccattgttatcccggttgcagagaaggaagagactgagtgccctgaaggcagtcgcttacagggcagtacacagccaggaagcagcacagctcggattcaaagctggctcctcaccactaatgtagccactgtccgagcattttgctgcctccttccttcccacttttaccaccccacaggcctccccactatcacagaggcctcactccagctctgtcctggagcgaatccagaagccccctcccaacccagagaccatactggggayggagggagggttggaatgggagtcaacacagctgccactgactgcccaccaactcttggggtggggggcggggcaggtggacagacaaatgaaaccttagagaagaaggactcttggagcccagggccatagttgtggggaggagacaagggaattatggaccatgctccctcctgtgagtgaagccatggcacaaggttgaacaatgggctctggggactggaggagagtaggagtggggaaag

SEQ ID NO: 701826 - DNA, 1756 bp, Homo sapiens
attttgcttcagattttttaaaaaagtgatcatgctggctgctgcatgagaatagacagtcaggctagagggagtatgggcagagagcagtcagcaggctgcagcagttacccagggcagagacggcagcgacttggacgcagtggcagcagtggggaatgagacagatttggaatgatagtcttctctagagcatcttctcttgggatgacagccctcataaatctcctctctcccctttacagtattgcaccatgggacccattgcactaattctacaaacactatcgacagccatccatgccaagtacctgatcattttcctcttctcaggattctgtttatatatattgggatcctgcctgtgttccaaaccagactctatcccttattagtgcacaatcttgggcaagtttagtaactttccagagcctcagtactatttttatgtaaatggggataatacttaacatttatcctgaggacttattacaaggattcgacgtagataaaataatgcttattcttaggtttaaatcaataatggcaaagtggctagtccactatctggcacacagtgtgtagtgaagaagggatacacccttcccttcttccccagtctccctaactaggttggtgcttctattcttgtcttccagaccacatagtgagccacaatgataggtgtgctgcgggtcctaaataaatatctgctttggttattggccaaaaatatcacaaaataagatacttcgcggagtggattctgggtgcagatttgctcagctgagaatgtggttttagagagcatggctttgccctaattagaacccaacaaaactcaaaatttcaaatgtaactcagatctttgtgggctcagctcaactttgtggttgcaaagttttcaaaaaatgtggttctaaataaaggctaaggtaaaagccttgctttaaaaaaagctaataaagactattgacttaaataatgctttatgaagcaatattatgatgtattaaaagcaaaaagaaagaaagaaacatatggattagattcccctggaaatatatcaacttttaaagtgtagggaaatggcactcaggaaaatatggaggctttgttcaactgaaaacacaaaccattttctgagtttattaagacgtttgcatccatgtgataagctcagagtgggctccctattttttggtcaagtggtatcagaccactcatcttcaaaagccagtcaatgcatcatgcagcaaaatcaaacatatttgaataagatagagacattttgtgaaaacaccagagttgagggagaaatggacttggaatcaaagctaacttgtccgacgggcttctatttgctttcaacagaagatgacatatagcttccagtcaaagatggggaattaaacatacatttacctgtactccctcgagaaacaccacttaattaacagtcaaaagaattttgttatggtataatccccatggacaatgagaacaggaaagaatacaacaagaagaacattttggaagctggacaagtggtaaccaatttagctgatctaaacaatttattcctaaatcaacagtaataaaagtcaaaaatcaactagtcaggaaatggccacaacattatctctggaagtgaagaccaatgtgcmtctaaaaagaggaggattggtttacaatcggtttaggaatctgccaaaccttcagatacctatcgtcattccgtctagccagatgacag

SEQ ID NO: 701827 - DNA, 586 bp, Homo sapiens
tcgtgaatataacacactctaaaawattacaaaagaacatgcaaagaatatcaacatttttgtaaaaagatatgtatagatttatgtgaacagatacatacagctctattttttaggaaaaaaggtgtgtagatatgtgtgcatatatgtgtgtgtatgtaaaccatacacacacttacacacacaaatacacacacacacggaaaggtctgcaaggatccacatcaaggcaatcatagtaacaatccctgggtagtaggatttgagtatttttgtttatatttttctaattttccaatatgaaaatgtgaataaaattatttttaatgggccagtgcagtgactcatgcctgtaatcccagcactgtggaaggccgaggcgggcggatcatgaggtcagtagttcgagaccagtctgtccaacatagtgaaaccccgtctctactaaaaatacagaaaattaggtgggtatggtggtgtgcgcctgtaatcgcagctactcgggagactaaggcaggagaattgcgtgaaccccggaggtggaggttgcagtgagctgagactgcaccactgcactccagcccag

SEQ ID NO: 701828 - DNA, 586 bp, Homo sapiens
tcgtgaatataacacactctaaaaaattacaaaagaacatgcaaagamtatcaacatttttgtaaaaagatatgtatagatttatgtgaacagatacatacagctctattttttaggaaaaaaggtgtgtagatatgtgtgcatatatgtgtgtgtatgtaaaccatacacacacttacacacacaaatacacacacacacggaaaggtctgcaaggatccacatcaaggcaatcatagtaacaatccctgggtagtaggatttgagtatttttgtttatatttttctaattttccaatatgaaaatgtgaataaaattatttttaatgggccagtgcagtgactcatgcctgtaatcccagcactgtggaaggccgaggcgggcggatcatgaggtcagtagttcgagaccagtctgtccaacatagtgaaaccccgtctctactaaaaatacagaaaattaggtgggtatggtggtgtgcgcctgtaatcgcagctactcgggagactaaggcaggagaattgcgtgaaccccggaggtggaggttgcagtgagctgagactgcaccactgcactccagcccag

SEQ ID NO: 701829 - DNA, 586 bp, Homo sapiens
tcgtgaatataacacactctaaaaaattacaaaagaacatgcaaagaatatcaacatttttgtaaaaagatatgtatagatttatgtgaacagatacatacagctctattttttaggaaaaaaggtgtgtagatatgtgtgcatatatgtgtgtgtatgtaaaccatacacacacttacacacacaaatacacamacacacggaaaggtctgcaaggatccacatcaaggcaatcatagtaacaatccctgggtagtaggatttgagtatttttgtttatatttttctaattttccaatatgaaaatgtgaataaaattatttttaatgggccagtgcagtgactcatgcctgtaatcccagcactgtggaaggccgaggcgggcggatcatgaggtcagtagttcgagaccagtctgtccaacatagtgaaaccccgtctctactaaaaatacagaaaattaggtgggtatggtggtgtgcgcctgtaatcgcagctactcgggagactaaggcaggagaattgcgtgaaccccggaggtggaggttgcagtgagctgagactgcaccactgcactccagcccag

SEQ ID NO: 701830 - DNA, 620 bp, Homo sapiens
aggatgcgatttgcctgaaaccctcacacctgaatactgacagaatatggactcggaccaccagtctagtgctttttttttaaagatggaatctcgctgtgtcgcccaggctggagtgcagtggcctgatctcggctcactgcaagctctgcctcccgggttcacgccattctcctgtctcagcctcccraatagctgggactacaggcgcccaccaccacgcccggctaatttgttgaatttttagtagagacggggtttcaccatgttagccaggatggtctcgatctcctgaccttatgatccgcccaccttggcctcccaaagtgctgggattacaggcgtgagccaccacacccggccagcctagtgcttttttacagatgttgccttgccagccagcgggactgacctccaaaatttaaaaagaaaaaaaaagtgcagggcaagcctaagatcagctactaggctgacattaaataagcattttccacttgtcattatcttaggggaattgggaagctgcctctagcacttaaaatacaagccacttccctctgtctaggaagtactaaagaaatacaaaagttgacagaaaaggaatgaagtccagttggtct

SEQ ID NO: 701831 - DNA, 620 bp, Homo sapiens
aggatgcgatttgcctgaaaccctcacacctgaatactgacagaatatggactcggaccaccagtctagtgctttttttttaaagatggaatctcgctgtgtcgcccaggctggagtgcagtggcctgatctcggctcactgcaagctctgcctcccgggttcacgccattctcctgtctcagcctcccgaatagctgggactacaggcgcccaccaccacgcccggctaatttgttgaatttttagtagagacggggtttcaccatgttagccaggatggtctcgatctcctgaccttatgatccgcccrccttggcctcccaaagtgctgggattacaggcgtgagccaccacacccggccagcctagtgcttttttacagatgttgccttgccagccagcgggactgacctccaaaatttaaaaagaaaaaaaaagtgcagggcaagcctaagatcagctactaggctgacattaaataagcattttccacttgtcattatcttaggggaattgggaagctgcctctagcacttaaaatacaagccacttccctctgtctaggaagtactaaagaaatacaaaagttgacagaaaaggaatgaagtccagttggtct

SEQ ID NO: 701832 - DNA, 1093 bp, Homo sapiens
tgggctcaaggggtccgcccgcctcgacctcccaaagtgttgggattacagktgtgagccactgtgcctggtcctagagtctatgcttatttttttaaaaaaaattttatttatttatttattttttgagacagagtctagctctgtcaccaggcagtggcgtgatcttagctcactgcaatccccgccttctgggttcaagccattctcgtgcctcagcctctcaagtagctgggattacaggcatgcgccaccatgcccagctaatttttgtatttttagtaaagacggggtttcaccatgttggccaggctggtctcaaactcctgacctcaggtaatctgctcaccttggcctcccaaaatgctgggattacaggtgtgagccaccatgcctggcctatgcttctaatcaccacactatatttcctctaaagagagggcaagacttgaatcaactggatttgatgctactgagtaggagtagacaagagaggtttgcaaggtaattactcttccatgatgtgagattatgggctaaaatgtttcatagaacaaaaatgccatgaataaagtttaaaaagaggaaacatacagtgcacaaagaattaacatctggaatagatagtgaaaacaaatatatataagaaaaagacaaccctacagagaaatgggcaaatgtataaatagacaatagatgaagaagtaagaatgaaataaaactgaccacataaaaaagatgcttaactgcactagtgatgctggcatgcaaagcaaaaaaatagagagatccattttctcccacactggctaaaactgaaatttgaaaatatcaattttgtggaaaagtgaatattcttagtagaagtataaatcaggatagccactgctaggggtgggggtagatttggcagtattaattgaagttaaaatattaaaattaatctttgaagtaatattgattatactgaagaacattgcttcagacattctaatttaacttttttattctacagataaacaggtgttcaaaaagaggtatgcaaaatatttaactggaaactttttttgcataatagtttaaaattagaaaa

SEQ ID NO: 701833 - DNA, 1093 bp, Homo sapiens
tgggctcaaggggtccgcccgcctcgacctcccaaagtgttgggattacaggtgtgagccactgtgcctggtcctagagtctatgcttatttttttaaaaamaattttatttatttatttattttttgagacagagtctagctctgtcaccaggcagtggcgtgatcttagctcactgcaatccccgccttctgggttcaagccattctcgtgcctcagcctctcaagtagctgggattacaggcatgcgccaccatgcccagctaatttttgtatttttagtaaagacggggtttcaccatgttggccaggctggtctcaaactcctgacctcaggtaatctgctcaccttggcctcccaaaatgctgggattacaggtgtgagccaccatgcctggcctatgcttctaatcaccacactatatttcctctaaagagagggcaagacttgaatcaactggatttgatgctactgagtaggagtagacaagagaggtttgcaaggtaattactcttccatgatgtgagattatgggctaaaatgtttcatagaacaaaaatgccatgaataaagtttaaaaagaggaaacatacagtgcacaaagaattaacatctggaatagatagtgaaaacaaatatatataagaaaaagacaaccctacagagaaatgggcaaatgtataaatagacaatagatgaagaagtaagaatgaaataaaactgaccacataaaaaagatgcttaactgcactagtgatgctggcatgcaaagcaaaaaaatagagagatccattttctcccacactggctaaaactgaaatttgaaaatatcaattttgtggaaaagtgaatattcttagtagaagtataaatcaggatagccactgctaggggtgggggtagatttggcagtattaattgaagttaaaatattaaaattaatctttgaagtaatattgattatactgaagaacattgcttcagacattctaatttaacttttttattctacagataaacaggtgttcaaaaagaggtatgcaaaatatttaactggaaactttttttgcataatagtttaaaattagaaaa

SEQ ID NO: 701834 - DNA, 1628 bp, Homo sapiens
tgtctgtctgtttttgttttgagacagggtctgactctgtcacccaggctggagtgcggtggcatgatcatggctcattgcagcctcagcctcccaggctcaagtgatcttcctgcctcagcttccaagtaggtggtaccacaggcacatgccaccacgcccggctaatttttcaattttttgtatagatagggttttgctaagttgccagggctggtcttgaactcctggtctcaagcaatcctctggccttggtctcccaaagtgctgggattacaggcatgagctaccacgccaagcctgcaatttggctttgattctccatcccagcttttcaatgtctcaccaggttaccttttttgtccatctcttaaataccagtggtccctagggttctatcctgtcatattctctacacatttcctgtacattatctcatccaattattatttctagttcaggcattacttgtaaactccaaatccattattcaccagcctatcaaattttcaccttgatgctctcaaattaaacatgccctaaacagaattcatcatctcttcaccatcaccaacactatgtcatgttcattttccttcctataattcaaatctcaggtaaaaccactactgtaaattaaattgctcaaatcagaaaaccatctgacatttcctcatgcacacacacaattaagaatcaaattctcaattgcaccactttatttccagaacccatcaatattttcctcttcattgctacattctttaaggttcttatcacttttaatctgaattatagctatataatcataaattgttttattgccattatcatatctktaatccttcctacacattgctgtctgacggaaccttctatagtgaaaatccatttagcatggtcttataagatggacagttacaaaataaatatacaaaaatcactaactttcttacattatcaaaaactattagaacaaatgattcatttcatattagcaactgaaatgtaaaatactggctgggtgcggtggcttacacctgtaaccccagcactttgggagcctgaggtgggcggatcacgaggtcaggagatcgagaccatcttggccaacagagtgaaaccctgtctctactaaaatacaaaaaagctgggcgtggtggcatgtgcctataatcccagctacttgggaggctgaggcaggggaatcgcttgaacccgggaggtggaggttgcagtgagctgagatcacgccactgcattccagcctggcgacagaacaagactccgtttcaaaaaaaaaaaaagaaatgtaaaatactaagtgttatacttccaggaaatacacaggaacaatatgggaaaaactacaaattttagagacagacataagggaagacctacgtaaatgtagaaaataccatattccagaaaggaagacatcaatggtccacaaactactctacatatttaatcatataaattaaaatccccataggaatttttgcaaggaaacttgataaaatgatcctacatcccatacaggagaataatcatgcacaaagaactgagagatttttgaaaaaaagaaaaatgaaggtggttttgcgtaactaaatattaaaatg

SEQ ID NO: 701835 - DNA, 1220 bp, Homo sapiens
taaaggaaagattattatagtgctttgtagttcacagaacttttatatttgtgatttgatccttctgctagcttcttaatayataggtattgtggagagactgagtgtacagaaagaccttcaaagtttaattttttgccctgatctctttgaactcatttttatatactaaataatttttttaaataatgacctaattataagttttcatcctaacagtaagtgtatgaaagtattacataaattcatgatgattatgtcatttttattatccaggatcctagtttctactttgattataattatatattttttcaaacatattcccagtatatttatccagcataaataatagtaagattgttgaggctgggtgtggtggctcacacctgtaatcccagcactttgggaggccggggtgggtggatcacctgaggtcaggagttcgagacaagcctgaccgagatggagaaaccctgtctctactaaaaatacaaaattagctgggtgtggtagcgcatgcctgtaatcccagctactcaggaggctgaggcaggagaatcgcttgaacccgggaggcggaagttgcagtgagccaagattgcgccattgcactccagcctgggcaacaagagcaaaactccatcccaaaaaaaaaaaagattgttgaaatacaaataataaattgaaatcaaaaagtgagctatttaatggaattgagaactgaagcattttgtagtatatgaagtaacgatgagctatttaatggaattcagaactgaagcattttgtagtgtatgaagtaacttataaatcatcctacttcttctgtatattcaatttttaaattttggatgttctttatttttcatgattttcctcacccatgtccttattgaggtaatacagagtctcatctaagatactgcactagaataagtctttagttttttgccttaagaagtacagtcattttgggggaattggtttcaggacccctgcgtataccaaaatccacacatactctagtcccgcagttagttgaccctgcaaaacccacatatacgaaaagttggctctccatatacacagatttcacatcctacaaatactgcatttttgatctgattttggttgagaaaaatctgtataaatggacccaagcagttcaaacctgttgttcaagggtcaactgtatatgatatatcccctcttaggaa

SEQ ID NO: 701836 - DNA, 991 bp, Homo sapiens
tctgtttaaccccacatgggggccatccttggctcatctagcacacttttctcactgggacaatttcayggactcctgtaatgcatcactcccccatctgtatctttttttttttttttttttttttttttaagatggagtctcgctctgctgcccaggctggaatgccacggcgcaatcttggctcactggtgcaagctccgcctcccgggttcacgccattctcctgcctcagccccccgagtagctgggactacaggctcctgccatcacgcccggctaatttttgtattttcagtagagacggggtttcaccgtgttagtcagaatggtcttgatctccttacctcatgatccgcccacctcagcctcccaaagtgctaggattacaggcataacccaccgtgcccaccccaccatctctatctttagcccagattgcttccctaattatcagactcagtctgtagctggtcagatgcctaccaaaaatatatctatctggatgttcctcaagtccctcacacttaataatcttctaaaatgaaattcatgttctccctgtcatcaaaagcaaaagtgtaactaggtcctcatgctgtggagcaaacgtgtacaaaaggaattcccctgaatggatatggcgggatctaggggcagggaagggtccatactaatcactgacagaggggctctcacataaaaaagggatctcccttttactgccttctccactgtctcccacatggactcaccatcgtgtctcagttaagcagtaaactgacaaattgtgactttctcacttcagtaggcatcactatgagatacactttttactaggcccagtgcaaaatggaaattgcagaacctcttgttcaaagattagtaggaatttcaagagtagcaaaagctgagtattaagcccttctatgcccaggaccctgtgtgactacacaggtcacatgcctataaagctggccctgcctggaag

SEQ ID NO: 701837 - DNA, 991 bp, Homo sapiens
tctgtttaaccccacatgggggccatccttggctcatctagcacacttttctcactgggacaatttcatggactcctgtaatgcatcactcccccatctgtatctttttttttttttttttttttttttttaagatggagtctcgctctgctgcccaggctggaatgccacggcgcaatcttggctcactggtgcaagctccgcctcccgggttcacgccattctcctgcctcagccccccgagtagctgggactacaggctcctgccatcacgcccggctaatttttgtattttcagtagagacggggtttcaccgtgttagtcagaatggtcttgatctccttacctcatgatccgcccacctcagcctcccaaagtgctaggattacaggcataacccaccgtgcccaccccmccatctctatctttagcccagattgcttccctaattatcagactcagtctgtagctggtcagatgcctaccaaaaatatatctatctggatgttcctcaagtccctcacacttaataatcttctaaaatgaaattcatgttctccctgtcatcaaaagcaaaagtgtaactaggtcctcatgctgtggagcaaacgtgtacaaaaggaattcccctgaatggatatggcgggatctaggggcagggaagggtccatactaatcactgacagaggggctctcacataaaaaagggatctcccttttactgccttctccactgtctcccacatggactcaccatcgtgtctcagttaagcagtaaactgacaaattgtgactttctcacttcagtaggcatcactatgagatacactttttactaggcccagtgcaaaatggaaattgcagaacctcttgttcaaagattagtaggaatttcaagagtagcaaaagctgagtattaagcccttctatgcccaggaccctgtgtgactacacaggtcacatgcctataaagctggccctgcctggaag

SEQ ID NO: 701838 - DNA, 632 bp, Homo sapiens
agaaagatatcagtgctaaatagccacattgagtctaggaacactttagtcattaacttatttttggctcccctctgtgtaacggcaacaacagtctttttaagggaaaaacatatttttgtaggtaaaataactatgtactgaaagtattataatcataaactccacatatctgggctctgagtaagtctattagtccattttcacactgctgataaagacgtacctgagactaggcaatttacaaaaaaagaggtttaactggactcacagttccatgtggctggggaggcctcacaatcatggcagaaggcaaggaggagcaagtcacatcttacatggatggcagctcacaaagagagtttgtgcactaaaactcccccttataataaccaccagatcttgtgagacttactatcaggagaagagcaggggaaagacctgcccccatgattcaattacctcccaccaggcccctcccacaacacgtggtaattcaatatgagrtttgggtgaggacacagccaaaccttatcagtaagcaagtaaaacagcataggatactaaaaggtagttaaggtcaatgactggggcttaaaatgaacacccatattaggccagctttgaatatc

SEQ ID NO: 701839 - DNA, 684 bp, Homo sapiens
taaatatttgctgaatcaaattattctttcttctcttcttagacttctcatctccttccacttgctcttcattagaagtgttataagaaatgagcacaaagttatcaccatgattgcaggctttttctatttctagaaccttcagaacatagttcctagagaaccacaaaggtcagtggtgtaagggcacaaagagagaaatgggacagacatgttatcagctcacagagaggttgatggktccatgaaaggaatgaagaaggattggtaacaaaaaagaaaagaagaatttaatgcagtatcaattgaaaacttttattttaagcttaacttcagctattcatttttattcaataactccttgtcaatcatctgctatgtgtcagaaaatgaatattctcccatttcttcaaaaaggaacattattaagcctcttttctatgcattctgtgctgggcatggaagaatactgtttggatctgacatttaaagaaagaaataagagactaaaatgttgtatcagtggcacagaatgcattcaaacacatttaggcaactgtgcctatgttgaaagacactgaacaaattgactcaatatgagaaaaaaacaaggctttttttgtgttattctccaatgtatagggcattcaatatatatttattaaatgaataaatttgcaagaa

SEQ ID NO: 701840 - DNA, 597 bp, Homo sapiens
ataaaacaaggactaatataagcaccttaactattggtttagaaagaaaatgccacattgattcaggaaaacagtagacaaaaggaagagcacaagaggcttaggaacttactagctgtgggaaaaggtgaagagaggagacaaaggtaattctgaatttttatgtccgagtgtctgggakaatgaagaacagcatgaagctcagaatgtctgatgcagatgtgagggtgctgtctacataataacgattattattaatttgaagacagtgggacatctaagagtaaatactcattagaacattgggatcaagtattaaactaaggtcaatgttggagagaaggtttatatattctgtctactgaggccatagaaaaaaaaaagagagaaaagggagaatagattttttaaaaaacaatagcagaatcttttcaaagtgttgacgtgtacaaattagcattctggaggaatacagtagaggggtagtccacagcttccccatcatgacaaccggcaccccgtcaagagcttaaggtacaaaatgaaatcactttcttttaacagtctaatgccaagtaactctagaaaagcccttgc

SEQ ID NO: 701841 - DNA, 645 bp, Homo sapiens
tagcactggaagaaagaaatgacccatgttccccagagactgaagtttgagccgaactcatgggaaattcataaattcttttatactcagttccctaacatatctgctcagggtaacatgtattggtgccaccactgaaacagacatcatgtttccagattttaaattgtagtgctgtttttcttgaggtgtgttgctttccttgctagatagtaacaggaagaaaataaatcacaactgttattttaaagtaatgttgttcactctattcattgtgaaaatcacaaaatgactaatataaattaaaattgtttacagtctcactcctccttgaagcaggtaccattagcatttggttatagtcacttactggtctttattttctattttatttatttagctatttttttgcacaagactgtggtattagttatacatttgacatctttgatgtatattttattggaaacattttctcacaccattaaaaawttatcaaagtactgcatgatctcacttatatgtggaatttgtaagagttgatctcatagaagtagtgagtagcatcatggttaccagaggcttgagtggtcaggggagatgagggacggggagatattggtcaaagaatatataattacagtt

SEQ ID NO: 701842 - DNA, 1668 bp, Homo sapiens
aaatcaaccattcatattttatagagagctatgtttatggaacacattatctgacctagtaggtttatgtttctgaccaattttgctctttacaaatattgtcacattactgcatagatttgggggttgaaaaggacttagatgatgccttttaccaaaagaatgagttcgaacaaattgcttcatctttttaggccccatagttttcccataggaaaaactgaaaaaataaaaaagcagtttcctatagctgtgaagatgaaatgaaataatgcacttctatagcctagtaggtggcagagactgagggatgaattggtattgctatatgcattgatattgttataaatccatactaattagttatgaataacacctggcttccaaatgttttatttttatttatttatttttttttgagacagagtctcactgttgcccaggctggagtgcagtggcgtgatcttggctcagtgcaacctctgcctcccaggttcaagtgattctccttcctcagtctcctgagcatctgggattataggcacctgccaccacacccagctaatttttgtatttttagtagagatggggtttcaccatgttggccaggctggtctcgaactcctgacctcaggtgatccacccccgcttggcctcccaaagtgctgggattacaggcgtgagccaccacgcccagccccaaatgctttaaatgatcacaaaagaaagtaaccaattgtggatccttttataattatgaagtcaatcattttgaccaactaattaggaaatgagaattcatctaattctagaatgtacttcctccactaaactgtaaactccctgagagctcttagctcacctctaaactctcaaagcctaataccaccagttcactaactaaataaaaatctattgaattatccatatttactttctcgaccattcttcttttagataagaataggtgtttcttacagctttataggggctttttaagtattaagaatattaactaacctgtttgactggcatattgttgcaaatgcttcttcatttttttgtctttttataatatttagaaaatcacttctcaactagatacaaattaaaatttcctttacagtttcttttggttttcttttctttttattttctgatatgggatctttccgtttctcaggctgttctcaaacctctgggttcaaacagtcctccctgctcagcctcccaagtagttgggaatacaggcacacaaacacaagactgtgcctggcttttttttttccacatttatctcttttattggtttggaatttattttaatacaatgtaaaaaatctaacctgacttttaaaaatttttttagcaaaatttattggccaacttattatttactgttagtttgtgattcttctttgaatatacacacacactcttacatacacacgtttattaaatgctaataaatacatagttttatctatatatgtatacatatgtatgtgaatatatatawatatatatatgtattttctcacactaactggttttattttatctttttcaaagtactaataactgtacccaaagaaagacaaagaaaaataagtcttcttcaattttataccattcttccacccaagaaagacgtatcattaacacttt

SEQ ID NO: 701843 - DNA, 1668 bp, Homo sapiens
aaatcaaccattcatattttatagagagctatgtttatggaacacattatctgacctagtaggtttatgtttctgaccaattttgctctttacaaatattgtcacattactgcatagatttgggggttgaaaaggacttagatgatgccttttaccaaaagaatgagttcgaacaaattgcttcatctttttaggccccatagttttcccataggaaaaactgaaaaaataaaaaagcagtttcctatagctgtgaagatgaaatgaaataatgcacttctatagcctagtaggtggcagagactgagggatgaattggtattgctatatgcattgatattgttataaatccatactaattagttatgaataacacctggcttccaaatgttttatttttatttatttatttttttttgagacagagtctcactgttgcccaggctggagtgcagtggcgtgatcttggctcagtgcaacctctgcctcccaggttcaagtgattctccttcctcagtctcctgagcatctgggattataggcacctgccaccacacccagctaatttttgtatttttagtagagatggggtttcaccatgttggccaggctggtctcgaactcctgacctcaggtgatccacccccgcttggcctcccaaagtgctgggattacaggcgtgagccaccacgcccagccccaaatgctttaaatgatcacaaaagaaagtaaccaattgtggatccttttataattatgaagtcaatcattttgaccaactaattaggaaatgagaattcatctaattctagaatgtacttcctccactaaactgtaaactccctgagagctcttagctcacctctaaactctcaaagcctaataccaccagttcactaactaaataaaaatctattgaattatccatatttactttctcgaccattcttcttttagataagaataggtgtttcttacagctttataggggctttttaagtattaagaatattaactaacctgtttgactggcatattgttgcaaatgcttcttcatttttttgtctttttataatatttagaaaatcacttctcaactagatacaaattaaaatttcctttacagtttcttttggttttcttttctttttattttctgatatgggatctttccgtttctcaggctgttctcaaacctctgggttcaaacagtcctccctgctcagcctcccaagtagttgggaatacaggcacacaaacacaagactgtgcctggcttttttttttccacatttatctcttttattggtttggaatttattttaatacaatgtaaaaaatctaacctgacttttaaaaatttttttagcaaaatttattggccaacttattatttactgttagtttgtgattcttctttgaatatacacacacactcttacatacacacgtttattaaatgctaataaatacatagttttatctatatatgtatacatatgtatgtgaatatatatatwtatatatatgtattttctcacactaactggttttattttatctttttcaaagtactaataactgtacccaaagaaagacaaagaaaaataagtcttcttcaattttataccattcttccacccaagaaagacgtatcattaacacttt

SEQ ID NO: 701844 - DNA, 1668 bp, Homo sapiens
aaatcaaccattcatattttatagagagctatgtttatggaacacattatctgacctagtaggtttatgtttctgaccaattttgctctttacaaatattgtcacattactgcatagatttgggggttgaaaaggacttagatgatgccttttaccaaaagaatgagttcgaacaaattgcttcatctttttaggccccatagttttcccataggaaaaactgaaaaaataaaaaagcagtttcctatagctgtgaagatgaaatgaaataatgcacttctatagcctagtaggtggcagagactgagggatgaattggtattgctatatgcattgatattgttataaatccatactaattagttatgaataacacctggcttccaaatgttttatttttatttatttatttttttttgagacagagtctcactgttgcccaggctggagtgcagtggcgtgatcttggctcagtgcaacctctgcctcccaggttcaagtgattctccttcctcagtctcctgagcatctgggattataggcacctgccaccacacccagctaatttttgtatttttagtagagatggggtttcaccatgttggccaggctggtctcgaactcctgacctcaggtgatccacccccgcttggcctcccaaagtgctgggattacaggcgtgagccaccacgcccagccccaaatgctttaaatgatcacaaaagaaagtaaccaattgtggatccttttataattatgaagtcaatcattttgaccaactaattaggaaatgagaattcatctaattctagaatgtacttcctccactaaactgtaaactccctgagagctcttagctcacctctaaactctcaaagcctaataccaccagttcactaactaaataaaaatctattgaattatccatatttactttctcgaccattcttcttttagataagaataggtgtttcttacagctttataggggctttttaagtattaagaatattaactaacctgtttgactggcatattgttgcaaatgcttcttcatttttttgtctttttataatatttagaaaatcacttctcaactagatacaaattaaaatttcctttacagtttcttttggttttcttttctttttattttctgatatgggatctttccgtttctcaggctgttctcaaacctctgggttcaaacagtcctccctgctcagcctcccaagtagttgggaatacaggcacacaaacacaagactgtgcctggcttttttttttccacatttatctcttttattggtttggaatttattttaatacaatgtaaaaaatctaacctgacttttaaaaatttttttagcaaaatttattggccaacttattatttactgttagtttgtgattcttctttgaatatacacacacactcttacatacacacgtttattaaatgctaataaatacatagttttatctatatatgtatacatatgtatgtgaatatatatatawatatatatgtattttctcacactaactggttttattttatctttttcaaagtactaataactgtacccaaagaaagacaaagaaaaataagtcttcttcaattttataccattcttccacccaagaaagacgtatcattaacacttt

SEQ ID NO: 701845 - DNA, 1300 bp, Homo sapiens
ttcctcttacccttccccaaccctctactaaagaatatttcttatttagtcaggaaatcttatgtaatatttttggacggtccataggaaaagcaagatgaaactctcaggcagacaacataaagcagctcccatatctgctagaaaggtcattaattttcagaatatattgttgaaataatttttattttcaatacttgtagtctttccactcagaggactcttatttggcttgaatgtggaaaaggcatctggttcaggtcagtaaggactgttgtatgtaagttttactctagaaaatttggttttagctttgatgacacctagcgtcagtggaatgcaatgaatgcttaatacttcggctttataatgtttgtgcatttctctttaacatcctcaaatacactttcatccttgaaaacacaagcctattttctgtttgaaatgaagagaaargtaattgacagataaacagatagtttttgtttgaagagccaatcaagtttctctttgtactcagtagggactaaaggaagcttaaggataatgacattgtcttcatatgaagaagaaattttttactagtggaaaattagaagtaaatctaccaaattctgtttgtaaattttaaagaccaccacaaaagaccttgaaaaaagtgaaactactgcaagattactgttgcttattgaaagtaataatacagttttattttttccactttataactgcccaagggctcccccaaccagctatatataagaaaaccataacatgaactagggtctttctattcaaaaaagaaatattaaactaacataagcaattctgaaggaagacagtggtaggttttcagatggtttgttaagaattatatgtaaaaggatactagatattatgttttggatgttttctaagtatctatgaaaattattttttcctaaacgatttcataattgattacttttgacctcagttattttggggcataatccttttactactctataaagaagttctacttctacctatatgaatttgtattttcccatatgccaaacacacacacataaattttctttttctcatttcagctcatataattcagttagtgaaatatttcactcttctgtaagtttaagaaaaattcctaagcagtgatacaactttgggtcgctattttagtaaaatgaagagtctctagactttttttttttttttaatgatctctgacttcactaccatatgtgcagcacaacagtgacatcttaaggccaagtaaccagagctcctttagcca

SEQ ID NO: 701846 - DNA, 1109 bp, Homo sapiens
tggaaacaaaaactacttagggccacggtagtcagggaaggctttgcagaagatgtgagaatgagatccatattacaggctgagttggttgtgagcagtacaaaggggtttctrggaagggcaccatcaagaacttcagcatttcttgagagtagtgacttacccaattaggctgcagcagagggtcattttaagaagaaaaataaagataggaaggtaggctgcttttactctggggagtctttttttttttttcttgagatggagtctcactcttcgacccaggctgcagtacatggcaccatcttggctcactgcaacctctgcctcctgggttcaagcaattctctgcctcagcctccggagtagctgggattacaggtgcccgccaccacacttggctaatttttctcttttcagtagagacggtgtttcaccatctttgccaggctggtctcgaactcctgacattgtgatccaccctcctcggcctcccaaagtgctgagattacaggcgtgagccactgcacccagccgggcagagtctttaatgagcaactaaagagattttttttttctattgtaggagtcatctaagatttcgttcataatggcataattcgaggggtactttagaaaggtgaatttgaccttagtatgcaaaaggggtcagaattggaatgaaaggtaggatggaggatatgaattaaaaatttgctgtaacaagacaaatataatctaataaggatttagtaaaatagcttgcagaaaaaaggaaagagtaaatgcaagagatattgtcaagaaataactatcagcaactacaagacgaagggatgtggggcttgaaaaggcagacactgaaaaggcagttgctaggttcaagcctttgcaaagtgagagttctggaatcactgaaatatacagggacgttaacagagtaagcgagatttaagagcagaaaaagctgtttttttccagacacaccaagtttgggttgacagcaggctaatcaggcagcaatgctaggcaagcaattagaaaactggacctttgaaagaaggctaggctagatatttagcgggaattattttctgggatgaaggctg

SEQ ID NO: 701847 - DNA, 1109 bp, Homo sapiens
tggaaacaaaaactacttagggccacggtagtcagggaaggctttgcagaagatgtgagaatgagatccatattacaggctgagttggttgtgagcagtacaaaggggtttctaggaagggcaccatcaagaacttcagcatttcttgagagtagtgacttacccaattaggctgcagcagagggtcattttaagaagaaaaataaagataggaaggtaggctgcttttactctggggagtctttttttttttttcttgagatggagtctcactcttcgacccaggctgcagtacatggcaccatcttggctcactgcaacctctgcctcctgggttcaagcaattctctgcctcagcctccggagtagctgggattacaggtgcccgccaccacacttggctaatttttctcttttcagtagagacggtgtttcaccatctttgccaggctggtctckaactcctgacattgtgatccaccctcctcggcctcccaaagtgctgagattacaggcgtgagccactgcacccagccgggcagagtctttaatgagcaactaaagagattttttttttctattgtaggagtcatctaagatttcgttcataatggcataattcgaggggtactttagaaaggtgaatttgaccttagtatgcaaaaggggtcagaattggaatgaaaggtaggatggaggatatgaattaaaaatttgctgtaacaagacaaatataatctaataaggatttagtaaaatagcttgcagaaaaaaggaaagagtaaatgcaagagatattgtcaagaaataactatcagcaactacaagacgaagggatgtggggcttgaaaaggcagacactgaaaaggcagttgctaggttcaagcctttgcaaagtgagagttctggaatcactgaaatatacagggacgttaacagagtaagcgagatttaagagcagaaaaagctgtttttttccagacacaccaagtttgggttgacagcaggctaatcaggcagcaatgctaggcaagcaattagaaaactggacctttgaaagaaggctaggctagatatttagcgggaattattttctgggatgaaggctg

SEQ ID NO: 701848 - DNA, 1109 bp, Homo sapiens
tggaaacaaaaactacttagggccacggtagtcagggaaggctttgcagaagatgtgagaatgagatccatattacaggctgagttggttgtgagcagtacaaaggggtttctaggaagggcaccatcaagaacttcagcatttcttgagagtagtgacttacccaattaggctgcagcagagggtcattttaagaagaaaaataaagataggaaggtaggctgcttttactctggggagtctttttttttttttcttgagatggagtctcactcttcgacccaggctgcagtacatggcaccatcttggctcactgcaacctctgcctcctgggttcaagcaattctctgcctcagcctccggagtagctgggattacaggtgcccgccaccacacttggctaatttttctcttttcagtagagacggtgtttcaccatctttgccaggctggtctcgaactcctgacattgtgatccaccctcctcggcctcccaaagtgctgagattacaggcgtgagccactgcacccagccgggcagagtctttaatgagcaactaaagagattttttttttctattgtaggagtcatctaagatttcgttcataatggcataattcgaggggtactttagaaaggtgaatttgaccttagtatgcaaaaggggtcagaattggaatgaaaggtaggatggaggatatgaattaaaaatttgctgtaacaagacaaatataatctaataaggatttagtaaaatagcttgcagaaaaaaggaaagagtaaatgcaagagatattgtcaagaaataactatcagcaactacaagacgaagggatgtggggcttgaaaaggcagacactgaaaagrcagttgctaggttcaagcctttgcaaagtgagagttctggaatcactgaaatatacagggacgttaacagagtaagcgagatttaagagcagaaaaagctgtttttttccagacacaccaagtttgggttgacagcaggctaatcaggcagcaatgctaggcaagcaattagaaaactggacctttgaaagaaggctaggctagatatttagcgggaattattttctgggatgaaggctg

SEQ ID NO: 701849 - DNA, 1109 bp, Homo sapiens
tggaaacaaaaactacttagggccacggtagtcagggaaggctttgcagaagatgtgagaatgagatccatattacaggctgagttggttgtgagcagtacaaaggggtttctaggaagggcaccatcaagaacttcagcatttcttgagagtagtgacttacccaattaggctgcagcagagggtcattttaagaagaaaaataaagataggaaggtaggctgcttttactctggggagtctttttttttttttcttgagatggagtctcactcttcgacccaggctgcagtacatggcaccatcttggctcactgcaacctctgcctcctgggttcaagcaattctctgcctcagcctccggagtagctgggattacaggtgcccgccaccacacttggctaatttttctcttttcagtagagacggtgtttcaccatctttgccaggctggtctcgaactcctgacattgtgatccaccctcctcggcctcccaaagtgctgagattacaggcgtgagccactgcacccagccgggcagagtctttaatgagcaactaaagagattttttttttctattgtaggagtcatctaagatttcgttcataatggcataattcgaggggtactttagaaaggtgaatttgaccttagtatgcaaaaggggtcagaattggaatgaaaggtaggatggaggatatgaattaaaaatttgctgtaacaagacaaatataatctaataaggatttagtaaaatagcttgcagaaaaaaggaaagagtaaatgcaagagatattgtcaagaaataactatcagcaactacaagacgaagggatgtggggcttgaaaaggcagacactgaaaaggcagttgctaggttcaagcctttgcaaagtgagagttctggaatcactgaaatatacagggacgttaacagagtaagcgagatttaagagcagaaaaagctgtttttttccagacacaccaagtttgggttgacagcaggctaatcaggcagcaatgctaggcaagcaattagaaaaytggacctttgaaagaaggctaggctagatatttagcgggaattattttctgggatgaaggctg

SEQ ID NO: 701850 - DNA, 1109 bp, Homo sapiens
tggaaacaaaaactacttagggccacggtagtcagggaaggctttgcagaagatgtgagaatgagatccatattacaggctgagttggttgtgagcagtacaaaggggtttctaggaagggcaccatcaagaacttcagcatttcttgagagtagtgacttacccaattaggctgcagcagagggtcattttaagaagaaaaataaagataggaaggtaggctgcttttactctggggagtctttttttttttttcttgagatggagtctcactcttcgacccaggctgcagtacatggcaccatcttggctcactgcaacctctgcctcctgggttcaagcaattctctgcctcagcctccggagtagctgggattacaggtgcccgccaccacacttggctaatttttctcttttcagtagagacggtgtttcaccatctttgccaggctggtctcgaactcctgacattgtgatccaccctcctcggcctcccaaagtgctgagattacaggcgtgagccactgcacccagccgggcagagtctttaatgagcaactaaagagattttttttttctattgtaggagtcatctaagatttcgttcataatggcataattcgaggggtactttagaaaggtgaatttgaccttagtatgcaaaaggggtcagaattggaatgaaaggtaggatggaggatatgaattaaaaatttgctgtaacaagacaaatataatctaataaggatttagtaaaatagcttgcagaaaaaaggaaagagtaaatgcaagagatattgtcaagaaataactatcagcaactacaagacgaagggatgtggggcttgaaaaggcagacactgaaaaggcagttgctaggttcaagcctttgcaaagtgagagttctggaatcactgaaatatacagggacgttaacagagtaagcgagatttaagagcagaaaaagctgtttttttccagacacaccaagtttgggttgacagcaggctaatcaggcagcaatgctaggcaagcaattagaaaactggacctttgaaagaaggctaggctagatatttagcgggaatwattttctgggatgaaggctg

SEQ ID NO: 701851 - DNA, 644 bp, Homo sapiens
ctttggcttcaacatggacttcagtatatatgttaggcatatcatgcattagacatttgttttagttgcagcagctcaaaagttttatgttgtttattttcatgccacccatgcacctggatttacaagagaattaatccctgatggctttagctacccgttatgtgtaatggattcatttatctcctgtacatctaaaattgtactaattatatattattcctggaagtattgagactgtagtctctcaaatgattttctcttttctttggtttagatgagaaactctggttaagttattgacggccattgagcaaaatctttgtaccattggacagtttcataataacctctgatttctttgaggcttggagagtccaaagcgggtcaccaaatttgcaaaaccctttcctctacccaggagactggagcagtggggttgttgacaccatctgctatgaactttcttggtctgggaatcactatagcagtcaggagattattagtcagtttatctgatataggtacttaggagggtgtaggtatttttgctctagacaatactagtgttcttaatagagacattaaacaaaaaggacttctttgtgaataagataygtactctggagcaacttcaatgaaat

SEQ ID NO: 701852 - DNA, 1794 bp, Homo sapiens
ttctgtcaattgtgttatattttctttagagtctaacaaatggctcattacacccttaaaaggataagaagtaaagcataaatcagaaaatctacctctgaaaaaagtatcaaattgtaatttattgcatagtgtaatttcccaaaagcgtgccttctactcaaatagcagtgaattgggagaaaaatgtctattttgtaatttagaaaacctatgtcgagagtaagatctgagagattctgtctctataatgtgcatgatttcatctggaacgtgtctatactcctttaaaaagccaataccatagcagcaggtatcgtattacttaaaggyatatatttataactatggagctgatctgcagggctatcaaatggggaaaataacctgtcataattttgaaagcctaagttcctagggtgccttttctatttttttttcctaatataccacaaattggacaggatggagatttaattctcattatagtctaagctactcctgatcagagggtctcaaccttatttttgattgacctattaacttcattattgaaaagagaccctttgaactacccattcaaatggcttatatttgacgtttttcttccacgcacacatccacagacaggtttacataaacccattccttagaaggatggagaaaagaaatgactggaaggtggagtgatcaaccttagaccttccaaccagaagcttagtaggcagttctggggatcctagtgtccccactgcattttcaagcctcccccttcttttactgtctgggagtcacacccagagaacttagaccgtccagttagccaaggactagctggaagttccaagactttttaggatttttcaaaatacaattattctcttaaagacatttcctcaaatctttgccctgctcagaaatataggaaatctccaagaaagaataatgatttttattgaatattaaatcttaaaatgcttttctgatttagttgttgaattgtgtaaataaagcctgatatgtgatttataaaacttaacaatgtagtaagatttgaggacttcttttttaccgcaactaaatatcaaagtgctacatgaaaatctactgaagcaagaagacgaactgcaatcacaaggacattcttatctttcatgataattcagcagagatttactcattctgttttagctatatgcacactaggtgtaaacagatgtttctctcaggagaaagtacatgtctggtatgtttaagacagcaattaatacctaaggcataagtgggtaaatgtatattgagtttttgcatttgtttgaatacgtggagatttttggccctagatctacttagcctgccagttacaagttaacaattatgaatgtgatgaaatagttatttattttctgagtggttaaattatcaacttagtaaatggcttttatttatccataggggaatatggaaaataataataatttaaattttgtgtagcatttggtagcatataagttgcttacaaatatcttccaagatcctcacaaccaccatgagaggaggtagagcaaattctttcctatattttacaggtaaaataggagctcagaagttatgacctgctcaatatcacacagctaataaggatcagacataaggcttgaaatctcttctccctctgtattctcaacttccccatcatgccacaatggatttgtaaattaatagcattttgttggagataatatttgctttaagaagtaatcaatgcccagcacattagagcaaataatacat

SEQ ID NO: 701853 - DNA, 1794 bp, Homo sapiens
ttctgtcaattgtgttatattttctttagagtctaacaaatggctcattacacccttaaaaggataagaagtaaagcataaatcagaaaatctacctctgaaaaaagtatcaaattgtaatttattgcatagtgtaatttcccaaaagcgtgccttctactcaaatagcagtgaattgggagaaaaatgtctattttgtaatttagaaaacctatgtcgagagtaagatctgagagattctgtctctataatgtgcatgatttcatctggaacgtgtctatactcctttaaaaagccaataccatagcagcaggtatcgtattacttaaaggcatatatttataactatggagctgatctgcagggctatcaaatggggaaaataacctgtcataattttgaaagcctaagttcctagggtgccttttctatttttttttcctaatataccacaaaytggacaggatggagatttaattctcattatagtctaagctactcctgatcagagggtctcaaccttatttttgattgacctattaacttcattattgaaaagagaccctttgaactacccattcaaatggcttatatttgacgtttttcttccacgcacacatccacagacaggtttacataaacccattccttagaaggatggagaaaagaaatgactggaaggtggagtgatcaaccttagaccttccaaccagaagcttagtaggcagttctggggatcctagtgtccccactgcattttcaagcctcccccttcttttactgtctgggagtcacacccagagaacttagaccgtccagttagccaaggactagctggaagttccaagactttttaggatttttcaaaatacaattattctcttaaagacatttcctcaaatctttgccctgctcagaaatataggaaatctccaagaaagaataatgatttttattgaatattaaatcttaaaatgcttttctgatttagttgttgaattgtgtaaataaagcctgatatgtgatttataaaacttaacaatgtagtaagatttgaggacttcttttttaccgcaactaaatatcaaagtgctacatgaaaatctactgaagcaagaagacgaactgcaatcacaaggacattcttatctttcatgataattcagcagagatttactcattctgttttagctatatgcacactaggtgtaaacagatgtttctctcaggagaaagtacatgtctggtatgtttaagacagcaattaatacctaaggcataagtgggtaaatgtatattgagtttttgcatttgtttgaatacgtggagatttttggccctagatctacttagcctgccagttacaagttaacaattatgaatgtgatgaaatagttatttattttctgagtggttaaattatcaacttagtaaatggcttttatttatccataggggaatatggaaaataataataatttaaattttgtgtagcatttggtagcatataagttgcttacaaatatcttccaagatcctcacaaccaccatgagaggaggtagagcaaattctttcctatattttacaggtaaaataggagctcagaagttatgacctgctcaatatcacacagctaataaggatcagacataaggcttgaaatctcttctccctctgtattctcaacttccccatcatgccacaatggatttgtaaattaatagcattttgttggagataatatttgctttaagaagtaatcaatgcccagcacattagagcaaataatacat

SEQ ID NO: 701854 - DNA, 1794 bp, Homo sapiens
ttctgtcaattgtgttatattttctttagagtctaacaaatggctcattacacccttaaaaggataagaagtaaagcataaatcagaaaatctacctctgaaaaaagtatcaaattgtaatttattgcatagtgtaatttcccaaaagcgtgccttctactcaaatagcagtgaattgggagaaaaatgtctattttgtaatttagaaaacctatgtcgagagtaagatctgagagattctgtctctataatgtgcatgatttcatctggaacgtgtctatactcctttaaaaagccaataccatagcagcaggtatcgtattacttaaaggcatatatttataactatggagctgatctgcagggctatcaaatggggaaaataacctgtcataattttgaaagcctaagttcctagggtgccttttctatttttttttcctaatataccacaaattggacaggatggagatttaattctcattatagtctaagctactcctgatcagagggtctcaaccttatttttgattgacctattaacttcattattgaaaasagaccctttgaactacccattcaaatggcttatatttgacgtttttcttccacgcacacatccacagacaggtttacataaacccattccttagaaggatggagaaaagaaatgactggaaggtggagtgatcaaccttagaccttccaaccagaagcttagtaggcagttctggggatcctagtgtccccactgcattttcaagcctcccccttcttttactgtctgggagtcacacccagagaacttagaccgtccagttagccaaggactagctggaagttccaagactttttaggatttttcaaaatacaattattctcttaaagacatttcctcaaatctttgccctgctcagaaatataggaaatctccaagaaagaataatgatttttattgaatattaaatcttaaaatgcttttctgatttagttgttgaattgtgtaaataaagcctgatatgtgatttataaaacttaacaatgtagtaagatttgaggacttcttttttaccgcaactaaatatcaaagtgctacatgaaaatctactgaagcaagaagacgaactgcaatcacaaggacattcttatctttcatgataattcagcagagatttactcattctgttttagctatatgcacactaggtgtaaacagatgtttctctcaggagaaagtacatgtctggtatgtttaagacagcaattaatacctaaggcataagtgggtaaatgtatattgagtttttgcatttgtttgaatacgtggagatttttggccctagatctacttagcctgccagttacaagttaacaattatgaatgtgatgaaatagttatttattttctgagtggttaaattatcaacttagtaaatggcttttatttatccataggggaatatggaaaataataataatttaaattttgtgtagcatttggtagcatataagttgcttacaaatatcttccaagatcctcacaaccaccatgagaggaggtagagcaaattctttcctatattttacaggtaaaataggagctcagaagttatgacctgctcaatatcacacagctaataaggatcagacataaggcttgaaatctcttctccctctgtattctcaacttccccatcatgccacaatggatttgtaaattaatagcattttgttggagataatatttgctttaagaagtaatcaatgcccagcacattagagcaaataatacat

SEQ ID NO: 701855 - DNA, 652 bp, Homo sapiens
atgaaataaatttcacttggttgtggtgtacaacatttttatacattgttggattcaatttgctaatattttactgagaatttttagagagatattggtgtaattttctcttttttgtaaagtctttccaggttttagtattagggtaatgctggcctcatagaatgasttagttatgagaagtgtttcctcctcttcaattattttttgcagagccggtagtgaattggtatcatttcttcatcaaatgtttcatagatttcaccagtgaaactactggcccttgagctttccattttggggaagctattatttgatttcagttctttattcaaaggatgtattcctccatgtgtgagttttggtaaagtattttttccaagaatttgtccatttcatctaaattatcgagtttatgggcatataattggtcacagtgggggatcagttgtgatggcccagccccttgtttatttctgatgtaatttccattttagtatttttttacatatatatttggttgctctatttttatgttcaatgtcttattattgaagacacaaggccaatcacaaagactacacgattaattcctctcttatttggctttacctattgtttctgagatgtgttttctctacacaataacaat

SEQ ID NO: 701856 - DNA, 652 bp, Homo sapiens
atgaaataaatttcacttggttgtggtgtacaacatttttatacattgttggattcaatttgctaatattttactgagaatttttagagagatattggtgtaattttctcttttttgtaaagtctttccaggttttagtattagggtaatgctggcctcatagaatgacttagttatgagaagtgtttcctcctcttcaattattttttgcagagccggtagtgaattggtatcatttcttcatcaaatgtttcatagatttcaccagtgaaactactggcccttgagctttccattttggggaagctattatttgatttcagttctttattcaaaggatgtattcctccatgtgtgagttttggtaaagtattttttccaagaatttgtcsatttcatctaaattatcgagtttatgggcatataattggtcacagtgggggatcagttgtgatggcccagccccttgtttatttctgatgtaatttccattttagtatttttttacatatatatttggttgctctatttttatgttcaatgtcttattattgaagacacaaggccaatcacaaagactacacgattaattcctctcttatttggctttacctattgtttctgagatgtgttttctctacacaataacaat

SEQ ID NO: 701857 - DNA, 1110 bp, Homo sapiens
actaagagtttgaatttccctcaactagagagagagtacagggatctcaggagtgtttatgccaatgcaaggatctcataatctatgctagtctgtttagatactataaaaataaatctgaaattctgagaacattctattattattgtcactgcgcataatctgaatgtttctatagctgcattaacaagcttttataaatttacttatacaattatataacttttatcatcgtaccgcagttaaagtggctattatcaaaaagacaacaaacaacagatactggtgaagatgtggagaaaatgtacactagtacactgttggtgaaaatgtaaactagcacagcctctatggaaaaccgtatggaggtttctcagacaattaaaaatagaactaccatatgatccagcaaccccactactggatatatatscaatgaaagtgcaatcagtatgccaaagagatttctgtatttccatattcattgcaccattcttcacaatagccaagatatggagtcaatctaccattcattggcagaatgaatgaagaaaatgtggcatataaaaataatgaaacaacttcagccataaaagaatgaaaacctgtcatttgcagcaacattgatagaactgtaagtcattatgttaagtgaaacaagccaggcacagaaagaaaaatatcacatgttcttagccatatgtgggagctagataagtggatcccatgaaggtacaaagtagatgatggttaccagaggctggaaagaataggaggaagaagaagatgaagagaggttggttaatgggcacaaaaatacagttagagagaaggaataagttctagtgttcaatagctcagtagggtgactatacttaataataattcattgtgtacttcaaaatagctagaatagaggatacggaacatccctaacacaaagaaatgatacatgtttgaggaaatggaaattccaattatcctgacttgatcattacacattgtgtacatgtatcaaaatatcacatgcaccccatagatatgtacaattattatgcatcaattttaaaaattgtgaaaaagtcagatattctccaattgggatcaaaa

SEQ ID NO: 701858 - DNA, 1110 bp, Homo sapiens
actaagagtttgaatttccctcaactagagagagagtacagggatctcaggagtgtttatgccaatgcaaggatctcataatctatgctagtctgtttagatactataaaaataaatctgaaattctgagaacattctattattattgtcactgcgcataatctgaatgtttctatagctgcattaacaagcttttataaatttacttatacaattatataacttttatcatcgtaccgcagttaaagtggctattatcaaaaagacaacaaacaacagatactggtgaagatgtggagaaaatgtacactagtacactgttggtgaaaatgtaaactagcacagcctctatggaaaaccgtatggaggtttctcagacaattaaaaatagaactaccatatgatccagcaaccccactactggatatatatgcaatgaaagtgcaatcagtatgccaaagagatttctgtatttccatattcattgcaccattcttcacaatagccaagwtatggagtcaatctaccattcattggcagaatgaatgaagaaaatgtggcatataaaaataatgaaacaacttcagccataaaagaatgaaaacctgtcatttgcagcaacattgatagaactgtaagtcattatgttaagtgaaacaagccaggcacagaaagaaaaatatcacatgttcttagccatatgtgggagctagataagtggatcccatgaaggtacaaagtagatgatggttaccagaggctggaaagaataggaggaagaagaagatgaagagaggttggttaatgggcacaaaaatacagttagagagaaggaataagttctagtgttcaatagctcagtagggtgactatacttaataataattcattgtgtacttcaaaatagctagaatagaggatacggaacatccctaacacaaagaaatgatacatgtttgaggaaatggaaattccaattatcctgacttgatcattacacattgtgtacatgtatcaaaatatcacatgcaccccatagatatgtacaattattatgcatcaattttaaaaattgtgaaaaagtcagatattctccaattgggatcaaaa

SEQ ID NO: 701859 - DNA, 1110 bp, Homo sapiens
actaagagtttgaatttccctcaactagagagagagtacagggatctcaggagtgtttatgccaatgcaaggatctcataatctatgctagtctgtttagatactataaaaataaatctgaaattctgagaacattctattattattgtcactgcgcataatctgaatgtttctatagctgcattaacaagcttttataaatttacttatacaattatataacttttatcatcgtaccgcagttaaagtggctattatcaaaaagacaacaaacaacagatactggtgaagatgtggagaaaatgtacactagtacactgttggtgaaaatgtaaactagcacagcctctatggaaaaccgtatggaggtttctcagacaattaaaaatagaactaccatatgatccagcaaccccactactggatatatatgcaatgaaagtgcaatcagtatgccaaagagatttctgtatttccatattcattgcaccattcttcacaatagccaagatatggagtcaatctaccattcattggcagaatgaatgaagaaaatgtggcatataaaaataatgaaacaacttcagccataaaagaatgaaaacctgtcatttgcagcaacattgatagaactgtaagtcattatgttaagtgaaacaagccaggcacagaaagaaaaatatcacatgttcttagccatatgtgggagctagataagtggatcccatgaaggtacaaagtagatgatggttaccagaggctggaaagaataggaggaagaagaagatgaagagaggttggttaatgggcacaaaaatacagttagagagaaggaataagttcyagtgttcaatagctcagtagggtgactatacttaataataattcattgtgtacttcaaaatagctagaatagaggatacggaacatccctaacacaaagaaatgatacatgtttgaggaaatggaaattccaattatcctgacttgatcattacacattgtgtacatgtatcaaaatatcacatgcaccccatagatatgtacaattattatgcatcaattttaaaaattgtgaaaaagtcagatattctccaattgggatcaaaa

SEQ ID NO: 701860 - DNA, 618 bp, Homo sapiens
tgcatgatgagggtgaacatggccttctagcctcagtttccttgttagtaatgtgagggtactaacacatacctacaggattagtaaacataaaacctgcatgtaaatcatgagcatcctgcatgtgacattctttgattatttggtaagtgataagaactaacaattcttgggtgctgactatgtgctgggcaagattctaaaagcttcatatatattcactcatttcattcccacagactcatagtacaagtgatctattatcacacttttacagataaagaaactgatccacagagaagttaaaaagtgtccaaggtcaggaaggtaataaatattggacctgggatttgaacttaagtggcctggctctagcatacactcttaagtgccacactttatggcttctgcacatatttagtaaatatctaccatgtgttaggcatggcagttacaaagactaagacctagtgccttctctcagggacctaaaagtttcatagaaaagacaggcatgtcatcattaacagcaawacacaataaggggtataggagaataaatatgatgtgttatgggatcacataagagacgcctttgggaggctgaggcgggtggat

SEQ ID NO: 701861 - DNA, 1034 bp, Homo sapiens
tatggtattttgttatggaagcccaatccgactaagcacccaataattcagagatgtcaaatgcttgcaccagttggtgtgcttgtctagaaatcacaactcaaattggctcactgtcacacacaactaatacgaccagcagtaggatagccttcaagtaaggcttgattaggctctggttccccttctctacaatggctccagatctgttctcctccatatggctttcttcctggtagaacaatgtttacacaggttgagcatccctaaactgaaaatctgaaattcaaaatgccccaaaatccaaaactttttgagggccaccacgatgccacaagtggaaaatttcacacctgaccttatgtgacagaatgccatcaaaagtcaagcaaataacacacagattattcagtttaccaaatggaaaaaaaggccctcccagcccccttcagctgcaatgtagctttcttgcacccaaccagattttccagcacaagcacacccacaaagggtaataaaataaaaacttggtttcatgcagaaaattatttaaatgttgtataaaattacctacctcaggtgatgtaaataaggtgtatatgaaacacaaatgagttttacattagacttgggtcccacccccaagatatcttattttgtawaggcaaatacttcaaaattccaaaaaaatcccaaatagaagctcttctactcccaagcatttcagataagggatactcgacctgcagtaccattggggtttcccattcacatgccgtgttatccagtccaagaggagctgaatgtttttggataaattttataacatccctgagcctcagttttttcatctgtaaaatgagtatagttgaacctacctctcatggttgtaagggttaaatgaatcaattaatgtgttagtgcctgaaacttaacaaatggaccctgcccctcatgggtgtcctccaaccagctaggaggaaaggagagagtgggcattggcaatgaaaagaagggtttttaaaaaattagat

SEQ ID NO: 701862 - DNA, 1034 bp, Homo sapiens
tatggtattttgttatggaagcccaatccgactaagcacccaataattcagagatgtcaaatgcttgcaccagttggtgtgcttgtctagaaatcacaactcaaattggctcactgtcacacacaactaatacgaccagcagtaggatagccttcaagtaaggcttgattaggctctggttccccttctctacaatggctccagatctgttctcctccatatggctttcttcctggtagaacaatgtttacacaggttgagcatccctaaactgaaaatctgaaattcaaaatgccccaaaatccaaaactttttgagggccaccacgatgccacaagtggaaaatttcacacctgaccttatgtgacagaatgccatcaaaagtcaagcaaataacacacagattattcagtttaccaaatggaaaaaaaggccctcccagcccccttcagctgcaatgtagctttcttgcacccaaccagattttccagcacaagcacacccacaaagggtaataaaataaaaacttggtttcatgcagaaaattatttaaatgttgtataaaattacctacctcaggtgatgtaaataaggtgtatatgaaacacaaatgagttttacattagacttgggtcccacccccaagatatcttattttgtaaaggcaaatacttcaaaattccaaaaaaatcccaaatagaagctcttctactcccaagcatttcagataagggatactcgacctgcagtaccattggggtttcccattcacatgccgtgttatccagtccaagaggagctgaatgtttttggataaattttataacatccctgagcctcagttttttcatctgtaaaatgagtatagttgaacctacctmtcatggttgtaagggttaaatgaatcaattaatgtgttagtgcctgaaacttaacaaatggaccctgcccctcatgggtgtcctccaaccagctaggaggaaaggagagagtgggcattggcaatgaaaagaagggtttttaaaaaattagat

SEQ ID NO: 701863 - DNA, 661 bp, Homo sapiens
agaagcttttctgctcccattttgcagatgggaaattgaggtttagaaaggtcaagtaaaatgcccgagatgacacagctaggagctagaattcatgtcctcacttgaaaatacctcttgctttgctcccccattacacacacacacacacacacacatacacatgcacatgtacacatgcatactcatactctgggagaccagaagggaagcagcacctaaccagcccaggattgcagggatcacttcctgcagaagtgacawcggagctgagtcctcaggaagtgtgcacgcttgccagatagaggggaggaacagccttccaggtagacagaaggacatggacaacatgccaggtgagagggcgtgcagtggatctggggaatctctaagttgtttatggttggttgacatgtggcttgactggagagaaggatgggagatgaggattgacaggtggacaaaatcgggccaggatgggggaagatgggcatagtcactgtgacctttgtgatggttggaggaggtgacctgataaatattcgttctctgtaaagcaggagtagcttcaggccacattgtctccgtctgctccctcctccctgcaagccctagggtaagtgagaaagtgcctcctgaggctcttattgtcaaaaggatg

SEQ ID NO: 701864 - DNA, 648 bp, Homo sapiens
tgttcctctaaggaacaattttacagtggacaaaaaaaaaaaaaaaaaaaaaaaagctttcttgagtacctagtgcctagttcactgttagccagtaaatacctttatggttgattccttatcatgtagggatacaactcagggaaatcaataaaaagaatttaaaaactggcaaaattatatattttaaagtaatgtgtacataaagggcacagtggaattaaactaggggctaagaataggtaggtaaattttcaaaatgttgctgatgtgtggggatctgtctacaccaactcaagatgttaagtttctattatcatgcactgaatgacatggctctttcatcttttcttcgaaaatgtttaggattaccacatacaatgcaggatgcccagtgaaatttgaactccagataaactggacacacatttaccaaagagagatctgtcatttacctgaattttaaattactgtgacattctctgtttttacttgtgaaatctggtaacyctggaagtgttgcatatttatacgtatatgaagctttttggtcaataaaaacaaaggaagttgaatgatagcacagcctatcaactgcccaacatgccagaaaacagtacgatgtaatgtttgggagaaaaaaaaaaa

SEQ ID NO: 701865 - DNA, 644 bp, Homo sapiens
tgtgtgtgtctgtgtgtttcttgtgcaaataggcacctcggggatggggcaggtggagggaccagcagtgcgaagaccttgggatggggacaccacgtggagtgtgcaaagtggtggaagggccagggtggctgatggaggccagagcaagaggacaccagaggggaccagcgtggctggggggggccagagcgagaggacaccagaggggaccagggtggctggggggggcagagcgagaggactccagaggggaccagggtggctggggggggygccagagtgagaggactccagaggggaccagggtggctggtagaggccagagtgagaggacaccagaggggaccagggtggctggcagaggccagagtgagaggacaccagaggggagcagggtggctggcagaggccagagtgagaggacaccagaggggaccagggtggctgcggggggggccagagcgagaggactccagaggggaccagggtggctgggggggggggtgccagagtgagaggactccagaggggaccagggtggctggcagaggcagagtgagaggacaccagaggggaccagggtggctgcggggggggccagagtgagaggactccagaggggaccagggtggctgaggggg

SEQ ID NO: 701866 - DNA, 602 bp, Homo sapiens
aaagatcaaagtccagcaaactgtgtcacgctgaaaccacaggccaaaccaaaagggcctaagagtaattaatgtgaggcccggggaccacaayggtccaacggtcatgacgagcgagcagggatgggtagaggcacaacattctgaatggaccccctcttcacttttcacgggtccaaattcagatgacagggaggtacttttccccactcctctcactgagaactgaaaaccatgggcatcagaaaatcaacacaaaaagaccctgaaaggtagagagaagatggcagcctgacaagggtcttgtccaaagggatgacactgtggtggccctctgggttttctttttacctggtataccctagacttggagctaaagaagcagcagccgaaaacagtgatggatactgggggggtgggtggaaagccccaacaaaagcctgctcttccaggccaaggatccaggaagggggcagtcagacaagacagaaactgacaacggcagtaacacccaccttactccagccagcgccacaagaaaaaaccatgcccaccccactcccaggccgcagctaggcactccagcactcacctaacagagt

SEQ ID NO: 701867 - DNA, 637 bp, Homo sapiens
caccgaaacctacccaggaatgtttacagcagctttattcatgatcaccaaaagctggaaactattcggatgcccttcagggggtaaatgattaacaaactgtggtacacccgtggaatactactcagtaataaaaaggaacaaccactgataagactcatcaacctcaatgaggctccagggaattacgctgagtgaaaaatccaaccccaaaggttacatactataagattccatttatatcacatcttgaaaagaccaaattatagaaatggagaccagatgagtgtttgccaggggttacagagggacatgtgtgargctgtaaaagggcacaaggaaaatctctgcggcttggaggctacccatctccactgtaacgaggttagtatcctgggtgtgacattgtactggagttgtgcaagaggttaccactgcatgcaactgggtaaagggtacaaagaatctcaaaataaaagctttaattaaaaataagtaaccaccatcaacaatatttaagtttaaactgggaaaaccaaggagtaactccagaacaatgctgtgtttcttaaggacaagggcgtatgtgggcagcgcaagttaaaagtgtaatcttatctaaagtcctgtatttgta

SEQ ID NO: 701868 - DNA, 1698 bp, Homo sapiens
gggaagcagcatgacacagaacctgctggatgtcagtagctcttggcaactcagttttctttaaaagggaacttttgccctcctgtaccctaccttaaacatttcacatgttatttttttatttctgctgcctcagagaaatggcttctcaacttcagctcctggctttcctcccaagcctcagtgtcagagcttttatttctgtttcattcatgtccccttggccttcagcccctcttgccaagactattgcagtagcctccaaagtagcttttgtgctacaagctttctctactgttagtttgctaggatttttgcaatgaagtaccacagactatcttaaacaacagaaatttattgtctcaaaactctggaggccagaagtttgaaatcaaggtgccaggagggttggtgcctcttgagggctgtgagggaagggtctgttccaggcctcttcttggtctgttgatggtgctcttccccctttgtctcttcacatcatcgtccctctgtatatgctcgtgtccagctttcttgctttctttctttttctgttttttggagactgactcttgctctgtcacccaggctggagtgcagtggcacaatctcggctcactgcaacctccgcctcctgtgttcaagcaattctcctgcctcagcctcccgagtagctgggactacaggagtgagccaccacgtccagctaaactttgtatctttagtagagatggggtttcaccatgttggccagactggtctcgaactcctgacccaaagtaatctgcctgcctcggcctcctaaagtgccggaattacaggcgtgagctgtaataacagtcatattggattagagcccaccttaatgacctcattttaacttgattacctctgtaaatatcctatcctcaatatctccaaataagatcacattctgaggtactaggacttcawtatatgaattttagggaggaacaccattcaactcataacacctactttccccctgtgacacacctgatataggattgtgtagattctcaaacacatcgggttatattatctcctgctgaaaacacttggctggttctatctaaataaagccttcaaaccttcctaaggctgagtttccttccactttgttggagcaagtcaagagaaaaccaggagaacatgcctagtctcctttctctgagccttcacgctaaacctcgggcaaatagtgagagccagtcctggtccctcacctcccttccccacctcctcttttggcatctgtctcttaaaggcataacttttacagtctatctcgaagaggtcccttatctggtgtccttagagcatgctgcctgtacctgtatacttattcttccttgatactgttctcacttgaaggattagcagagtagacaagtttaagctcttgggggcaaggactcaggtcttcaacatgtagaacaaggctttatatatactaggcaccggaatacccattttaatggtattttttttcctgactaggtaaaaattggtgtgaagaagacatggagaatggaggatgtgaatacctatgcctgccagcaccacagattaatgatcactctccaaaatatacctgttcctgtcccagtgggtacaatgtagaggaaaatggccgagactgtcaaagtaaggcattttgtgtttcaaccacaagta

SEQ ID NO: 701869 - DNA, 607 bp, Homo sapiens
atatttcagtgggcctacttaatatttttagttcaccaaaagtggcacrccggtctgtatgcaacttccagtctctcagaaatccagcgaaatgggggtggaaaaagattatctaaaaccaaaaccaactgtagcttcttttgccttggtaggagggctagggatgcccctgggaagggaaatttctctatagctacaagggaaggaaaatctggatctgccaaaggaggtcctgagccaagtttggaaagtaggctacagatggctgcattgctctgtattctgcagagagaaaagtcaagtcagggatgaggaagtagctgtgaagcagcagggtggaaaagagggcagaggcacacggtgtgccgtggaaatttggagctcaaggtgacaaacaagaatatccaatatgcaattttggatggcttacatttttggcactgtaagccctatcacctccctgatccttcagtaatgtctgtggcacacactaacacgttgtgggagtggcttttgatgaaaatcatagataggagcccagtcctagacctgggttgatatggcaacagaacagagaaggaactttcagaacaatttgttaactgaa

SEQ ID NO: 701870 - DNA, 661 bp, Homo sapiens
aaaaaaaaaaaaaaggaatgaaagaaagagaaaaaaaaatcttttgcttttttaaaatttttaattttaattatttttattcttgttgtcctgtgtcaccaggtaaatgtatccacctcattggggaggtaagatttcagtatttctaggccccctgggctttatactatcatactaccatcaaaacctcaccttatttttgacagaggccatttcatacrgggaaaatcctgggcccaagaatccattcccaaccctgccactttatggccctgtgtcttccttcctcccaagccaaatgaggatttcaaacactgacatcacagggctgttgtaaggcttaaatgagaaaatagctttgaaaagtgcttttggcaactatgagacttcagccctctttgctaagcttctgttcttatcaaagagggctaagcctggatctcagtgttcagcacaaaacttgctatctgggtgctctttcttggttgagcgcctattcttatcttgatgaccgtcacccaagaaaatgatgttgaatttggaacccagaaattctcagctcctgttcagattgctttcttccatgtagcaatagtcatttgttgtatcttcatcccccaacataaaataggaaaaactgatctgttactacttagctcaa

SEQ ID NO: 701871 - DNA, 1227 bp, Homo sapiens
tcttgataattccagtatctgcagttgcctgatgaattctgtgaaaacaagaagaggcttgttcagtgttgctccaaagggcagatacccacccagcgagtgggtatccttgtcagacaattccaacatctgatttctttcagtattataaagtttttttttttttctgaaaaagaagaacctttaagccaccagagttatccagctgcagacaatgcttttttgtaacaggtaaaaagttatccacctctttaggtgtctcaggaaatgtagggcagccgtttctctgccaagcacaatatagaagacattttaccttggtgaggcctgcttatggttatgataaggacatgtgccatctcacggttggctatcctgatgtgttgtagcaactgaaatgattctttctttcctcttccagtgaagggcatgttacttatatcatggtgcatagctcgatcttagctattgtagaaagactacaaacactggaagggttttttaatgttctctttcctcttcctgggatacagtkcctctagatactacatggtaaattccagattcttcaagtctttgttcaaatgtcacctgatcagtaaggtttcctttagcaactctaacaattgtaactctgactccccagcagtcatcactcattcttccaatctctttttttctatattatttttctctttattcttattgccactgaatgtactatgcactatgcatgttgtttatagtatttcctgcaatagtatctacatttcatgagggcaggaatttttctgttttttttttcattattgttttcctattgcctagcatcacaactggcacatgataatgcttcataaatatttgttgagagagtgaattaaatggttgtgaactaacaaatgttagttaagtattgccatcttaacaatatgaagtcttttgatccataaatgcaggatgttcttccaattatttgggtcttttaaaatttcttttaattatgttgtttagtttttaatgtacaagttttggacattctattagagttctccagagagaatgaaccaatagaagatacaaatagacataactatagttatagatatagatatgtgagggaatttattaggagaattttctcgtgcaattatggaggctgagaagacccatgataggctgtctgcaagctggacatcctaggatgctggtagcatggctcagtcc

SEQ ID NO: 701872 - DNA, 1227 bp, Homo sapiens
tcttgataattccagtatctgcagttgcctgatgaattctgtgaaaacaagaagaggcttgttcagtgttgctccaaagggcagatacccacccagcgagtgggtatccttgtcagacaattccaacatctgatttctttcagtattataaagtttttttttttttctgaaaaagaagaacctttaagccaccagagttatccagctgcagacaatgcttttttgtaacaggtaaaaagttatccacctctttaggtgtctcaggaaatgtagggcagccgtttctctgccaagcacaatatagaagacattttaccttggtgaggcctgcttatggttatgataaggacatgtgccatctcacggttggctatcctgatgtgttgtagcaactgaaatgattctttctttcctcttccagtgaagggcatgttacttatatcatggtgcatagctcgatcttagctattgtagaaagactacaaacactggaagggttttttaatgttctctttcctcttcctgggatacagtgcctctagatactacatggtaaattccagattcttcaagtctttgttcaaatgtcacctgatcagtaaggtttcctttagcaactctaacaattgtaactctgactccccagcagtcatcactcattcttccaatctctttttttctatattatttttctctttattcttattgccactgaatgtactatgcactatgcatgttgtttatagtatttcctgcaatagtatctacatttcatgagggcaggaatttttctgttttttttttcattattgttttcctattgcctagcatcacaactggcacatgataatgcttcataaatatttgttgagagagtgaattaaatggttgtgaactaacaaatgttagttaagtattgccatcttaacaatatgaagtcttttgatccataaatgcaggatgttcttccaattatttgggtcttttaaaatttcttttaattatgttgtttagtttttaatgtacaagttttggacattctattagagttctccagagagaatgaaccaatagaagatacaaatagacataactatagttatagatatagatatgtgagggaatttattaggagaattttctcgtgcaattatggaggctgagaagacccatgataggckgtctgcaagctggacatcctaggatgctggtagcatggctcagtcc

SEQ ID NO: 701873 - DNA, 1227 bp, Homo sapiens
tcttgataattccagtatctgcagttgcctgatgaattctgtgaaaacaagaagaggcttgttcagtgttgctccaaagggcagatacccacccagcgagtgggtatccttgtcagacaattccaacatctgatttctttcagtattataaagtttttttttttttctgaaaaagaagaacctttaagccaccagagttatccagctgcagacaatgcttttttgtaacaggtaaaaagttatccacctctttaggtgtctcaggaaatgtagggcagccgtttctctgccaagcacaatatagaagacattttaccttggtgaggcctgcttatggttatgataaggacatgtgccatctcacggttggctatcctgatgtgttgtagcaactgaaatgattctttctttcctcttccagtgaagggcatgttacttatatcatggtgcatagctcgatcttagctattgtagaaagactacaaacactggaagggttttttaatgttctctttcctcttcctgggatacagtgcctctagatactacatggtaaattccagattcttcaagtctttgttcaaatgtcacctgatcagtaaggtttcctttagcaactctaacaattgtaactctgactccccagcagtcatcactcattcttccaatctctttttttctatattatttttctctttattcttattgccactgaatgtactatgcactatgcatgttgtttatagtatttcctgcaatagtatctacatttcatgagggcaggaatttttctgttttttttttcattattgttttcctattgcctagcatcacaactggcacatgataatgcttcataaatatttgttgagagagtgaattaaatggttgtgaactaacaaatgttagttaagtattgccatcttaacaatatgaagtcttttgatccataaatgcaggatgttcttccaattatttgggtcttttaaaatttcttttaattatgttgtttagtttttaatgtacaagttttggacattctattagagttctccagagagaatgaaccaatagaagatacaaatagacataactatagttatagatatagatatgtgagggaatttattaggagaattttctcgtgcaattatggaggctgagaagacccatgataggctgtctgmaagctggacatcctaggatgctggtagcatggctcagtcc

SEQ ID NO: 701874 - DNA, 2180 bp, Homo sapiens
atgaaaggttctctggaaggctcatggtccacatgtaaaagaaaaaattttaagcatatctatttaatgtatttactaatagcagttaatgatttacagcaaagcttagttggtcttttgcagtcccagcttgtatcttggtatcccaggtctatgtcccattaaatcctcagagtcatgaagaatgactattcttttggctttaaaaatctactggccctggccrggcacggtggctcacgcctgtaatctcagcattttgggaggttgatgtgggtggatcaaaatgtcaagagattgagaccatcctgaccaacacagagaaaccccgtctctactaaaaataaaaaaattagctgggtatggtggtgcacacctgtagtcctagttactcgggaggctgaggcaggagaatcacttgaacccgggaggcggaggttgcagtgagccaagatcgtgccattgcactccagcctggtgacagagtgagactctgtctaaaaaaaaaaaaaaaaaaaaaaaaaaatctactggtcctatgcagcagtaccacaacaagcctctaaagtcctttgaatataataatggaagttctcttcttcctttgaataatttgaagtcaggatgccctcactctaacccctgggttctcatctgagtttcatatttcatgagttattcactgtcagagatataactgaactataatcttagagaaatagctgtagtcttcttctttaattccctttgctttataaaaatgaccttagttaccttcctagcctataggaaaatatctatcaaaggagaccatgagagtttttaaagctttcaagtcagcagtatgctttcaaagaaaggaactcagctaggatttaggagaccttgagattattttttgtctttccttggtatctcatttattgacctggaacaagtcactggaggcctctctaggcctgaaatttctcatgcataaaatgggtatatctcctgattaatgtaggctgcctcattttacttctcaatgttgaaatttatccatgtgaagtatctctcatggtcaatttattttgtgatggagttggaataatgataatgagaagactttctcagaggtagtgaaagaaagtaccaacagcacaacctgaatatggcaggtacacacatagcaacgttccactcacgacctattcttgcaatgcttgaggggttaccagagatgacatgcagtggctgctttgaacattcctgttgaccattaagtccctcagatacttgaatagaattgtaacctctcactcccactctccttgacccaccaccacaccttgccccagggataaataacccttgagtttagagaaggaatgttaggaagggcgagacatgtgttaattctataattaagagacagtatttcccttctgacctttccccaaaagcgtgttaccagctaagtctttaaaataaaaacccattaacatgggtaaaattgtttctgacttacttgtttcacctaccattggaaatgtccaagtcctattacttgatttttgtaaacaaatttcactttggacagtcacatgtgcatatgatctgaaagcctcagcacagtagccttttgcagaggagcatgtataacttaaatcaattgccacgatggtcaaaaagacaagactgaggaaagtgtaactattttagagaggaaatgaaggcctccatgctattttgcagaagtgcagagagattttcattaaaattttccttcctttttgcctactttttaatcctaataaaattactcccgtctttcaaatttcccctccccctaaatcaaaatgctgccacactctcaaaagctccctgcagtttatagagatgatgtcatctgctttaaaacatctgaataacttgtcctgttgctgaataaatttgttcaacatctaggttccatggctctatacaacctgattcatactgcttactttgtcagtaatctttattaatatttcatcatcgcttttctttccaaagggctgaggtttgcacttctcctgcaatgctgggagggagtgatagaggcagaaagccttactgatttacataaagattgcaaactattattctctgagtaattttaaagtgcacacattgcataccactttccgatgtaatca

SEQ ID NO: 701875 - DNA, 985 bp, Homo sapiens
taataataaaacatctgagaaaaagaaaattttaaaaaggtacatggtatattactctgactgcagaattcagagagcaaacaccccatatagcatagaaagctactctaatatttcttgctaatccacaaaatgttacatggcgtggccttgaccattacttgtgtctgccaactggcagtgctgagactgcatagggacaaggtctcctttaaggaccaatggactcacccatgctgctttgtgtctgaactagtctctgtgtctatgccctcagcaacttatcggcaccacaccagctgccagaagagccatgacaaagatgtagaagtaaggctgctcttcaggagaaataatcaatttcactgtgggtcaacctgttccctgcacaattcttctttctccctcgttacatcccacgaacttaagagcttaatactcctctttttttctgaggcatgtgtaagcagcagcagggtgtgatggaaaaaagcacaggatcaggagtcctacctctgctgtatgtgagatttggaagttactcaacctttcagagcactggtttctagtttccttctatgtaaaatgatactaatagctattgcgccatggggttattgaaacataatatttgsaaaggtaccttgcaaatgctaagtaaaagcactttacacgtgctatagttgtttaaatttttctgggacttagtttccccatctggaaaatgaaagtgttggaaaatatgacttctaaatgtacatagaactcaaacatggaataatctaaatattatataattactctgttttataaaaacatttactaagactattttatactcaaaatacagtactcaagaaagtgataaaatgtgctgattgtctacagttttaggggaaagtagaccacaagcagacagagagtgatcaatttccaaagagaaaactgtaagtagatatggacttacacatttcagcacaaaggg

SEQ ID NO: 701876 - DNA, 985 bp, Homo sapiens
taataataaaacatctgagaaaaagaaaattttaaaaaggtacatggtatattactctgactgcagaattcagagagcaaacaccccatatagcatagaaagctactctaatatttcttgctaatccacaaaatgttacatggcgtggccttgaccattacttgtgtctgccaactggcagtgctgagactgcatagggacaaggtctcctttaaggaccaatggactcacccatgctgctttgtgtctgaactagtctctgtgtctatgccctcagcaacttatcggcaccacaccagctgccagaagagccatgacaaagatgtagaagtaaggctgctcttcaggagaaataatcaatttcactgtgggtcaacctgttccctgcacaattcttctttctccctcgttacatcccacgaacttaagagcttaatactcctctttttttctgaggcatgtgtaagcagcagcagggtgtgatggaaaaaagcacaggatcaggagtcctacctctgctgtatgtgagatttggaagttactcaacctttcagagcactggtttctagtttccttctatgtaaaatgatactaatagctattgcgccatggggttattgaaacataatatttggaaaggtaccttgcaaatgctaagtaaaagcactttacacgtgctatagttgtttaaatttttctgggacttagtttccccatctggaaaatgaaagtgttggaaaatatgacttctaaatgtacatagaactcaaacatggaataatctaaatattatataattaytctgttttataaaaacatttactaagactattttatactcaaaatacagtactcaagaaagtgataaaatgtgctgattgtctacagttttaggggaaagtagaccacaagcagacagagagtgatcaatttccaaagagaaaactgtaagtagatatggacttacacatttcagcacaaaggg

SEQ ID NO: 701877 - DNA, 1204 bp, Homo sapiens
ttaaaagaatgttagaataaaattgctaggttagaaataaaactggttgtggctgggcatggtggctgaagcctgtaatcccagcactttgggaggcaaaggcaggtggatcacctcaggtcagaagatcaagagcagcctggcctggccaacatggtgaaaccccatctctactaaaaacacaaaaattagtcgggcgtagtggcaggtgtctgtaatcccagctacttgggaggctgaggcataagaatcgcttgaacccgggaggtggaggttgcagtgatccaagatcgagccactgcactccagcctgggcaacagggcgagactttgtctaaaaaaaaaaaagaaagaagaaagaaagaaagaaagaaaaagaaagaaagaaagaaagaaagaaagaaagaaagaaagaagaaagaaagaaagaaaagaaataaaattggttaatgtccttaaggcaatacaattacaacctttagagtcatctttctaccaaatagaaataatttgcatctctagctgggggcaggaagagggcatttggatggtaatcagtgctctgcagaaaaaacaaagcaaggaaaaataattgaaagcaggagccaggttcaatgcctcacgcctgtgatcccagcactttgggaggccaaaacaggaggatcatttgatctcaggaattccaaatcagtctgggcaacatagygagacactgtctctacaaagaagataaaattagctgggcatggtggtgcaagcttgtagtcccagctacttgggaagctggagtgggaggattgtttgagccttgggaggtcgaggctgcagtgagctgagattgtgccactgcaatccaggctgggcaacagactgagaccttgtctcaaataacaatagtgataattgaaatcaggagctcaaacaggtatttgtacatccaagtttatagtagcattattcacaaaggacagaagcaacccaagtgtccatcgatgactgggtcaacacaacatggtacaggcatacagtggggtattattcagccttacaaaaaaaggaactctggcacatgctagcataagggtttattgctactggaaggatgttatcataagtaaaataagccagtcacagcaaaccaccatggcatgtgtatacctatataacaaatatgcccattctgcacatgtatgccagaacttaa

SEQ ID NO: 701878 - DNA, 1204 bp, Homo sapiens
ttaaaagaatgttagaataaaattgctaggttagaaataaaactggttgtggctgggcatggtggctgaagcctgtaatcccagcactttgggaggcaaaggcaggtggatcacctcaggtcagaagatcaagagcagcctggcctggccaacatggtgaaaccccatctctactaaaaacacaaaaattagtcgggcgtagtggcaggtgtctgtaatcccagctacttgggaggctgaggcataagaatcgcttgaacccgggaggtggaggttgcagtgatccaagatcgagccactgcactccagcctgggcaacagggcgagactttgtctaaaaaaaaaaaagaaagaagaaagaaagaaagaaagaaaaagaaagaaagaaagaaagaaagaaagaaagaaagaaagaagaaagaaagaaagaaaagaaataaaattggttaatgtccttaaggcaatacaattacaacctttagagtcatctttctaccaaatagaaataatttgcatctctagctgggggcaggaagagggcatttggatggtaatcagtgctctgcagaaaaaacaaagcaaggaaaaataattgaaagcaggagccaggttcaatgcctcacgcctgtgatcccagcactttgggaggccaaaacaggaggatcatttgatctcaggaattccaaatcagtctgggcaacatagtgagacactgtctctacaaagaagataaaattagctgggcatggtggtgcaagcttgtagtcccagctacttgggaagctggagtgggaggattgtttgagccttgggaggtcgaggctgcagtgagctgagattgtgccactgcaatccaggctgggcaacagactgagaccttgtctcaaataacaatagtrataattgaaatcaggagctcaaacaggtatttgtacatccaagtttatagtagcattattcacaaaggacagaagcaacccaagtgtccatcgatgactgggtcaacacaacatggtacaggcatacagtggggtattattcagccttacaaaaaaaggaactctggcacatgctagcataagggtttattgctactggaaggatgttatcataagtaaaataagccagtcacagcaaaccaccatggcatgtgtatacctatataacaaatatgcccattctgcacatgtatgccagaacttaa

SEQ ID NO: 701879 - DNA, 1204 bp, Homo sapiens
ttaaaagaatgttagaataaaattgctaggttagaaataaaactggttgtggctgggcatggtggctgaagcctgtaatcccagcactttgggaggcaaaggcaggtggatcacctcaggtcagaagatcaagagcagcctggcctggccaacatggtgaaaccccatctctactaaaaacacaaaaattagtcgggcgtagtggcaggtgtctgtaatcccagctacttgggaggctgaggcataagaatcgcttgaacccgggaggtggaggttgcagtgatccaagatcgagccactgcactccagcctgggcaacagggcgagactttgtctaaaaaaaaaaaagaaagaagaaagaaagaaagaaagaaaaagaaagaaagaaagaaagaaagaaagaaagaaagaaagaagaaagaaagaaagaaaagaaataaaattggttaatgtccttaaggcaatacaattacaacctttagagtcatctttctaccaaatagaaataatttgcatctctagctgggggcaggaagagggcatttggatggtaatcagtgctctgcagaaaaaacaaagcaaggaaaaataattgaaagcaggagccaggttcaatgcctcacgcctgtgatcccagcactttgggaggccaaaacaggaggatcatttgatctcaggaattccaaatcagtctgggcaacatagtgagacactgtctctacaaagaagataaaattagctgggcatggtggtgcaagcttgtagtcccagctacttgggaagctggagtgggaggattgtttgagccttgggaggtcgaggctgcagtgagctgagattgtgccactgcaatccaggctgggcaacagactgagaccttgtctcaaataacaatagtgataattgaaatcaggagctcaaacaggtatttgtacatccaagtttatagtagcattattcacaaaggacagaagcaacccaagtgtccatcgatgactgggtcaacacaacatggtacaggcatacagtggggtattattcasccttacaaaaaaaggaactctggcacatgctagcataagggtttattgctactggaaggatgttatcataagtaaaataagccagtcacagcaaaccaccatggcatgtgtatacctatataacaaatatgcccattctgcacatgtatgccagaacttaa

SEQ ID NO: 701880 - DNA, 692 bp, Homo sapiens
ctctgagtttgcagaaagagttttgcctgtgggggagactgccacttccttaacactttaattaaatggcataaaatatatctcctttcatttcaagcatggttaaagaaacaacaaacaacttatgagaccagagatcttatgaatccacgtaatttaatttctggggtgagctgcacagccacaggcttgatattaatgaatgcaaaaaggaacctgaaaccttttgttacacagaagccatctttggacaccagggtgagagacacaggtactaataagcagaagacctctgtttcaatagtatgagaaaaagaggagcaacacagaaaattgagaaaaggaagcctcacttaatttaactgactgagatacacatcagcaatgatttagaacagcttacgaagtacctactcaatggctacttcgctatagaaataaatcaagaaaagatgtgccctgctccagagactttatttttaaaaagaatttgagatatgagaagaaaaccgtggtattattaagtgcacgttttacaatctgcgtttctctccatggttctatcccatctctgagtaggattatgaaatcaaagaggagttactaaggggagggaaaggaagctagaaaacyggatatgggaagtaaaagtctagaaaataggaaagcagaaaaacaagaacgaaataaac

SEQ ID NO: 701881 - DNA, 1920 bp, Homo sapiens
ttcagcatgtcaacttggaatggcaggggcatatttcccatcagagtaggaatacttcggtttcaagtccctgggccaggagcctgagctccaaaacagaagaagataagatatgagaattaaaggaaatttaaagtgaaaacttataaaactcagggacgccaaccagggagtaggaagtatcctctcctcacacccccataacatcctttacctccataggcctaggccagtcccaaactggaatttgagaagtttgctttctacctgacattttgtaatgtaatgcttaactcattttcattcattttctttcatcataaaataagctcatcaccattttgagattttataaagggttatattttaggcaaaagttgagagtcttttgacttttttaacctttttaaaaattttgacccatgtgtagatcaataaaactaccataaatttaaacataccaactttttacaacatttaaggtaataattgactgtaagaagcatcttatagccttatagacaagagatgactaatgagtcttccaaaggtgttcagcccttgagaagtagtttaaatcataggagaatatagattaagaatatattacctattcttgttactgggttttaagtagttaaaattcttttggtgttacataattcagagctgaaataaaatttcaaaattgggtattttgaaagaaaatacattgttctaccaaaaagacacctgtacttgtatgtttattatagcactattcacaatagcaaagacatggattcwacctaggtgcccatcagcagtggattggataaagaaaatatgagatatatatctcctatagaatactatgcagccataacaaaagaacaaaatcatgtcctctgcagcaacgtgaatgcagctggaggccattatgctaagcaaattaatgcaggaacagaaaaccaaataccatatatattctcacttataagtaggagttacaaactgtatactcaaggacataaagatagcaacaatagacagtggggactactaaagcagggaggatgggggggtgtaagagttgataaactaataggtactatgctcactacctggatgatggaatcatttgtattccaaacctcagcagcatgaaatatacccatgtaacaaacctgtacatgtaccccctggatcaaaaataaaaattgaaattattaaaataaataaatgaattaattaattaaatacgattggccattggatgcaactgcaaattgaaacaagcccagaactgattatgctagagcaagagagaaaatttgccagtggggtggaagaaatcgccaaatgagacaagaaatgaccatcaggtagagaagaaaagccaaaaacaaggacaatcatgttgtatagagaaagaggggaaaaaaagatgactaagaaaaacagttgttttacacaaataaagaaaaggtgagtacaagagaaggtaataattcctgtctttccttttctaaaatcagaatgatatttggcaagcagtgtatggatttcaggattgtcaggatgtaagaactcactaacttggctgtcactcctggaattaagggcaaaggtgactagaattataggaacattaaggatcatgccaacatcatcatatatccaatccactgtgagcagtgttttggctggccaatctcaaaaatctaggctttgatgtcttagggaaagcagtgattacataccaatcactgaattactgttatcagttgtttcacattaataagcatcaatgttttttgagaaaagtgttaatctgctggtcttatattaaggaaattctcctctagaaaaaggacacacaccaggattgacagtccctgacactaatctcctgggaaaatcatgtaagagaagacacta

SEQ ID NO: 701882 - DNA, 1920 bp, Homo sapiens
ttcagcatgtcaacttggaatggcaggggcatatttcccatcagagtaggaatacttcggtttcaagtccctgggccaggagcctgagctccaaaacagaagaagataagatatgagaattaaaggaaatttaaagtgaaaacttataaaactcagggacgccaaccagggagtaggaagtatcctctcctcacacccccataacatcctttacctccataggcctaggccagtcccaaactggaatttgagaagtttgctttctacctgacattttgtaatgtaatgcttaactcattttcattcattttctttcatcataaaataagctcatcaccattttgagattttataaagggttatattttaggcaaaagttgagagtcttttgacttttttaacctttttaaaaattttgacccatgtgtagatcaataaaactaccataaatttaaacataccaactttttacaacatttaaggtaataattgactgtaagaagcatcttatagccttatagacaagagatgactaatgagtcttccaaaggtgttcagcccttgagaagtagtttaaatcataggagaatatagattaagaatatattacctattcttgttactgggttttaagtagttaaaattcttttggtgttacataattcagagctgaaataaaatttcaaaattgggtattttgaaagaaaatacattgttctaccaaaaagacacctgtacttgtatgtttattatagcactattcacaatagcaaagacatggattctacctaggtgcccatcagcagtggattggataaagaaaatatgagatatatatctcctatagaatactatgcagccataacaaaagaacaaaatcatgtcctctgcagcaacgtgaatgcagctggaggccattatgctaagcaaattaatgcaggaacagaaaaccaaataccatatatattctcacttataagtaggagttacaaactgtatactcaaggacataaagatagcaacaatagacagtggggactactaaagcagggaggatgggggggtgtaagagttgataaactaataggtactatgctcactacctggatgatggaatcatttgtattccaaacctcagcakcatgaaatatacccatgtaacaaacctgtacatgtaccccctggatcaaaaataaaaattgaaattattaaaataaataaatgaattaattaattaaatacgattggccattggatgcaactgcaaattgaaacaagcccagaactgattatgctagagcaagagagaaaatttgccagtggggtggaagaaatcgccaaatgagacaagaaatgaccatcaggtagagaagaaaagccaaaaacaaggacaatcatgttgtatagagaaagaggggaaaaaaagatgactaagaaaaacagttgttttacacaaataaagaaaaggtgagtacaagagaaggtaataattcctgtctttccttttctaaaatcagaatgatatttggcaagcagtgtatggatttcaggattgtcaggatgtaagaactcactaacttggctgtcactcctggaattaagggcaaaggtgactagaattataggaacattaaggatcatgccaacatcatcatatatccaatccactgtgagcagtgttttggctggccaatctcaaaaatctaggctttgatgtcttagggaaagcagtgattacataccaatcactgaattactgttatcagttgtttcacattaataagcatcaatgttttttgagaaaagtgttaatctgctggtcttatattaaggaaattctcctctagaaaaaggacacacaccaggattgacagtccctgacactaatctcctgggaaaatcatgtaagagaagacacta

SEQ ID NO: 701883 - DNA, 640 bp, Homo sapiens
aatctttgggtgtgttagctggtgatcattcagccattgttagccgatttattgtgtggtcataccctgtgatccaaaatttcttagcttggtccatccccttacccttccaagccaatgcatcttcctctccgctccctgcttctgcagaccctgagtctatgccacaccttccatctcatctttattctcaggttgttcccaccataccaatgtccttaaactaatgtccatgtccaatgtccatgtactctggaattgaaagaaacatgcagttgtaaatgagatctgctctccatcagaccaaaccagttgctctcttaattgtgctggtctgctgctgcaggttggccagacaagctctgaacatcactttcctactggagaaccaaatgctgagcaaggctgcaggccctctgccttagttttatatctacatgtgcaaggaacttcctcctcaytctggggctttgaaacattagaaggtagattacaaattctattacagtattcaccaacatcatattctcctctcttcaggaagaacattgtcattttccctttcttgatgccaaaattgtggaaagctaactgataagcaaatactttagtaagtattaaaattactacacccttaata

SEQ ID NO: 701884 - DNA, 640 bp, Homo sapiens
aatctttgggtgtgttagctggtgatcattcagccattgttagccgatttattgtgtggtcataccctgtgatccaaaatttcttagcttggtccatccccttacccttccaagccaatgcatcttcctctccgctccctgcttctgcagaccctgagtctatgccacaccttccatctcatctttattctcaggttgttcccaccataccaatgtccttaaactaatgtccatgtccaatgtccatgtactctggaattgaaagaaacatgcagttgtaaatgagatctgctctccatcagaccaaaccagttgctctcttaattgtgctggtctgctgctgcaggttggccagacaagctctgaacatcactttcctactggagaaccaaatgctgagcaaggctgcaggccctctgccttagttttatatctacatgtgcaaggaacttcctcctcactctggggctttgaaacattagaaggtagattacaaattctattacagtattcaccaacatcatattctcctctcttcaggaagaacattgtcattttccctttcttgatgccaaaattgtggaaagctaactgataagcaaatactttagyaagtattaaaattactacacccttaata

SEQ ID NO: 701885 - DNA, 682 bp, Homo sapiens
tgaagtatccccgcattcttacataggtttgtgaattcctaagaattcaatgtccacctcaagttccaatttcttcatgaacccttatgatattccataaccaccatgctttttccattgttttgtatgactttttaartcttttccatatacagtcattatcccattaatttgccaaaacctgaccatatcgtataactttctggatccctaggacttagctgataatgataactcactaaatttggctgatacttgttgcagtgatgattatgataagaattatggtttataatatatattgcatgttattggaaaaaggccatgtattcagaggaaattagattgagaaatagttcactagtgagaaaattcatttttaaaaatagaaggaaattattcacaattttaattttcatatatttttacattaatatattgatcacagtattgattatacttacacactgagggtgctaatgttgtgaattaaataaaatgatgcgttttatatatatgttatattttatagttcaaaatattttaataccttcttggccatgctattcgaatccttaatatttctttaacgctttttgtgcctatgatagttttgcttaaaatatcatataagatataattacatgtatgccatggagccctgtattaaagaatattaaaa

SEQ ID NO: 701886 - DNA, 1090 bp, Homo sapiens
cttcaaaaatccacagaaatgaatttcaaaagatttgaatttaagcagactttgttttaaaaaaacagtcctaccgcttactagctgtgtgactttggacaagcttctcaaccactctatacctcagcattctcatctttgcaacagagataataatacctagattacagtgttgatacgagaattaaaatcaattgtgtccatactgaatgcttcgtagagtgcctggcacatagtaagtactcataaatgaggctatatgtattatgatgttattgttgctcttacaattgtaatagtgattgtgctatgccttgaggttaggagaacagaagttttagggtagagtgctttcctgatatcacaagacattcctaatagcacaagaggcaggcagctttctgctttgtccattgagaaaaattgcttatttgagtattatcttttttgaggcttcagaggtaatacaaggagttaaggaattggctatatatatatacacgtatatatatatatatatatatatatatggatatatttttgakacagggtctcactctgttgcccaggctggagtgcagtggcccaatcctagttccctgtagcctcaaacttctgggctcaagcaatcctcctgcctcagcctcctgagtagctaggactacaggtgcagaccatcaggcttgacatattcttcaaacatttcattatttttggagatagggtcttgctatgttgcccaggctaatctcaaactcgcaaagtgctgggattacaaaagtgagccactgggccccgtcctggttatttattaaaagtaattattgctaattaacctggcaaaagtatattatttttaaagaaatagagatatttgccaacaagtaacattttcaccatcttttcattcttcttctacattgataactaagtcaaaaataatctgctaaacttctggaaaactttgtaccattctaccttggaaaaaaaggtttcctttcataggtccatttcatatcttccaaaaaagatgaacctagctagagttttacataataagaggtgaaacgtgtaagttttcatgaaagta

SEQ ID NO: 701887 - DNA, 1090 bp, Homo sapiens
cttcaaaaatccacagaaatgaatttcaaaagatttgaatttaagcagactttgttttaaaaaaacagtcctaccgcttactagctgtgtgactttggacaagcttctcaaccactctatacctcagcattctcatctttgcaacagagataataatacctagattacagtgttgatacgagaattaaaatcaattgtgtccatactgaatgcttcgtagagtgcctggcacatagtaagtactcataaatgaggctatatgtattatgatgttattgttgctcttacaattgtaatagtgattgtgctatgccttgaggttaggagaacagaagttttagggtagagtgctttcctgatatcacaagacattcctaatagcacaagaggcaggcagctttctgctttgtccattgagaaaaattgcttatttgagtattatcttttttgaggcttcagaggtaatacaaggagttaaggaattggctatatatatatacacgtatatatatatatatatatatatatatggatatatttttgagacagggtctcactctgttgcccaggctggagtgcagtggcccaatcctagttccctgtagcctcaaacttctgggctcaagcaatcctcctgcctcagcctcctgagtagctaggactacaggtgcwgaccatcaggcttgacatattcttcaaacatttcattatttttggagatagggtcttgctatgttgcccaggctaatctcaaactcgcaaagtgctgggattacaaaagtgagccactgggccccgtcctggttatttattaaaagtaattattgctaattaacctggcaaaagtatattatttttaaagaaatagagatatttgccaacaagtaacattttcaccatcttttcattcttcttctacattgataactaagtcaaaaataatctgctaaacttctggaaaactttgtaccattctaccttggaaaaaaaggtttcctttcataggtccatttcatatcttccaaaaaagatgaacctagctagagttttacataataagaggtgaaacgtgtaagttttcatgaaagta

SEQ ID NO: 701888 - DNA, 1090 bp, Homo sapiens
cttcaaaaatccacagaaatgaatttcaaaagatttgaatttaagcagactttgttttaaaaaaacagtcctaccgcttactagctgtgtgactttggacaagcttctcaaccactctatacctcagcattctcatctttgcaacagagataataatacctagattacagtgttgatacgagaattaaaatcaattgtgtccatactgaatgcttcgtagagtgcctggcacatagtaagtactcataaatgaggctatatgtattatgatgttattgttgctcttacaattgtaatagtgattgtgctatgccttgaggttaggagaacagaagttttagggtagagtgctttcctgatatcacaagacattcctaatagcacaagaggcaggcagctttctgctttgtccattgagaaaaattgcttatttgagtattatcttttttgaggcttcagaggtaatacaaggagttaaggaattggctatatatatatacacgtatatatatatatatatatatatatatggatatatttttgagacagggtctcactctgttgcccaggctggagtgcagtggcccaatcctagttccctgtagcctcaaacttctgggctcaagcaatcctcctgcctcagcctcctgagtagctaggactacaggtgcagaccatcaggcttgacatattcttcaaacatttcattatttttggagatagggtcttgctatgttgcccaggctaatctcaaactcgcaaagtgctgggattacaaaagtgagccactgggccccgtcctggttatttattaaaagtaattattgctaattaacctggcaaaagtatattatttttaaagaaatagagatatttgccaacaagtaacattttcaccatcttttcattcttcttctacattgataactaagtcaaaaataatctgctaaayttctggaaaactttgtaccattctaccttggaaaaaaaggtttcctttcataggtccatttcatatcttccaaaaaagatgaacctagctagagttttacataataagaggtgaaacgtgtaagttttcatgaaagta

SEQ ID NO: 701889 - DNA, 592 bp, Homo sapiens
gtgagccgagatcgcaccactgcactccagcctgggcgacagaacaagactccttctcaaaaaaacaaagaaacaaaaaaaaccaggcagatacaggtagaaacatgttaatatttgcatgtcagcagagcctcttcctgctatgaaggaagatttgagatgagtagttggttctcggatctgatgctttgtgtgtgttctttcaaattcctatgacatagtactgcctgctattggaggtagattgagttatgtggtagggccagtggcacctttttttaaacttttatttccataggttattggggaacaggtggtgaatggtgggcagatcacctaaggttcgagaccagcctggccaacatggtgaaaacccatcgctactaaaaaatacaaaaattaaccaggcttggtggtgcgtgcctatagtaccagctactcagaaggctgaggtaggagaatygcttgaatctgggaggcagaggctgcagtgagctgagatggcgccactgcactccagcccgggcgacagagtgagactccgtctcaagaaaaaaacaaaaaaaaactcaacaaaaatccttatttgtaa

SEQ ID NO: 701890 - DNA, 1364 bp, Homo sapiens
ttttatttctgtgaaatagactcccaaagtgggatttatgaagcaaaggtaatatgaatttataatttggtaacagcgtgccagggtactttagaaaacatgatagttattctcactttcactacaatatgcaagcgacatcattttttctttttaatgatatttttctatttcctctgctcccaatccacaacccaaatatcagctaaaaatgataatttacttctatttgaatctgcacgctatgggttactgataaggttagtacgttttcttagtttatggaccattagaattgtctgatttctgattgccaattaatattctgtacttcctttttccttattttattaaattttccttccttcttttctttcttccttctttccatctttcctttttttcctccttctttctgccttattcttatctgcatgataaagtttccatatatactgtaaattgtaaaccctttgtctaccaatttttctttcaatattttcacagtctgaatttaacattcaattttaaacatgtatctaaatatatatttaacatttatatccataaatttattcatattgttcttacaaattatgggataattatgaattattcctttcatgcttaaaaatattctctgcagttggaagtgttttatttttatcatgttatacctagaattaactttgataaatgctctgaaattagaatttatttactcttggcagccaaatttatctgcaatatttactagatgcaatattatttaatcacttataaataatgacatcttatatgaaattatataataatcaggtaagtttctgtattttatcttgttttttcagcgaaattcagtgacttaaaatataattaatatctactagataaaagcttccttattgtaatatatttatacatttatttgggtaagactataattctgatagtaagtgtcttaggttctctgcgcctccacgggtataaaaatctccctcatagggatattttgaggattaaatgaaataatacataacagtgtttgraacactatcaagcaaaaggtaaataccaatgaaataatatgtaattgaatatttggcttaccttctttatgtgtgattattggtgaatttcgtattgatttttaccactccatgcttaaactcttgtgtatttaggaaagaagactacattttatttctatatttaatcaaaatttctgcttttattcattttataatgtttatttttttccaaagtacatattttaaaccatatttcacttgagtactgatttcatcaccttgtagagtttttccacataatttagacacgttttctttatgtccaaaaatatg

SEQ ID NO: 701891 - DNA, 625 bp, Homo sapiens
aactcacacaatcacaaggtcccacaacaggccgggccatctgtaagctgaggaacaaggaagccagtctgaatcccaaagatgacaaacttggagttcaatgttcaagggcaggaagcatccagcacaggagatagatgtaggctgggaggctaagccagtcaagacttttcacgtttttctgcctgtttcatatcctagctgcaatggcagctgattagatggtgcccacccagattaagggtgggtctgcctttcccagcacactgactcaaatgtttatctcctttggcaacaccctcacagacacactcaggattaatattttgcttccttccatccaatcaagttgacactcagtattaaccatcacactaagcttgttattttatagaaatgcttgaaaaccagagataaatgcagctacaaatgaacgatgactctgygttttccttgtatatataaagatcaacaataacacttaggtcatgaaacccacctactttacagatcattatggaaataatacactgcttcagcaatggagaaacaatcatccatatttatgcaagaactaaattcaagtttgaaagcttgctttgagcttgaagatataaaacatgat

SEQ ID NO: 701892 - DNA, 602 bp, Homo sapiens
tgctcctttgttatggacattaagatagagaatttgtatctatctcttggggatttgggagtagtttagtagaaaggtgtgtaygtgtatattctatgccagctgttcaataggttgaggatgagtttttaaggaactccagagacatgtaaacaaataactgaaattcatcctgaagaaaataaggaagcaggtaggtagacagattggatgcctagttagagcccagcaaacagaggctttaaaaatagattttgagagaattcgatatttcaaaaaaagcatcaaagtacatgatggcaaaaataggtcattatgggattttcttacatgtattttatggtgtagttatacattttaatatcatatgagaaactgaaatgtaaaccttcaggatttagggcttctaaagatctctatcttaccctgggaagaattatgatataaaagatattaaaactattctgactttttagaagaagttttatatacagacttggaaatattctgactgttctgtgtatgtgtgctaatgtttcatttatctgcctttgcgaaggaatgttacacattattgagacttacataatattaaagctgtg

SEQ ID NO: 701893 - DNA, 1513 bp, Homo sapiens
gccatcgcataatgggttgccaggtgcaatttcacctctgtctgagaccattgcttggatcaaagagggctcttgtttatccagctccctatgagaccaggcagggccagtggtgaccctccaagctgagctcagccagagggaacctgtgtcttggtgctcagttctgaacagtctcatagacccccatacttgagtgggcttagggacccatacccttctaaaatccactgagaaatcctcaacagaggagttatgtgttaactttatcttttagaggaatcatgttggcagcagcttgaggataggctggagtggctaagaatgacaagggagtggcaattgaatcgtagaaatacttcaaactcaggcacctcgcatttaaaacaccacagcacttccacgcatcaccagctttacctgcttctattttccagtatgaagcttctgctcctgccaatatgttctgtttgaccttccctgaatacacactgggtttccctgcctattcagcccgtacttatgtctttctcttcacttatatattcctctagtccttatcaaaaatcctaaccgttcttttagggtccatcttcttcactcagtctttcttagtttgttcaaattacctaatatgattcataaattaccttgtattgaggtatttatgttccatactgtgacttgtctcttccagcaattgggttcaaatgtgatggcaggcacacctcttgcacaagctggtattttacctgattttaacctatgatggctcattgttcaatgttggcactctataacttgctgaataaatagatgactaaataaaccacccattgactcatcttataggcacccctatatagctgtaagggaattatttagtaactgcttaaaatgtatctaaattggatgttttacattaggttcataagtgaaaagcaagcttgtcagagatcttcaaatgaagcttatttaatgagttattttttaaaatcctatacaacaatggaaaaccacagtaagtgggtgtgatggtagttcaagagtaacattttactgatttataagaagagtaaaaaatagaagtgaacagtgaaaagactgaaatcatttttcctccatatgttttgttttatgtttgcttttgcttctggacatgacacaaacgaagttgcagataaaagatagcacctttagttggtaagaacagggcactgattagcagcaatatattgaaactatataaagcaatgagtttaaaagtactttaggaaacctgaggtctttaatcaaggctgcaactgtaagttttttaaaaagccaaaaaagaagccaagtctttagtaaaagggctgttttaaaacattaaattttatttgaatttttttcctaatttataccaaatcttcaaagtagtcgggacttagttacatcttaactgttattcttttgataatttttttwaatagaaaaggcagttgtgattagataatgatcaaaatgtttttca

SEQ ID NO: 701894 - DNA, 1265 bp, Homo sapiens
  misc_feature 797, 798, 799, 800, 801, 802, 803, 804, 805, 806, 807, 808,809, 810, 811, 812, 813, 814, 815, 816, 817, 818, 819, 820,821, 822, 823, 824, 825, 826, 827, 828, 829, 830, 831, 832,833, 834, 835, 836, 837, 838, 839, 840, 841, 842, 843: n = A,T,C or G
  misc_feature 844, 845, 846, 847, 848, 849, 850, 851, 852, 853, 854, 855,856, 857, 858, 859, 860, 861, 862, 863, 864, 865, 866, 867,868, 869, 870, 871, 872, 873, 874, 875, 876, 877, 878, 879,880, 881, 882, 883, 884, 885, 886, 887, 888, 889, 890: n = A,T,C or G
  misc_feature 891, 892, 893, 894, 895, 896: n = A,T,C or G
ttgctgatgctattattatcagcaatcctctmgttttcccattagttggatagaatgaatgggctggcggggaattagatggcatcctatgtcaaacctctctgaaggctgatgccagccataacatagtaggctcattaaagctccttctagttggtgcattccttcccgggtactgtctagctgcaggaatatcaataataccaagaagagggccaggcacggtggctcacgcctgtaatcccagcactttgggaggccgaggcgggcggatcatgaggtcaggagatcgagaccatcctggctaacacagtgaaaccccgtctctactaaaaatacaaaaaattagccagccatggtggcgggcgcctgtagtcccagctactcgggaggctgaggcaggagaatggcgtgaacccgggaggcggagcttgcagtgagtcaagagatcgcgccactgcactccagcctgggccaaagtgcgagactccgtctcaaaaaataaaaaaataaaaaacaataataataaaaccaagaagaggtgtaaaaaaaacactaaggacaaaaaccgttgtatgcaaaaaaaacagttctggagggccaggcaataataattagtgaaagcaaagtgtgtagcagtgatattagccagagcagtcagttgtgtgggggaggcaaaaaacacatttatttcttagcactacttttgtcacctgtctaggggtggtggggattttgggatgtaaacctgataggccccaaactgaagcatagctgagggctggtggttgaaaacnnnnnnnnnnnnnnnnnnnnnnnnnnnnnnnnnnnnnnnnnnnnnnnnnnnnnnnnnnnnnnnnnnnnnnnnnnnnnnnnnnnnnnnnnnnnnnnnnnnncctttcctgattttcctgtttttgtttctccccctttctctgcaatgacttgaaaccaaaggtcttcttttctttctttgtcagcctaccgtatgtgtagtattttggacagatcactgaactaggagccagaagaccagaattcttctccaggtctgttattaattggtttggtgaccttgtaggagagccactgtttccgtcctccattttctgatgttcattgttcatggtcacagagccaattagagttgagactagaattcctttcttctggtgtccagtgcctcattcactgtcctcattgcttccatctcgtgtacaaatgcgcttatgtgcacaaaaactcttataacatcctcaagtgct

SEQ ID NO: 701895 - DNA, 1265 bp, Homo sapiens
  misc_feature 797, 798, 799, 800, 801, 802, 803, 804, 805, 806, 807, 808,809, 810, 811, 812, 813, 814, 815, 816, 817, 818, 819, 820,821, 822, 823, 824, 825, 826, 827, 828, 829, 830, 831, 832,833, 834, 835, 836, 837, 838, 839, 840, 841, 842, 843: n = A,T,C or G
  misc_feature 844, 845, 846, 847, 848, 849, 850, 851, 852, 853, 854, 855,856, 857, 858, 859, 860, 861, 862, 863, 864, 865, 866, 867,868, 869, 870, 871, 872, 873, 874, 875, 876, 877, 878, 879,880, 881, 882, 883, 884, 885, 886, 887, 888, 889, 890: n = A,T,C or G
  misc_feature 891, 892, 893, 894, 895, 896: n = A,T,C or G
ttgctgatgctattattatcagcaatcctctagttttcccattagttggatagaatgaatgggctggcggggaattagatggcatcctatgtcaaacctctctgaaggctgatgccagccataacayagtaggctcattaaagctccttctagttggtgcattccttcccgggtactgtctagctgcaggaatatcaataataccaagaagagggccaggcacggtggctcacgcctgtaatcccagcactttgggaggccgaggcgggcggatcatgaggtcaggagatcgagaccatcctggctaacacagtgaaaccccgtctctactaaaaatacaaaaaattagccagccatggtggcgggcgcctgtagtcccagctactcgggaggctgaggcaggagaatggcgtgaacccgggaggcggagcttgcagtgagtcaagagatcgcgccactgcactccagcctgggccaaagtgcgagactccgtctcaaaaaataaaaaaataaaaaacaataataataaaaccaagaagaggtgtaaaaaaaacactaaggacaaaaaccgttgtatgcaaaaaaaacagttctggagggccaggcaataataattagtgaaagcaaagtgtgtagcagtgatattagccagagcagtcagttgtgtgggggaggcaaaaaacacatttatttcttagcactacttttgtcacctgtctaggggtggtggggattttgggatgtaaacctgataggccccaaactgaagcatagctgagggctggtggttgaaaacnnnnnnnnnnnnnnnnnnnnnnnnnnnnnnnnnnnnnnnnnnnnnnnnnnnnnnnnnnnnnnnnnnnnnnnnnnnnnnnnnnnnnnnnnnnnnnnnnnnncctttcctgattttcctgtttttgtttctccccctttctctgcaatgacttgaaaccaaaggtcttcttttctttctttgtcagcctaccgtatgtgtagtattttggacagatcactgaactaggagccagaagaccagaattcttctccaggtctgttattaattggtttggtgaccttgtaggagagccactgtttccgtcctccattttctgatgttcattgttcatggtcacagagccaattagagttgagactagaattcctttcttctggtgtccagtgcctcattcactgtcctcattgcttccatctcgtgtacaaatgcgcttatgtgcacaaaaactcttataacatcctcaagtgct

SEQ ID NO: 701896 - DNA, 1265 bp, Homo sapiens
  misc_feature 797, 798, 799, 800, 801, 802, 803, 804, 805, 806, 807, 808,809, 810, 811, 812, 813, 814, 815, 816, 817, 818, 819, 820,821, 822, 823, 824, 825, 826, 827, 828, 829, 830, 831, 832,833, 834, 835, 836, 837, 838, 839, 840, 841, 842, 843: n = A,T,C or G
  misc_feature 844, 845, 846, 847, 848, 849, 850, 851, 852, 853, 854, 855,856, 857, 858, 859, 860, 861, 862, 863, 864, 865, 866, 867,868, 869, 870, 871, 872, 873, 874, 875, 876, 877, 878, 879,880, 881, 882, 883, 884, 885, 886, 887, 888, 889, 890: n = A,T,C or G
  misc_feature 891, 892, 893, 894, 895, 896: n = A,T,C or G
ttgctgatgctattattatcagcaatcctctagttttcccattagttggatagaatgaatgggctggcggggaattagatggcatcctatgtcaaacctctctgaaggctgatgccagccataacatagtaggctcattaaagctccttctagttggtgcattccttcccgggtactgtctagctgcaggaatatcaataataccaagaagagggccaggcacggtggctcacgcctgtaatcccagcactttgggaggccgaggcgggcggatcatgaggtcaggagatcgagaccatcctggckaacacagtgaaaccccgtctctactaaaaatacaaaaaattagccagccatggtggcgggcgcctgtagtcccagctactcgggaggctgaggcaggagaatggcgtgaacccgggaggcggagcttgcagtgagtcaagagatcgcgccactgcactccagcctgggccaaagtgcgagactccgtctcaaaaaataaaaaaataaaaaacaataataataaaaccaagaagaggtgtaaaaaaaacactaaggacaaaaaccgttgtatgcaaaaaaaacagttctggagggccaggcaataataattagtgaaagcaaagtgtgtagcagtgatattagccagagcagtcagttgtgtgggggaggcaaaaaacacatttatttcttagcactacttttgtcacctgtctaggggtggtggggattttgggatgtaaacctgataggccccaaactgaagcatagctgagggctggtggttgaaaacnnnnnnnnnnnnnnnnnnnnnnnnnnnnnnnnnnnnnnnnnnnnnnnnnnnnnnnnnnnnnnnnnnnnnnnnnnnnnnnnnnnnnnnnnnnnnnnnnnnncctttcctgattttcctgtttttgtttctccccctttctctgcaatgacttgaaaccaaaggtcttcttttctttctttgtcagcctaccgtatgtgtagtattttggacagatcactgaactaggagccagaagaccagaattcttctccaggtctgttattaattggtttggtgaccttgtaggagagccactgtttccgtcctccattttctgatgttcattgttcatggtcacagagccaattagagttgagactagaattcctttcttctggtgtccagtgcctcattcactgtcctcattgcttccatctcgtgtacaaatgcgcttatgtgcacaaaaactcttataacatcctcaagtgct

SEQ ID NO: 701897 - DNA, 578 bp, Homo sapiens
gcaacctccacctcccgaggttcaagcaattctcttgcctcagcctcttgagtagctgggattacaggcatgcaccaccacacttggctcattttcagtatttttagtagaaacagggtttcaccatgttggccacactggtctcgaactcctgagmtcaagtgatctgctcaccttggcctcccaaagtgctgggattacaggcatgagccaccacgcccagccatcaattgatttttgacaaggatttttgtcaattgatttttgaaaacctgaatgtctatcaccttatggatcgatgaataaaatgaggtttattcatacaatagactattatttggcaataaaaaggaattaagtggtgatatatactataaggtagatgagccacaaaaccattacactaagtgagagaagccagacatagaagaccagatattgtatgcttttatatacataaaatgtcctgaataggaaaaactagagaaacatatttattccatctatttattggaaggaaaaaggtcagccagatgggattaagaaacaaaatcgattttttaagcagtattttaaaa

SEQ ID NO: 701898 - DNA, 1192 bp, Homo sapiens
ttggagtgcatggcaccgtgtcagctcactgcaacctccgtctcctgggttcaagcaattctcctgcctcagcctccctagtagctgggattacaggtgcccaccaccatgcctggctagttttatatatatgtatatatttttagtagagacagagtttcaacatgttggccaggctggtctcaaactcctgatctcaggtgatccacctgcctcagcctcccaaagtgctgggattacaggcaggagccatcgcgcccagcctgtattttttttaagacctactatatgtctggaactgttataggtttggagaaccagctaatagtaaacaaactaatataaaaatgatgtaatcaagtaatttagaagattttatatattattgttgccaaaaaggtgatcaagtagattttctttgtcaaagaacataacagttttttcatcagtgcatgataattgagtacttttggaatcacaacactttaaacatttagacaggatcctatttacattttagaaagagattaagagatattctatagatgtgtcagtatgatggaaagaatgcattgtttttagaaagtcaatgagcactttaaamactttcaactctgttttaaaccttaagtataaaagaaactagctacaaatacccatttaattaaaactgtttttgagaagtagaacaggattctcaaatggggttgctgatagcttgtaaaaatgtattcaatatgcctataaatttcttaaactgtagaaagtgagtcagctagccaaaatcttcttggctagtaagggtgtacaaaatacagagtgagaagactgagtaggaggcagatttaagaactgagaaacctgatatctggaccaactaatagtgacacagggtcattcttccaacttttgagattcaactaaagaatggcttgttttttatctaaagtataacttctgaaaacattctcctacaaaagctttggtggcattatggaaggtgaattaatttatcaatcatctgtgactccatggacagtcatttctttgggcaattaagaattagaacctgttttctgataccagtgtattgacatataatttaattttactggaagaaggtgatgttagaaagagttaatataataatataaattcttgtgaaatttttcctgtaaaattgcttagtttg

SEQ ID NO: 701899 - DNA, 664 bp, Homo sapiens
tgttctagatgctttatatgcattttcttgtttaatcttctcaacatccagacagaggtaaatagctttttatatccgaggaaactaaggctcagagaagttaaataacttacacagcactgattttaccgagacctggctgaacaccccttattttttctctatctgttagggacacttacagaatcttggggatctttgtgaagccctctctgtcttatgtgtaattattaaatctattccttttgtactttttgtactgatgtaaccctgattgattactgtagtgttcacttcctaataagtttccccgcttctgctctgtttatcaataaagctattctactgctatgagatgacttttctctaaatacttcttttttcatgtcagcttattgatctaaagtcttcaattwatgattgttagccagattttcttaatttgacttttaagtttctctgtaaattaatcctagtctattattctaaacttactttgttttacttgccagcatcaagtgtgtatttcacccagaatgatcttctagtctgtgaatataccatgtaaactttgttctgtgtcatttgtcctaaatcctgatcatcttttaatgtacaattcaacttctgcctcttagacactttactttttaattccgtctaa

SEQ ID NO: 701900 - DNA, 644 bp, Homo sapiens
cagagaatttgctcctgcttctatacaatatctagagatgggagttagaatagagatgtaaacaataccattaataactagaaagcatatatacctcccttcccctcttgtcaaagcccacagctcaaacatctctagaattccaaaagactctggatgacaaaagattttaaygcacactcaaaaaaaaattaaataaataaataaatatttaaaaaaacttttcatatatagggtttagtaaattcctatagaaattggtacaaccagtaaagaaactggaggtgacccttcctaggtaatcatttttgtcctgccatcatggactttcccctgttggcctaggtcttgagatgataatgatataatataatcatgaatacttagaagcataaagatcctctgaaaagtcgtaataaaaattaggccgggctcagtggctcacacctgtaatctcagttctttgggaggtcaaggtgggcagatcacttgatgtcagggatttgagaccagtctggacaacatggtgcaaccaatctctactaaaaaaaataagccaggagtggtggtacccgcctgtaatcccaactacttgggaggctgaggcaggacaatcgcttgaacctgagaggtggaggttgtgg

SEQ ID NO: 701901 - DNA, 1032 bp, Homo sapiens
tgcttcctcacatttgtgtaagaatgctctaacattaaaatgcttagatattcatctttcaatttccatatttcttttgaggaacaccaatgccatcatcatattgcctctgtaatcacttttgttattggtacaagtgttgacatagaactttttccttaacaatctgaagatagttgaaataaaaaagagataatttttaaaaagtccttaaggtaggaaatatcaaaagcaaaataaattcagtgtttacaagataaaccttatctttccagcctattttatctcctagtctacacatattctctttgaatgcattgcttatgagttttgtctagagagcaaccatcctggtaaacttcatactcaagagagtaggcagaggtcttcccttccagtccagatttttcactcctagtctcacaaacttttattactcaaattgtcaatacgagccagaacttggatgagtaataacacacagtccatattactccaaatgattcttttaaaagaaaccacaactagtcatcaaaatgtaattatttaaaattttctacatcagtatttacctcaccttttktttttgtttgtttttacccactaaataaataataaaaaaaagcaaggaaaaatggaaaggcagaccatggataattcataaaatttatttacacacctaaattgaagccaaccaagctcttaattatttaatttgaattaaatgatgattattcttattaagtaataataatttgattactggtgtgggaacactaactcattctagaaattacgagacctaggttagaatttgtccatgctaatgttactactgttttctcacatgtaaaatgccataacagcagcttggttaatttcccaaggcagttttttttttgtctttgtttttgacaacataaggtcctgactacatgggccaaggactacctgtgtcttgttcactgatttatccctagccccatctccttgcttggcatatgggagagatatgtgcttcataaatactta

SEQ ID NO: 701902 - DNA, 1526 bp, Homo sapiens
tgaagaatcaactggtgaattttatcaatggaaagtgaattggaaacagatatgtttgtataattcaggagaagacaaactacagtccagggactatatctagcctgctacttatttttgtatgaaccgcaagctaaaaacatatatcgttctacttcctgactttgtgtcactgccattcatgtttcacgtcattatatttttgaatgatttaaaaaaacaaaagaaggatgctaattcatatgtgaaaatgatatgaaattcaaattttagtgtttacaaataaagttttattcaaacacacccatgcttgttagtttacctatttttctttttggctgcctttgtggcacatggcaggttgattagttatggcagagactgaattgaccttctgaatctaaaatatttactatttggcctttgccaggaaaagtttgtgaacttttactgtaacccactaaacataagctctttaaggttggtttaaataattctggatcaatgaatgaatctgtacttaagcataaacatcaaaaggtaatcattgatgacaactggggaatggatgaagtgttaatagaaaagggagtttattattcactgttcacattttgagatgtttagtcatgcctgccaagaactaattcagttcttctcccaataagcttgtgaaaagcataccacagtaactatatttttaatcattcaagggaacaatttgagttaagtcttttgggataggatctggtgtagaggaccaggagttacaggtacctttgtatttggcaatttgttcagcacttggctcaacaacttcattgttgatacaaactcctgggtattgagcctgaactttggagagaatttgaagatcaatttcacctagaagataaacatatgggacaggtcacatcattccagcaagaaatgattaaaaacaattttagctgatttattatctgccctacctttactaggaaagcctaacataaataaagaataatgttcaactgctgccctgccatgatgcagggcagctaggttctaagtaggcatagtaatgtgactcaaggagggctgtgagtgccatccattcgtttacatgatctttaacatctatcactatatttcatcaaatcaaagatgctgttgattgtagaaggaaattaacccttatttttgtttcaccaagttagaaaaaagccactgtcaattawaattttaagattttatcaactggagagcataacaatatcagaggtattaaaatacgaaaaaaaaatgcacctcagaactggcagagtaggctaggccagaagagtacaaaaaaaatgtcagattaaataaagggtacaagcatatgtcaggtaaaataaagaagaaaaacatgtcagatatctgccctcataaacactattacctgttcacagacacagaaatagccctggctcagttgaatcaaggtaggaagagggaagagaacatatggggagaggacgagagatgatgccagagtgatgatg

SEQ ID NO: 701903 - DNA, 1642 bp, Homo sapiens
ggaattgaatttgtttggggaattcgttttgtttaatttgttttaaaatactaactgcaatccagtattgaaaggagatatagctcaaacttcttaatagccatatccagggagacttccatagtgaaaatgtgagccgaaagtagatattgatgatattcaagaaaataatttcagtaaatttggaatgagccaaaattatgtatgaaaactcaacttgaaattagaattcaaagcaagatccccatgaatagaggatgttgcagcttgctgctaggtggcagacagagggaagaataaatgagctccagcttttgagaaatttaattaaaaattatatcaaatctgggattctcctgaaagaatttgtacttactttaataaaggttgtttctcatggagaagcaattttaattttagaccagggttgcaattctgtgctaaaaatggcctttctatgagatcttgttcatttttgcaaacacaatatatcctccctaccctcaggaccttcctttagcacccagacggaagagcatttgccaaaataatgataggaatgctctgaagacaacagctcttctctaaactttattactataagtacatacgacaaaaatccagaccacaggcaatactgaggtaagaggtaaatcacatctgctgctcaggtaaaaaattttcatttcaaatttttaaattccaagagagaaccagagaagatcagtgactttcaggggttaagggctgtgggagggtgagctacaaaggaacagcaagagggagtttgtatggagagacagcaccattctgcattctgaaaataatggtggtgagggactaattggctaagttggctggacttcctgggtcaatagggacttccctaaggggacttgcccctaagccaaaatgagtcatagctgcaagctaaggtattgaaacttcaaccaatcatatagggagtttaagctctagctgcagcctgatgtttttaactaatcaggcccgccaatccacaagtggataaaaaataagctaattctacaggactaaaaaaggaaaaaaggagggatcataaggagatataagcayaagacacccaagccagaaacggcaagccctccaggtccgcttccaccacgtggaagctttactttccctttcactttaataaatcttgccgccgcacactctttggatccacgtgtttctctcatcgagctgtaacactcgccgctgcagtccgtggcttcatttcttgaagcccctgagaccacgaaacattggatcaagaaaagactttcgattgggagaagacttctcatctcagtggcatttgtcaaaactcctagaactgtacactaaaaagaatggattttactgtatgtaaatttttaaaaataaaaaaatggaacattgtcaacttggaaactttgaacaagtgtgtcagtttcgctttagattagacatgcttatcagtagacttgacgtttaacctgtcccctccacctccctaattccttcttcccacctctcctcagtttcccacttccttaaattttgctgggatttcctgacttctcttcctttgcacacacaccaaacaaacaaacaaaacaaacagaaaaacaccaacttt

SEQ ID NO: 701904 - DNA, 1642 bp, Homo sapiens
ggaattgaatttgtttggggaattcgttttgtttaatttgttttaaaatactaactgcaatccagtattgaaaggagatatagctcaaacttcttaatagccatatccagggagacttccatagtgaaaatgtgagccgaaagtagatattgatgatattcaagaaaataatttcagtaaatttggaatgagccaaaattatgtatgaaaactcaacttgaaattagaattcaaagcaagatccccatgaatagaggatgttgcagcttgctgctaggtggcagacagagggaagaataaatgagctccagcttttgagaaatttaattaaaaattatatcaaatctgggattctcctgaaagaatttgtacttactttaataaaggttgtttctcatggagaagcaattttaattttagaccagggttgcaattctgtgctaaaaatggcctttctatgagatcttgttcatttttgcaaacacaatatatcctccctaccctcaggaccttcctttagcacccagacggaagagcatttgccaaaataatgataggaatgctctgaagacaacagctcttctctaaactttattactataagtacatacgacaaaaatccagaccacaggcaatactgaggtaagaggtaaatcacatctgctgctcaggtaaaaaattttcatttcaaatttttaaattccaagagagaaccagagaagatcagtgactttcaggggttaagggctgtgggagggtgagctacaaaggaacagcaagagggagtttgtatggagagacagcaccattctgcattctgaaaataatggtggtgagggactaattggctaagttggctggacttcctgggtcaatagggacttccctaaggggacttgcccctaagccaaaatgagtcatagctgcaagctaaggtattgaaacttcaaccaatcatatagggagtttaagctctagctgcagcctgatgtttttaactaatcaggcccgccaatccacaagtggataaaaaataagctaattctacaggactaaaaaaggaaaaaaggagggatcataaggagatataagcataagacacccaagccagaaacggcaagccytccaggtccgcttccaccacgtggaagctttactttccctttcactttaataaatcttgccgccgcacactctttggatccacgtgtttctctcatcgagctgtaacactcgccgctgcagtccgtggcttcatttcttgaagcccctgagaccacgaaacattggatcaagaaaagactttcgattgggagaagacttctcatctcagtggcatttgtcaaaactcctagaactgtacactaaaaagaatggattttactgtatgtaaatttttaaaaataaaaaaatggaacattgtcaacttggaaactttgaacaagtgtgtcagtttcgctttagattagacatgcttatcagtagacttgacgtttaacctgtcccctccacctccctaattccttcttcccacctctcctcagtttcccacttccttaaattttgctgggatttcctgacttctcttcctttgcacacacaccaaacaaacaaacaaaacaaacagaaaaacaccaacttt

SEQ ID NO: 701905 - DNA, 1642 bp, Homo sapiens
ggaattgaatttgtttggggaattcgttttgtttaatttgttttaaaatactaactgcaatccagtattgaaaggagatatagctcaaacttcttaatagccatatccagggagacttccatagtgaaaatgtgagccgaaagtagatattgatgatattcaagaaaataatttcagtaaatttggaatgagccaaaattatgtatgaaaactcaacttgaaattagaattcaaagcaagatccccatgaatagaggatgttgcagcttgctgctaggtggcagacagagggaagaataaatgagctccagcttttgagaaatttaattaaaaattatatcaaatctgggattctcctgaaagaatttgtacttactttaataaaggttgtttctcatggagaagcaattttaattttagaccagggttgcaattctgtgctaaaaatggcctttctatgagatcttgttcatttttgcaaacacaatatatcctccctaccctcaggaccttcctttagcacccagacggaagagcatttgccaaaataatgataggaatgctctgaagacaacagctcttctctaaactttattactataagtacatacgacaaaaatccagaccacaggcaatactgaggtaagaggtaaatcacatctgctgctcaggtaaaaaattttcatttcaaatttttaaattccaagagagaaccagagaagatcagtgactttcaggggttaagggctgtgggagggtgagctacaaaggaacagcaagagggagtttgtatggagagacagcaccattctgcattctgaaaataatggtggtgagggactaattggctaagttggctggacttcctgggtcaatagggacttccctaaggggacttgcccctaagccaaaatgagtcatagctgcaagctaaggtattgaaacttcaaccaatcatatagggagtttaagctctagctgcagcctgatgtttttaactaatcaggcccgccaatccacaagtggataaaaaataagctaattctacaggactaaaaaaggaaaaaaggagggatcataaggagatataagcataagacacccaagccagaaacggcaagccctccaggtccgcttccaccacgtggaagctttactttccctttcactttaataaatcttgcygccgcacactctttggatccacgtgtttctctcatcgagctgtaacactcgccgctgcagtccgtggcttcatttcttgaagcccctgagaccacgaaacattggatcaagaaaagactttcgattgggagaagacttctcatctcagtggcatttgtcaaaactcctagaactgtacactaaaaagaatggattttactgtatgtaaatttttaaaaataaaaaaatggaacattgtcaacttggaaactttgaacaagtgtgtcagtttcgctttagattagacatgcttatcagtagacttgacgtttaacctgtcccctccacctccctaattccttcttcccacctctcctcagtttcccacttccttaaattttgctgggatttcctgacttctcttcctttgcacacacaccaaacaaacaaacaaaacaaacagaaaaacaccaacttt

SEQ ID NO: 701906 - DNA, 1642 bp, Homo sapiens
ggaattgaatttgtttggggaattcgttttgtttaatttgttttaaaatactaactgcaatccagtattgaaaggagatatagctcaaacttcttaatagccatatccagggagacttccatagtgaaaatgtgagccgaaagtagatattgatgatattcaagaaaataatttcagtaaatttggaatgagccaaaattatgtatgaaaactcaacttgaaattagaattcaaagcaagatccccatgaatagaggatgttgcagcttgctgctaggtggcagacagagggaagaataaatgagctccagcttttgagaaatttaattaaaaattatatcaaatctgggattctcctgaaagaatttgtacttactttaataaaggttgtttctcatggagaagcaattttaattttagaccagggttgcaattctgtgctaaaaatggcctttctatgagatcttgttcatttttgcaaacacaatatatcctccctaccctcaggaccttcctttagcacccagacggaagagcatttgccaaaataatgataggaatgctctgaagacaacagctcttctctaaactttattactataagtacatacgacaaaaatccagaccacaggcaatactgaggtaagaggtaaatcacatctgctgctcaggtaaaaaattttcatttcaaatttttaaattccaagagagaaccagagaagatcagtgactttcaggggttaagggctgtgggagggtgagctacaaaggaacagcaagagggagtttgtatggagagacagcaccattctgcattctgaaaataatggtggtgagggactaattggctaagttggctggacttcctgggtcaatagggacttccctaaggggacttgcccctaagccaaaatgagtcatagctgcaagctaaggtattgaaacttcaaccaatcatatagggagtttaagctctagctgcagcctgatgtttttaactaatcaggcccgccaatccacaagtggataaaaaataagctaattctacaggactaaaaaaggaaaaaaggagggatcataaggagatataagcataagacacccaagccagaaacggcaagccctccaggtccgcttccaccacgtggaagctttactttccctttcactttaataaatcttgccgccgcacactctttgsatccacgtgtttctctcatcgagctgtaacactcgccgctgcagtccgtggcttcatttcttgaagcccctgagaccacgaaacattggatcaagaaaagactttcgattgggagaagacttctcatctcagtggcatttgtcaaaactcctagaactgtacactaaaaagaatggattttactgtatgtaaatttttaaaaataaaaaaatggaacattgtcaacttggaaactttgaacaagtgtgtcagtttcgctttagattagacatgcttatcagtagacttgacgtttaacctgtcccctccacctccctaattccttcttcccacctctcctcagtttcccacttccttaaattttgctgggatttcctgacttctcttcctttgcacacacaccaaacaaacaaacaaaacaaacagaaaaacaccaacttt

SEQ ID NO: 701907 - DNA, 1642 bp, Homo sapiens
ggaattgaatttgtttggggaattcgttttgtttaatttgttttaaaatactaactgcaatccagtattgaaaggagatatagctcaaacttcttaatagccatatccagggagacttccatagtgaaaatgtgagccgaaagtagatattgatgatattcaagaaaataatttcagtaaatttggaatgagccaaaattatgtatgaaaactcaacttgaaattagaattcaaagcaagatccccatgaatagaggatgttgcagcttgctgctaggtggcagacagagggaagaataaatgagctccagcttttgagaaatttaattaaaaattatatcaaatctgggattctcctgaaagaatttgtacttactttaataaaggttgtttctcatggagaagcaattttaattttagaccagggttgcaattctgtgctaaaaatggcctttctatgagatcttgttcatttttgcaaacacaatatatcctccctaccctcaggaccttcctttagcacccagacggaagagcatttgccaaaataatgataggaatgctctgaagacaacagctcttctctaaactttattactataagtacatacgacaaaaatccagaccacaggcaatactgaggtaagaggtaaatcacatctgctgctcaggtaaaaaattttcatttcaaatttttaaattccaagagagaaccagagaagatcagtgactttcaggggttaagggctgtgggagggtgagctacaaaggaacagcaagagggagtttgtatggagagacagcaccattctgcattctgaaaataatggtggtgagggactaattggctaagttggctggacttcctgggtcaatagggacttccctaaggggacttgcccctaagccaaaatgagtcatagctgcaagctaaggtattgaaacttcaaccaatcatatagggagtttaagctctagctgcagcctgatgtttttaactaatcaggcccgccaatccacaagtggataaaaaataagctaattctacaggactaaaaaaggaaaaaaggagggatcataaggagatataagcataagacacccaagccagaaacggcaagccctccaggtccgcttccaccacgtggaagctttactttccctttcactttaataaatcttgccgccgcacactctttggatccacgtgtttctctcatcgagctgtaacactmgccgctgcagtccgtggcttcatttcttgaagcccctgagaccacgaaacattggatcaagaaaagactttcgattgggagaagacttctcatctcagtggcatttgtcaaaactcctagaactgtacactaaaaagaatggattttactgtatgtaaatttttaaaaataaaaaaatggaacattgtcaacttggaaactttgaacaagtgtgtcagtttcgctttagattagacatgcttatcagtagacttgacgtttaacctgtcccctccacctccctaattccttcttcccacctctcctcagtttcccacttccttaaattttgctgggatttcctgacttctcttcctttgcacacacaccaaacaaacaaacaaaacaaacagaaaaacaccaacttt

SEQ ID NO: 701908 - DNA, 1642 bp, Homo sapiens
ggaattgaatttgtttggggaattcgttttgtttaatttgttttaaaatactaactgcaatccagtattgaaaggagatatagctcaaacttcttaatagccatatccagggagacttccatagtgaaaatgtgagccgaaagtagatattgatgatattcaagaaaataatttcagtaaatttggaatgagccaaaattatgtatgaaaactcaacttgaaattagaattcaaagcaagatccccatgaatagaggatgttgcagcttgctgctaggtggcagacagagggaagaataaatgagctccagcttttgagaaatttaattaaaaattatatcaaatctgggattctcctgaaagaatttgtacttactttaataaaggttgtttctcatggagaagcaattttaattttagaccagggttgcaattctgtgctaaaaatggcctttctatgagatcttgttcatttttgcaaacacaatatatcctccctaccctcaggaccttcctttagcacccagacggaagagcatttgccaaaataatgataggaatgctctgaagacaacagctcttctctaaactttattactataagtacatacgacaaaaatccagaccacaggcaatactgaggtaagaggtaaatcacatctgctgctcaggtaaaaaattttcatttcaaatttttaaattccaagagagaaccagagaagatcagtgactttcaggggttaagggctgtgggagggtgagctacaaaggaacagcaagagggagtttgtatggagagacagcaccattctgcattctgaaaataatggtggtgagggactaattggctaagttggctggacttcctgggtcaatagggacttccctaaggggacttgcccctaagccaaaatgagtcatagctgcaagctaaggtattgaaacttcaaccaatcatatagggagtttaagctctagctgcagcctgatgtttttaactaatcaggcccgccaatccacaagtggataaaaaataagctaattctacaggactaaaaaaggaaaaaaggagggatcataaggagatataagcataagacacccaagccagaaacggcaagccctccaggtccgcttccaccacgtggaagctttactttccctttcactttaataaatcttgccgccgcacactctttggatccacgtgtttctctcatcgagctgtaacactcgccgctgcagtccrtggcttcatttcttgaagcccctgagaccacgaaacattggatcaagaaaagactttcgattgggagaagacttctcatctcagtggcatttgtcaaaactcctagaactgtacactaaaaagaatggattttactgtatgtaaatttttaaaaataaaaaaatggaacattgtcaacttggaaactttgaacaagtgtgtcagtttcgctttagattagacatgcttatcagtagacttgacgtttaacctgtcccctccacctccctaattccttcttcccacctctcctcagtttcccacttccttaaattttgctgggatttcctgacttctcttcctttgcacacacaccaaacaaacaaacaaaacaaacagaaaaacaccaacttt

SEQ ID NO: 701909 - DNA, 994 bp, Homo sapiens
tttacgattcatgtgcgtttctgtatatctgttatatttcaatagaaatgtttacttgaaaaacgttgtcctgggagaaagcccagaggaagaccctacttttagatgctggagaccagggtagggtgaggtaaagtggggtggaaatagagcacagcctcaaagtgaggacccatgccaagccacccacagctcctcatctggattggcatcattctggcacagaataaggaacyatgaaataacacgtaagagctggcgctggaacagcggcttaggaaaatgggtggaggcaaccacaaaactataaactgtgcattcaggaagagaagaaaaaaagacaaaaacaaaacaaatcaaagggggaaaactgccactagaaatggatctgcaaatcaaaattccaaaacacattttaacaatgaaaaagtctaatgctaagaaagacagtaaaatcaataaacaacattaattcattccagttgacatcagttttatagagcagaagtcataaaaatctaccaattttatagactagtactaaaatctatcagtttcatagaggataggttttgaagtatatatacatttacatttctcaaagaaatcataaaaacatattaaaaataagcaataaatattagatgaaaataggaatggaacaagaagaagtgggaataaaaaagattaggaaggccaggcgcggtggctcacacctgtaatcccagcactttgggaggccaaggcaggcagatcacctgaggttgggagttcgagaccagcctgaccaatatggagaaaccctgtctctactaaaaatacaaaattagccaggcatggtggcacatgcctgtaatcccagctactcaggaggctgaggcaggagaagcacttgaacctgggaggtggaggttgcagtgagccgagatcatgccattgcactctagcctgggcaacaagagtgaactctgtctcaaaaaaaaaaaaaaaaaaa

SEQ ID NO: 701910 - DNA, 840 bp, Homo sapiens
ttatttgtaaagtaacattggaattaacaaagctgtagaatattagaaggaggatagatctgataggaaatttagtcaagtcctaaaataatgccaacaatctcagtagttataattgctaatatttattagcagttataattgctaatagttattcactaatattawttattgtgtgcttattatatgtctttcacttactttgtaggtattgtctcatttatggtcatagtgagtctatgagctaggcactatgttcattcttattttacagacaagaaaattaaggcactgaaagattatgtaagtctcttaagaatcaaaatcttagagaatgtccttcaaaacatcatgacgtctcctttcccaaattctgaaccagctgagaaagaaactgagatagtcatctaaggggcaaatcaaaatatcactttatgagcaacatattagaatgtggcttatttctgtgggcaactggacctccaaagaatgaaccttaggaatggatctgctttcctggggaggcctatctaaatggggctgtgaacttgcaagaagaaggacatggcggagctgaagctgacaagctctctttttggtgggcccattcctgagtgataaaaagggtgggcattggtccttgagtgatcactttctcctactaaattcactagccagatatgccattcaccctcagggttaagtgaggtgatggacagaggcctggaggatgaagccaatgaaatatctccatgtagaagggaacagcaagagtatagaacaaatgttttcctcaacaagctgcttagtggtgaagcagatccactaacagatgtacac

SEQ ID NO: 701911 - DNA, 840 bp, Homo sapiens
ttatttgtaaagtaacattggaattaacaaagctgtagaatattagaaggaggatagatctgataggaaatttagtcaagtcctaaaataatgccaacaatctcagtagttataattgctaatatttattagcagttataattgctaatagttattcactaatattatttattgtgtgcttattatatgtctttcacttactttgtaggtattgtctcatttatggtcatagtgagtctatgagctaggcactatgttcattcttattttacagacaagaaaattaaggcactgaaagattatgtaagtctcttaagaatcaaaatcttagagaatgtccttcaaaacatcatgaygtctcctttcccaaattctgaaccagctgagaaagaaactgagatagtcatctaaggggcaaatcaaaatatcactttatgagcaacatattagaatgtggcttatttctgtgggcaactggacctccaaagaatgaaccttaggaatggatctgctttcctggggaggcctatctaaatggggctgtgaacttgcaagaagaaggacatggcggagctgaagctgacaagctctctttttggtgggcccattcctgagtgataaaaagggtgggcattggtccttgagtgatcactttctcctactaaattcactagccagatatgccattcaccctcagggttaagtgaggtgatggacagaggcctggaggatgaagccaatgaaatatctccatgtagaagggaacagcaagagtatagaacaaatgttttcctcaacaagctgcttagtggtgaagcagatccactaacagatgtacac

SEQ ID NO: 701912 - DNA, 840 bp, Homo sapiens
ttatttgtaaagtaacattggaattaacaaagctgtagaatattagaaggaggatagatctgataggaaatttagtcaagtcctaaaataatgccaacaatctcagtagttataattgctaatatttattagcagttataattgctaatagttattcactaatattatttattgtgtgcttattatatgtctttcacttactttgtaggtattgtctcatttatggtcatagtgagtctatgagctaggcactatgttcattcttattttacagacaagaaaattaaggcactgaaagattatgtaagtctcttaagaatcaaaatcttagagaatgtccttcaaaacatcatgacgtctcctttcccaaattctgaaccagctgagaaagaaactgagatagtcatctaaggggcaaatcaaaatatcactttatgagcaacatattagaatgtggcttatttctgtgggcaactggacctccaaagaatgaacyttaggaatggatctgctttcctggggaggcctatctaaatggggctgtgaacttgcaagaagaaggacatggcggagctgaagctgacaagctctctttttggtgggcccattcctgagtgataaaaagggtgggcattggtccttgagtgatcactttctcctactaaattcactagccagatatgccattcaccctcagggttaagtgaggtgatggacagaggcctggaggatgaagccaatgaaatatctccatgtagaagggaacagcaagagtatagaacaaatgttttcctcaacaagctgcttagtggtgaagcagatccactaacagatgtacac

SEQ ID NO: 701913 - DNA, 1174 bp, Homo sapiens
gttttcatgatagtgaataagtctcatgagatctgatggttttaaaaacaggaatttccctgcacaagctctctcttccctgctgtcatccacgtaagatgtgacttgctcctccttgccttctgccatgactgtaaggcccccccccccaccatgtggaactgtaagtccaataaaacctctttttcttcccagtgtcaggtatgtctttatcagcagcatgaaaacagactaatatgagttctatcattattctcatttatagatgaggaaagtgagacaaggaccacttgagtcacttctccagtgtcttgtagctattaagtgatagacctagatatgcaactagattgcggtagaactagatcttcatgtctgggtagtcttgctgctgagaacatactcataatcaccacacacctgcacctcagttaccaactctgtgacttcyacattttataggacctagtaaaagcctcagttcctcatgagtaattttacatattggtggaaggaatagagataatgaatgtacttacgatgcattatacatactaggaattccatcaatgctagttaatacactagcccaagaagattattggctgtggatcctagtatatctcaggaagctcatagggataaactggggcaacaaggaccagaactatcaatgactttgagatctttgtgttaataagcacagatctttcatacaagggttgtatgttagactgcctcaattttgagatagtgaataaaatctggggatgcaagaaacagcaaactaactcaagttggtttaagcctaaagagaaatttgttcattctcataaaagaattgtgcacgatagagctagtgttcaaataaccatttcagaaatatgtctttttctctcagttttactttcctatatgttgacatatttatttagggtggcaaaggtgggctccataggacatctctccacatttatacctgcatcactttctgaaacttccatcaaaaggcctgtggaatctctcattgatctggtttaagtcacttgtccatccctgagacaatgactatggccatggggatacagtgttctgattgactacacataaccttcccagctcaccctcagttctgcagaggaatatcagggtgctattaccaaaataaagagga

SEQ ID NO: 701914 - DNA, 1174 bp, Homo sapiens
gttttcatgatagtgaataagtctcatgagatctgatggttttaaaaacaggaatttccctgcacaagctctctcttccctgctgtcatccacgtaagatgtgacttgctcctccttgccttctgccatgactgtaaggcccccccccccaccatgtggaactgtaagtccaataaaacctctttttcttcccagtgtcaggtatgtctttatcagcagcatgaaaacagactaatatgagttctatcattattctcatttatagatgaggaaagtgagacaaggaccacttgagtcacttctccagtgtcttgtagctattaagtgatagacctagatatgcaactagattgcggtagaactagatcttcatgtctgggtagtcttgctgctgagaacatactcataatcaccacacacctgcacctcagttaccaactctgtgacttccacattttataggacctagtaaaagcctcagttcctcatgagtaattttacatattggtggaaggaatagagataatgaatgtacttacgatgcattatacatactaggaattcmatcaatgctagttaatacactagcccaagaagattattggctgtggatcctagtatatctcaggaagctcatagggataaactggggcaacaaggaccagaactatcaatgactttgagatctttgtgttaataagcacagatctttcatacaagggttgtatgttagactgcctcaattttgagatagtgaataaaatctggggatgcaagaaacagcaaactaactcaagttggtttaagcctaaagagaaatttgttcattctcataaaagaattgtgcacgatagagctagtgttcaaataaccatttcagaaatatgtctttttctctcagttttactttcctatatgttgacatatttatttagggtggcaaaggtgggctccataggacatctctccacatttatacctgcatcactttctgaaacttccatcaaaaggcctgtggaatctctcattgatctggtttaagtcacttgtccatccctgagacaatgactatggccatggggatacagtgttctgattgactacacataaccttcccagctcaccctcagttctgcagaggaatatcagggtgctattaccaaaataaagagga

SEQ ID NO: 701915 - DNA, 641 bp, Homo sapiens
ttttggatgtaaattgtttgtgtggcctccaagcctgtttcctctgcccttccaaaaagtcagtgagctatctaataagctgcaataagacctttcactgctttaatttgctacactgtattctaattttctttctttctttcttttgcttagctttttgcatttgctgatggtgtgctatctgcctgggcattttttcacagctcttcttcagacagtctctcacttcaaaaatttttttctttaaggtgtccttctcyaacacttaagaatactaaccatccttcttgttctgttcaaatttgtggttttctcagaggatcctttttatttttcctataacaccaaaaactataatattttatttattggtttattttccctttccgtcactagaatataaaccgcataatagcagagatcattcatattttggtcacagttttatctccaggtctcatcaaaatatacattgcatggtagaaactccatgcacatttttgaatgaatgagttaataaatagatgaatggggttgcgttaggcaattgagaaatgtgatgaagatttgaaactgttagaggaaaggcagaagaaaaatgggcaaggattttcaagcaatgtttaagttccaagtaagac

SEQ ID NO: 701916 - DNA, 597 bp, Homo sapiens
taacatacaatggggctttaaatacagtttatgaaagaaactgtcagcggggaggaaagcaaagccagtgaaagctactgaatccctggcatgtaccagctcttgtgttaaggatttcaaacaagttatctcttttaattctcatcacaaccatatacgagcaggttattgtttcaattttccaagtaagataaytaatttttttttttttttgagacaaagagtttctcttttttgcccaggctggagtgcagtggcatgatctcagcggtttcaagcaattctcccacctcagcctcctgagtacctgggattacaagcacccgccaccacgccctgctaatttttgtatttttagtagagacaaggtttcaccatattggccaggctggcctcaaactcctgaccttgcgatctacccgtctcagcctcccaaattgctgggattacaggcgtgagccaccgcgcctggccaattgaatttttaatacgctgaataacgtacccaactttacacagctatgttaaatggtagaatgataatatgaaccctttcagttaggtttatttgttttgttttgtttcatttttctgttc

SEQ ID NO: 701917 - DNA, 597 bp, Homo sapiens
taacatacaatggggctttaaatacagtttatgaaagaaactgtcagcggggaggaaagcaaagccagtgaaagctactgaatccctggcatgtaccagctcttgtgttaaggatttcaaacaagttatctcttttaattctcatcacaaccatatacgagcaggttattgtttcaattttccaagtaagataactaatttttttttttttttkagacaaagagtttctcttttttgcccaggctggagtgcagtggcatgatctcagcggtttcaagcaattctcccacctcagcctcctgagtacctgggattacaagcacccgccaccacgccctgctaatttttgtatttttagtagagacaaggtttcaccatattggccaggctggcctcaaactcctgaccttgcgatctacccgtctcagcctcccaaattgctgggattacaggcgtgagccaccgcgcctggccaattgaatttttaatacgctgaataacgtacccaactttacacagctatgttaaatggtagaatgataatatgaaccctttcagttaggtttatttgttttgttttgtttcatttttctgttc

SEQ ID NO: 701918 - DNA, 597 bp, Homo sapiens
taacatacaatggggctttaaatacagtttatgaaagaaactgtcagcggggaggaaagcaaagccagtgaaagctactgaatccctggcatgtaccagctcttgtgttaaggatttcaaacaagttatctcttttaattctcatcacaaccatatacgagcaggttattgtttcaattttccaagtaagataactaatttttttttttttttgwgacaaagagtttctcttttttgcccaggctggagtgcagtggcatgatctcagcggtttcaagcaattctcccacctcagcctcctgagtacctgggattacaagcacccgccaccacgccctgctaatttttgtatttttagtagagacaaggtttcaccatattggccaggctggcctcaaactcctgaccttgcgatctacccgtctcagcctcccaaattgctgggattacaggcgtgagccaccgcgcctggccaattgaatttttaatacgctgaataacgtacccaactttacacagctatgttaaatggtagaatgataatatgaaccctttcagttaggtttatttgttttgttttgtttcatttttctgttc

SEQ ID NO: 701919 - DNA, 597 bp, Homo sapiens
taacatacaatggggctttaaatacagtttatgaaagaaactgtcagcggggaggaaagcaaagccagtgaaagctactgaatccctggcatgtaccagctcttgtgttaaggatttcaaacaagttatctcttttaattctcatcacaaccatatacgagcaggttattgtttcaattttccaagtaagataactaatttttttttttttttgagasaaagagtttctcttttttgcccaggctggagtgcagtggcatgatctcagcggtttcaagcaattctcccacctcagcctcctgagtacctgggattacaagcacccgccaccacgccctgctaatttttgtatttttagtagagacaaggtttcaccatattggccaggctggcctcaaactcctgaccttgcgatctacccgtctcagcctcccaaattgctgggattacaggcgtgagccaccgcgcctggccaattgaatttttaatacgctgaataacgtacccaactttacacagctatgttaaatggtagaatgataatatgaaccctttcagttaggtttatttgttttgttttgtttcatttttctgttc

SEQ ID NO: 701920 - DNA, 597 bp, Homo sapiens
taacatacaatggggctttaaatacagtttatgaaagaaactgtcagcggggaggaaagcaaagccagtgaaagctactgaatccctggcatgtaccagctcttgtgttaaggatttcaaacaagttatctcttttaattctcatcacaaccatatacgagcaggttattgtttcaattttccaagtaagataactaatttttttttttttttgagacamagagtttctcttttttgcccaggctggagtgcagtggcatgatctcagcggtttcaagcaattctcccacctcagcctcctgagtacctgggattacaagcacccgccaccacgccctgctaatttttgtatttttagtagagacaaggtttcaccatattggccaggctggcctcaaactcctgaccttgcgatctacccgtctcagcctcccaaattgctgggattacaggcgtgagccaccgcgcctggccaattgaatttttaatacgctgaataacgtacccaactttacacagctatgttaaatggtagaatgataatatgaaccctttcagttaggtttatttgttttgttttgtttcatttttctgttc

SEQ ID NO: 701921 - DNA, 3490 bp, Homo sapiens
tgtcacttctgtgctatgggccacttttctgccttagcatttaactgctgatatgagaccctccagtgctcaaaagagttgaagtacatatgtagttgcaagacattagagtctccataatcctggattcctgagtgattctgtggagcagagctccctctcctccacatgaacatgtagcacgagtaggaaataaacctcgatgttttaagccactgagatttgggttttgatatgttatcatagcaaacctaactcatcctgactaatacacaggatcagaactctagtaagtgatgcagtagatatttaaacccagacaatccggctctccagcctgtgccttaaatcactgtcctttaagtgattagtgaatgtgaattgaataaatgaatgaatcaatgttgaggcctttgttatccactcatacctagcaatcaagatccagttttcgtgagggttgaatactttcctttttattttattttttttttwaaagaataccatctcctttttatcttgcattggacaatcttgatgtttatagtgagatgaatatatctaattaccacaatattcaacttgagcaagtcttttgaaggtattttgctaaattagaactttcagatctcattaaaattgaaacatttggtcggcttgatttagtcaattttgactctgtgtatttaagatgacagtactagcaatcaaatgaaactttaattacaattggaattttcaataactaataaaaggcaccgtcaatttgacagtaaaagacagttctccacagaagatacccacaggtgcttttgaatttatttttttaaattgtaaataataaaaaagaacattttgcaacatgcacaaaatcaaaatgtagggaaaaattgatttgcatttcaaccatgtattagaattattttcatttttacattatctttatagtttttaagtcatggtaatcacagaatgtcttctttaactttttacttaatattatatcgcatatatttttcaaaatttcctaaagcaaagtttatagtgatgtagtcaaagcatcataatttatcagcctcctattattgtgcatctgtgtaagacaccccatcttttttatttgttaaaaacaaactgatttaataggctcaccgtatagcttgttaaagagaacttgtgactttactgtgtgacataaaggaagagtcttgtttatttatgtgtttattattatcttgcagtttataggacaggtaaagacacctaaccagatcctgctgtcatctacattgacaagccatggaaggaaatagagtgccagcagcagacccagttttcctgacatctgactgtacagtgtactcatgtcttaagggtgactgcatggattatgtctaagcgtgcattagtttgctcagctgccataacaaaataccacatactgggtggcttaaacaacagaaatttattttctcacagttctggaggctagaagtataggctcaaggtgccagcatggtcaagttctagtgagggctgtcttcctggcttgccgatggctgccttctggctgtgtgttcacaagagggggccatttctggggcgggatacaagaggaagagagacagatctctcttccttatcttataaggccatcgtcctttcaacttagggccccatgcttgtgacctcatttaactttatttccctcctaaaggccttatcccagaaacagtcacatcgtgagttagggcttttacatactcattttgatgggctacaattcagtctataacaaagtgtcactaaggtaccacagtctaatggccaaagagaatgggacatgattaaactttaacaggcttctaaacttcaatagtttgttttcctgaaggacctcccacattttcccctttctgatgacagttacatctggttatgaagtttccctctgggccttagtaccaaggagctctgatccccagccccatcccagtaactaacgtggtccttattagtggaattgttgccgtctaccctgttttcatttgtccctttttgttagcccaaccccccgacccccaggtaaagtagaactaaacaagtagacaatgattccagtagtgcttttggtttccttttcacatactatagagtttctgattgtttgtttgttttgttttatttttgagatggggtctccctctgtcaccccggctggagtgcagtggcgtgatcttggctcactgcaacctctgcctcccgggctcaagcgatcctcctgcctcccgcctcagcctcctgagtagctgggatcacaggcatgtgctaccacacctggataatttttgtacttgtggtagagacagggtctcaccatgttacccaggctggttttgaactcctgagctcaagcaatctgcctgcctcggtctcccaagatgctgggattacaggtgtgagccacagtgcctggccttacataccaccagtttatggtggtaccgtatgtatttttcactgaaacatactgtactcaacagagaaacagaggctgaacaatgtttgttcccaataggggcttaatagtttccccatataataatatattactctgtatgtgaggattttctcttttctaacatttaaattaccttaagtactgattaagttttatcaaacttcaaacattcatatttcttgagtgagagaccaatataaaaataattaattcaccaaaagagaatgtggaactaagttaaattgtaaggtcctgaaaatgctggattataataaaaatatctccttaaccatgactgcagtggttaaaatttaatgagacattaacagtgaagtatggttcttcagtctctgcttttgctttgtgaaagttcagcaaagatttatgctccaaacagactctgtattcacggaaatatacagcttagtttttaaatatccctagcacataaaaaggtcatttgctttgttttatgtaattcatgtatctattggtttgtaataataaccacgaccttcagaggctggacatttgctgggagctaatgatctgtcagggttagagacccaaagcttcatgctgagaccattaatcagcccaccagcccataacttctgggcaatactgtcttgcgtcagtcattgtgactcaggtcctccaggccaaagcatgaactttggaatgcttacactgttggccagcttcactgaataccacagtacactgctaatcatactcatgtaaaccagtgtcagaaacttcacactgcagaggacatatcttctatgattgccacccttccaaggtcatgagcctgtatctcaaaagatgagaacactggacagatcattattaactcccttttggaagccattggtcaagtactattaaaaatatttcaaaatattttcatacaaatgaactttattaaattaactttatttatttatttatttatttatttgagac

SEQ ID NO: 701922 - DNA, 601 bp, Homo sapiens
ggatgaattgtattcctttatatttatatactacattttacttatgtatccattgatgaacatttatattgtttctgtatctctygaggtgttaacactgaattgtcagctaatatagataaagcaatggtagctgacctccgttttgagtaaaagtagaaaatactaatgttagttgactacttttctagaaaagaagtttctaaggccaggcacggtgactcactcctgtaatcccagcactttgggagatccaggtgggcagattgcttgaggccaggagtttcagaccagcctggacaacatggcgaaaccctgtctctactaaaaatacaaaaattagttaggtgggtggcacatgcctgtaatcccagcttcttgggaggctgtcacaagaatcacttgaacctgggaggcggtggttgcagtgagctgagattgtaccagtgcactctagcctgggcaacagagcaagactctgtctcagaaaaaaaaaaaaagttttttaaaaaagtaataatcctcagtgtggctgtgtttatttataggaaatagttgagtgaatagtaaaaaaattgttccttgatagtttacaaagagg

SEQ ID NO: 701923 - DNA, 2974 bp, Homo sapiens
  misc_feature 2692: n = A,T,C or G
tcagaagcagccagggacaggtaagactgaaccaattctgcaaatgcaggagcttagagtacaaggtgactatgaggttaagaaccaccaccccacccagggaatgcactaaaatcttggggagtctattggctatctactgagatgcaatgtgggctaggcccagtcttatcataaggagcaagaaactcaacagaaatcagagttagggcagctatgattattatcacccacacagcccaatttgacagatgagaaaactagccattaaagagctaagcagataaggaggatgaagctgtgggccttcaaaagctaaaaacatgaagtgagggaggggacaaaaccatgacctggggactctgcagtattctcatcactatctctccaaattccttttcctgaaaccgagacaaaaaccctaaaaggattgtctttagctagtaaaacccattaacaggatgaaagtagcacctgcagtgtctgcatgggtcattgcttgcatagagtttcatttcagaattcaattcagtaaataattcaaatgaaatacaaggaaattcaccccttagtcctggggctttcaaaaggtgatattaattaatactgatgaaagtcagccagcaaccaactatctttctctgccatcttccaaggggactgtttttacttcttttcaaaatctgtaataaaagacttttgaagaggcctgccatgtaaaatttattcaactgagcccagccctaaatgaagatagcattggccttctctgacagaggagataactgaacaacactccatgattagaagacagagaggcgcatgttaccactttcaagagcaaagtctcagcagtcatcagagccagattaaatcctggcgctgccacttaaccaagtcatttaatctctctgtgcctcagtttctttctctgtaagaaaatgggacaaataatagttcctacctcatagacttgttatgagaattaaaagagataattcatgcaatgcattttgtagagtacttgtcaagttattagtgcaatagatcatatattcaaacataagtggttgccatggaccatgctgggagctggggcacgggcattcctggtgtaaaggaacaggtgtggggctaggagaatgcatgcctgagtttcagtcctggctcttcccttgactagttgttcagacgtagttgagtcccctcacctccttgagcttcagtttcctcacccagaaaatgggagtgacagtacatagcccaggcttatgatgaggaacaaacaaaatcatgatttttgtaaagcactctaaaagtacaaaagatattattactgacttgtggattacttgggcattttgtttctcttctttttctcatttggtctgctccttttgggcctattttcttttcttcatgttaccaaaccaggagtgactgaagggaaggagggcagattgcacatacctcagtctatttcatcagagattgttaaactgtatttttggtgagagaagaagttgaagatgtgattgattcatggcagagatcctgaagaggtggtacatgtccattgttcagggtaaattgaggttartatgaagagatcatatttgggaatgagatctgtgtttcaacttttaaaaaattattattccactccctttctatctgtgtgaccatagatgagttacttaacttctctgagtctcaatttcttcatctataacactggcataaatatacctaatatgtagagttgtcagctttaaacataaagtaggcaagatacactgtctagacatattgggtgttcacaagtggtagttattctaaattgaaatctttacatcaagtctttcaaatcctaactatggtaatgaatttttagcactactttatgaaatacaataaagtcccagccggcagactcaagtgccacttcttcattatcctccttttcccttcagacccctgcttcttgcctcaaacatcaccttataattcatcaagtcacaggatttcacatagttctttgtggtatctccggagcttcttcctttcaaactagtgtctttgtccttcacagaggcaagaatctatgggattaatcactctccagaactggtgttctatcaatagagggatactgagtgctaccatgtgcaagttagtattctgcaaagccccagggataggtaatcatgcaatgcacagtccctgagcctctagagagagaggcctgtccaatccacagtggcagtgacatagggccagggctgtgacagcacaaacccaaagctctgagagaaccaacactactgctggacagccagagatgacaatccttaggctgggcctcagagaataggcaagagtttgacaggtggtcaatggaggttaaggactccaagcagaggaaccatacgtgcaaaggcacagagacttgggaattctgagaagttggggtaggctggaagatggtagattaggaaggtggtagaagaagagattggaaaagcagtacaggaaaagttgttaaggatatgaactagaacagtggtgctgaagagggaaaaatatatataaaagacatctctgaggttgcatcatcagttcttggcaaccaaagacactggcaaaggaatgaagaggaacatctaagatgactctcaggtatgtgacttgnaggtgtgtggagtgggtggtggctccattggctgagatggggtcctcacaggaaaaacagggaggtgtgcattttgagctctatctagtatctgttgaatttcagatgcatgtaagtaccttccatgccaggtgggttcccagtcaaaatatgtccaaactgtaactctgtttgagctctgccatctgtgctggttgaagcatatatccttctccctaagtggccatgtccacttaaggcagttagatctgcgaaagtgtctggactgagcataaggcttga

SEQ ID NO: 701924 - DNA, 2974 bp, Homo sapiens
  misc_feature 2692: n = A,T,C or G
tcagaagcagccagggacaggtaagactgaaccaattctgcaaatgcaggagcttagagtacaaggtgactatgaggttaagaaccaccaccccacccagggaatgcactaaaatcttggggagtctattggctatctactgagatgcaatgtgggctaggcccagtcttatcataaggagcaagaaactcaacagaaatcagagttagggcagctatgattattatcacccacacagcccaatttgacagatgagaaaactagccattaaagagctaagcagataaggaggatgaagctgtgggccttcaaaagctaaaaacatgaagtgagggaggggacaaaaccatgacctggggactctgcagtattctcatcactatctctccaaattccttttcctgaaaccgagacaaaaaccctaaaaggattgtctttagctagtaaaacccattaacaggatgaaagtagcacctgcagtgtctgcatgggtcattgcttgcatagagtttcatttcagaattcaattcagtaaataattcaaatgaaatacaaggaaattcaccccttagtcctggggctttcaaaaggtgatattaattaatactgatgaaagtcagccagcaaccaactatctttctctgccatcttccaaggggactgtttttacttcttttcaaaatctgtaataaaagacttttgaagaggcctgccatgtaaaatttattcaactgagcccagccctaaatgaagatagcattggccttctctgacagaggagataactgaacaacactccatgattagaagacagagaggcgcatgttaccactttcaagagcaaagtctcagcagtcatcagagccagattaaatcctggcgctgccacttaaccaagtcatttaatctctctgtgcctcagtttctttctctgtaagaaaatgggacaaataatagttcctacctcatagacttgttatgagaattaaaagagataattcatgcaatgcattttgtagagtacttgtcaagttattagtgcaatagatcatatattcaaacataagtggttgccatggaccatgctgggagctggggcacgggcattcctggtgtaaaggaacaggtgtggggctaggagaatgcatgcctgagtttcagtcctggctcttcccttgactagttgttcagacgtagttgagtcccctcacctccttgagcttcagtttcctcacccagaaaatgggagtgacagtacatagcccaggcttatgatgaggaacaaacaaaatcatgatttttgtaaagcactctaaaagtacaaaagatattattactgacttgtggattacttgggcattttgtttctcttctttttctcatttggtctgctccttttgggcctattttcttttcttcatgttaccaaaccaggagtgactgaagggaaggagggcagattgcacatacctcagtctatttcatcagagattgttaaactgtatttttggtgagagaagaagttgaagatgtgattgattcatggcagagatcctgaagaggtggtacatgtccattgttcagggtaaattgaggttagtatgaagagatcatatttgggaatgagatctgtgtttcaacttttaaaaaattattattccactccctttctatctgtgtgaccatagatgagttacttaacttctctgagtctcaatttcttcatctataacactggcataaatatacctaatatgtagagttgtcagctttaaacataaagtaggcaagatacactgtctagacatattgggtgttcacaagtggtagttattctaaattgaaatctttacatcaagtctttcaaatcctaactatggtaatgaatttttagcactactttatgaaatacaataaagtcccagccggcagactcaagtgccacttcttcattatcctccttttcccttcagacccctgcttcttgcctcaaacatcaccttataattcatcaagtcacaggatttcacatagttctttgtggtatctccggagcttcttcctttcaaactagtgtctttgtccttcacagaggcaagaatctatgggattaatcactctccagaactggtgttctatcaatagagggatactgagtgctaccatgtgcaagttagtattctgcaaagccccagggataggtaatcatgcaatgcacagtccctgagcctctagagagagaggcctgtccaatccacagtggcagtgacatagggccagggctgtgacagcacaaacccaaagctctgagagaaccaacactactgctggacagccagagatgacaatccttaggctgggcctcagagaataggcaagagtttgacaggtggtcaatggaggttaaggactccaagcagaggaaccatacgtgcaaaggcacagagacttgggaattctgagaagttkgggtaggctggaagatggtagattaggaaggtggtagaagaagagattggaaaagcagtacaggaaaagttgttaaggatatgaactagaacagtggtgctgaagagggaaaaatatatataaaagacatctctgaggttgcatcatcagttcttggcaaccaaagacactggcaaaggaatgaagaggaacatctaagatgactctcaggtatgtgacttgnaggtgtgtggagtgggtggtggctccattggctgagatggggtcctcacaggaaaaacagggaggtgtgcattttgagctctatctagtatctgttgaatttcagatgcatgtaagtaccttccatgccaggtgggttcccagtcaaaatatgtccaaactgtaactctgtttgagctctgccatctgtgctggttgaagcatatatccttctccctaagtggccatgtccacttaaggcagttagatctgcgaaagtgtctggactgagcataaggcttga

SEQ ID NO: 701925 - DNA, 993 bp, Homo sapiens
tgccctggccctggagccacaaaaattgttgtctccctaaaccaaagcacaaagcattgcatagactaggatggctaaatagagcagcaggagtgaataaaagaatgatttacaccttaaagtaataatgttaataattagtaattaccaagcacttacttagcttgtgccaggcacagaggaaagcactttgaccctaactttttgaccccaaatatattttcattccatggtacatttaaatctcacatttctgctcttctcatttgctttgttctctgtgccaagaaatataaaatccctaactcatccaattcttaacaaatattacctgcagaaagaatctgttcgaagtaaaactagcaatggcaaaagcttcaaacagtaaaatttgttacgaccaaaaaataaaaataaaaaaagaatcctacatcttaggtaatattgaaaatagaaaattcgaactaaaaattttcatattaaagaatagaatttttaatcccagcactttgggaggccgaggcaggtgggtcacttgagcccaggagtttgagaccagcctggggaacatgacgcgaccctgtctctactaaaaatacaaaaattagccaggtgtggtagtgcacacctgtagtaccagctatttgggaggctgaggaaggagaatcgcttgagcccaggaggtagaggctgcagtgagccaagatcataccactgcattctagcctgggcaacagagcaagaccacgtctaaaaaaaataaaattttctttacaaatttttacctgtcaattttacccaggagaattgtacttgctaacaacaatggccaagaagaaaactcacaakagtaaaagtaataattaaacaagataagaaaaaatgctaattactgagccttaaaaaaaatgtatgtggaaaaaattgacctcagtagaaacaacttcagtagaataaaactttaaattgggaaaaataagaaatcacttaaat

SEQ ID NO: 701926 - DNA, 386 bp, Homo sapiens
aagaatggaaaatttagctgctttttccctcctccattcttaccctcagtcccatccccttcaggctttggtgstattatcatatttgacattttatttgggggctagattcatgcacatttcatatctagtcatgggtggtattggattacgctatgaaaaatattcccaataaatagaatcaatttcaagccaccagaaatacattaaacttatggaaacttccaccccaaggcctgctatgaatttaagtctatggtctatgtggtgctaattcctaataattcctaactgcctctaaattgtttcaattcttaacattgctatattttcttatttccttaagttttattttaacttttattgtcctgaaagttctcatgatt

SEQ ID NO: 701927 - DNA, 832 bp, Homo sapiens
gaagaagatcgccaagaggtcaaagatcaagtcttttgtgagagtttataactataatcacctaatgcccacaaggtactctgtggatatccccttgaacaaaactgtcatcagtaaggatgtcttcagagatcctgctcttaaacgcaaggcctgacgagaggtcaaggtcaagtttgaagagagatacaagataggcaaraacaagtggttcttccagaagctgcggttttagatgctttgttttggtcattaaaaattaaaaaataagaaaaagaaatagtaacaagcattttctctgatcacaatgcaataaaactaaaaatcaataataataggaattttggaaactatacaatcacatggaaattaaacaatgtgctcctgaataaccagtgagtcaatgaaaaaattaagaaggaaattttaaaaatgtcttaaaacaagtgaaaatggaaatgcaaaataccaaaaccaatggggtacagcaaaagcagtactagcagggaagtttatagctataagtgattacaccaaaaacaaagaaaaacttcaaataacaatgcatcataaagaactagaaaagaaagagcaaaccaaactcaaaattgtagaagaaataatacagatcaaggccatagaaataaatgaaatgaacataacaatacaaataactaatggaaggaaaagctgttttttacaaaacataaacaaaattgacaaacccttaggcagactaagaaaaagagagagaagacccaaataaataaaatcagagatgaaaaagcagacattagaactgatagagcagaaattcaaaggattattagtg

SEQ ID NO: 701928 - DNA, 286 bp, Homo sapiens
tcaccaggaagatataacaattatatgtatagatgmccccaacatcattgcatctaaatatgtaaagcaaacattgattggtagaactgaagggagatatagaaagcagtacaataacagtaggagacttcaatatctcactttcaagatatgcaagattatatttgtggatatgcaagagtgtatttgtggaattacgtttgtggaaatatgtggaatttaaacatatttcaattttctatgaaatatgttttcatattcccatattcatattcaattttcatat

SEQ ID NO: 701929 - DNA, 1201 bp, Homo sapiens
atagataattccttaagattttttaaacatctcaaatgtataactactagaggcactatcattaaaaaccctggctaagataaactcagttctagcaccactgttatttaacattgttttggaagttctgatcaaatcaaaaagtctagaaaaaagaaataaggctaatttattggaaatagagaaaattattggtctttaaaaattatgtgattgtataattagaaaaaactaacagaatcagttaaaatattattgaaataagaaaatttttcttacatagcagctataattaggtcaatatatagcgagtagctattccatttataatagcagcaaaacataaaatattaggatatttagccaaaaaaatgaacaggacttaagaagaaaagtatacaactttactaaaaaacctaaattaagacttaaattaatatagacacaaaatagtttaccagaaagaaaggcaatattaccaagatgttaattgctctaaaattgatttataaaaattaatttataaaagtagcaatcataatctcttccagataaatctcacaaaactctaatttttatctgggaggaaacactggcaaaattagtcagaagaagaaatgaagaacgagtaattattgaaacttgcatgatcagaaataaaaatatattaaaatatcaccatagtgaagaacattgaactatttgctcagaagatgacatgtcgttggaacagaacggaaactctagaaacaagatatttagacacactcacagtaccagtatatcatgacaaacaaatgatcatcgtggcacataaattcattaagaatgtactccattaacaattccaggacattttttatttgggaaagaacctattatttttggaacatgagctacccaacaggcaaatgaaaatatgaagctgattttggtctttggggagatatttaaaagtctagtctttgaaagtcattcacggttgaaattgtaggagggcccatatgaatagaaacaatgaaaaagaaatatactggatatacaactttgaggaattaactatatttataggcagaaaatgaaaaggagcctgtgaagagtccctgggtcctcaaagtccagaaagcaaaaggttcctttgacaaaatttgaatcgtcagagagamcgaagaacataccgtatttgagaaaatgtggcaca

SEQ ID NO: 701930 - DNA, 988 bp, Homo sapiens
ctaaatctggtagattcacaggagatataatgattctattattttatccctttcatgaatccatgttcttccatatgtgtgaagaacattgatatggtttggctgtgtccttaccccacccaaatctcatcttgaattgtaactcccccaattcccatgcgttgtgggaagaactcagtgagaggtgactgaattatggggttgggtctttcctgcactgttctggtgatagtgaatgagtctcaggagatctgatggttttaaaaacgggagtttgcctgcacaagttctctctttgcctgctgccattcatgtaagatgtgacttgctcctccttgccttccaccatgattgtgaggccttccaagccacatggaactttaagtccagttaaacctctttcttttgtaaattgcccactctcaggtatgtctttatcagcagcatgaaaacggactaatgcaaacattataaaagagmtagaagaaattaggttgtaattttgcctttaacttggaaataatctatttgtgagttcttcttcttcttcttcttcttcttcttcttcttcttcttcttcttcttcttcttcttcttcttcttcttcttcatcttcttcttcgacagggtctcactctgtcacctcttcttcttttgttgagacagggtcttgctctgtcacccagggtgagtggtgtatacagtagtttatactggagtttaatgaagaagattatcattaagggtgagagagagagacagagagagagagagagagatttcacaggagatccagaaattgatctggtttttgtaggaaaattgtcttatataagtatataaaaatgaggaagatactccaatggtgacagaagagtagatatcgtcaaggagaatagaaaaagagaaagagagagagggagtggagagatcacttgggtgaagtggtgcttgagagtggcctatagaaagattaaacacctataaa

SEQ ID NO: 701931 - DNA, 988 bp, Homo sapiens
ctaaatctggtagattcacaggagatataatgattctattattttatccctttcatgaatccatgttcttccatatgtgtgaagaacattgatatggtttggctgtgtccttaccccacccaaatctcatcttgaattgtaactcccccaattcccatgcgttgtgggaagaactcagtgagaggtgactgaattatggggttgggtctttcctgcactgttctggtgatagtgaatgagtctcaggagatctgatggttttaaaaacgggagtttgcctgcacaagttctctctttgcctgctgccattcatgtaagatgtgacttgctcctccttgccttccaccatgattgtgaggccttccaagccacatggaactttaagtccagttaaacctctttcttttgtaaattgcccactctcaggtatgtctttatcagcagcatgaaaacggactaatgcaaacattataaaagagatagaagaaattaggttgtaattttgcctttaacttggaaataatctatttgtgagttcttcttcttcttcttcttcttcttcttcttcttcttcttcttcttcttcttcttcttcttcttcttcttcttcatcttcttcttygacagggtctcactctgtcacctcttcttcttttgttgagacagggtcttgctctgtcacccagggtgagtggtgtatacagtagtttatactggagtttaatgaagaagattatcattaagggtgagagagagagacagagagagagagagagagatttcacaggagatccagaaattgatctggtttttgtaggaaaattgtcttatataagtatataaaaatgaggaagatactccaatggtgacagaagagtagatatcgtcaaggagaatagaaaaagagaaagagagagagggagtggagagatcacttgggtgaagtggtgcttgagagtggcctatagaaagattaaacacctataaa

SEQ ID NO: 701932 - DNA, 914 bp, Homo sapiens
aagttgaacaatgagaagatatggacacagggaggggaacatcacacaccggggctgtcagggggtggggggctcgagtagggatagcattaggagaaatacctaatgtagattacgggttgatgggtgcagcaaaccaccatggcatgtgtatacctatataacaaacttgcacgttctacacatgaatcagaacttaaagtataatttaaaaattattcttaaagaaaaagaaaaatgacaatcgtatatgattcccatacttttcctaacttacagttctgtgaaatctaaacttcagaaacagttgtttataatggaacatactaaagatcatacatatgtctttaaaaaggtggttccaaggttctgataatttgcctaarattataggagagtggatgtctgagctaggtgtaggcccctggcttcccagtgctgggcagctcctcctcttcactgtctacatgtcctaggatcagacgttctcatagcaccatgtggcaaggctggtgggtgaagtatgttcataggcacctgctttgtgcttggtgcttttcatgtgatcacaatgtctcttcactacctccaaaatatgtagaattgcctgaatactgaaaggtttttgctttgattttttatataatctccctatgtcccaacagtgggaagagtgaaaactttctgaaacaaaatagagcataaactaagccatgtaaaatagaacataggtcatgtatttgtgacagtagacacgacactcattttgtgaaaagttggtaaattaaaaaatgcctaagtgtcttcgtgtgaaggcctctgccagagagaagtcagaacatctgcacacagaccattatgttcccaatatcaggtaggattaatgctttaatgtatatatagggagagtgagg

SEQ ID NO: 701933 - DNA, 2020 bp, Homo sapiens
tgccttatctcaaaatacrtaaagaaaaacagtttaggctcttatgtagtacatgggcattggagtgatttccttgattttcacatagttctttccctcaacatatttatactcttttctctatccctccatctttttagctgccaacaagggtaatgtcaacccagctgaaactgattaaccaacaacaatctcattttaaatcctttataaataatttaaatatacagacctcatgaaaagtggtatgctacaacatgatgctttaagagttcaaagaagattgtgccataatatttaaatgggactagctgcttcattttgtgtcctgtgaagcattatgcatttagaatactgaggtacatggtgggaaaattaagcccatgaacagcaggaaagatgtttttgcaacatatgccaatggaatactcatttgccatcaacttacttaaatgaaccaaaagatagatagtattttgggcatttatccaaaaaggagggtctggtggggaattgcaaaagcttcaaaactaaaggaaatcactctgaatgcatttcaaactaaattcttatggtttaatttagatctgccttattaatccatattaatggatagtaatcatttcagttattatctccatgtattagaagaatattttcataaagtgcgtaatgaagttggatctatgtgaggaaataaaatgattcaaaaaaactgctaagcttaaatgatattgccatatgaacttggacacgtctttcacttcttaagttaatcagattattcaatcataccaacatattcaaacatacaagggatacagtacagttatcatttgttcattcagggatacctcattgaagagaaaaccagatacctttttggttctcatcaagccagtaataataatctaccatccgcattaactggttctgaggcaagtatctgacctaagacaggtcgagctagatctgaaagtacaaaagattctttaaaaataaacaacatatggagagtagtaagttgctggtcaggttgtgatatgtgacgcttggaattcagtggttttgtttcctgccagatggactgaaagacagaagccagtgtttgtagcacagaatagagagtgtcctgaaagcattcacagtgttgtgtatccattaactctgagagctcactggacccttgctggtctcagagttacattaggtactccagtgtccttcaaatacctctcttctgtctaatacagctcaagtcatcttcctattccttgtgctcaaaagaattataattaacataccaataaatcagtaaacatttctgatcgtttacttgatgcttaccaattttgaagacatttggaagaatcagtagatttagacatagtacaggaaggtacaattaactcatccaaactattgttatccagcacacgttaactaagtagctactatgcattttactaggaccttaatacagaagtgtgtaaggcacagtcttgcgataaaagccaaaaattggaataaatacaagggaaaaggatggtgcagtggcttacacctataatcccagcactttaggaggctcagctgagcagatcacttgaaccaaggagttcgagaccagcctgggcaacatggcaaaaccttgtctctataaaaattacaaaaattagctgggcatggtagtgtgtgcctgtagtcccagctacttggaaggctgaggtgggaggatcccttgaggctggaaggtggaggctgcagcgagccatgatcatgccacagcactccagccttggatacagagccagaccctgtctccaaaaacaaaaacaaaaacaaaatacaaaacaaaaatacaggcacttaatataaatgaaacctagggtatagaaagtctaagttgcttagagaagctaaacaccgaatttagtggttgagggaggtatctctccacatggacctgagggcagccttacagaagcctatttggggctaggaaagcagcaaagaattc

SEQ ID NO: 701934 - DNA, 2020 bp, Homo sapiens
tgccttatctcaaaatacataaagaaaaacagtttaggctcttatgtagtacatgggcattggagtgatttccttgattttcacatagttctttccctcaacatatttatactcttttctctatccctccatctttttagctgccaacaagggtaatgtcaacccagctgaaactgattaaccaacaacaatctcattttaaatcctttataaataatttaaatatacagacctcatgaaaagtggtatgctacaacatgatgctttaagagttcaaagaagattgtgccataatatttaaatgggactagctgcttcattttgtgtcctgtgaagcattatgcatttagaatactgaggtacatggtgggaaaattaagcccatgaacagcaggaaagatgtttttgcaacatatgccaatggaatactcatttgccatcaacttacttaaatgaaccaaaagatagatagtattttgggcatttatccaaaaaggagggtctggtggggaattgcaaaagcttcaaaactaaaggaaatcactctgaatgcatttcaaactaaattcttatggtttaatttagatctgccttattaatccatattaatggatagtaatcatttcagttattatctccatgtattagaagaatattttcataaagtgcgtaatgaagttggatctatgtgaggaaataaaatgattcaaaaaaactgctaagcttaaatgatattgccatatgaacttggacacgtctttcacttcttaagttaatcagattattcaatcataccaacatattcaaacatacaagggatacagtacagttatcatttgttcattcagggatacctcattgaagagaaaaccagatacctttttggttctcatcaagccagtaataataatctaccatccgcattaactggttctgaggcaagtatctgacctaagacaggtcgagctagatctgaaagtacaaaagattctttaaaaataaacaacatatggagagtagtaagttgctggtcaggttgtgatatgtgacgcttggaattcagtggttttgtttcctgccagatggactgaaagacagaagccagtgtttgtagcacagaatagagagtgtcctgaaagcattcacagtgttgtgtatccattaactctgagagctcactggacccttgctggtctcagagttacattaggtactccagtgtccttcaaatacctctcttctgtctaatacagctcaagtcatcttcctattccttgtgctcaaaagaattataattaacataccaataaatcagtaaacatttctgatcgtttacttgatgcttaccaattttgaagacatttggaagaatcagtagatttagacatagtacaggaaggtacaattaactcatccaaactattgttatccagcacacgttaactaagtagctactatgcattttactaggaccttaatacagaagtgtgtaaggcacagtcttgcgataaaagccaaaaattggaataaatacaagggaaaaggatggtrcagtggcttacacctataatcccagcactttaggaggctcagctgagcagatcacttgaaccaaggagttcgagaccagcctgggcaacatggcaaaaccttgtctctataaaaattacaaaaattagctgggcatggtagtgtgtgcctgtagtcccagctacttggaaggctgaggtgggaggatcccttgaggctggaaggtggaggctgcagcgagccatgatcatgccacagcactccagccttggatacagagccagaccctgtctccaaaaacaaaaacaaaaacaaaatacaaaacaaaaatacaggcacttaatataaatgaaacctagggtatagaaagtctaagttgcttagagaagctaaacaccgaatttagtggttgagggaggtatctctccacatggacctgagggcagccttacagaagcctatttggggctaggaaagcagcaaagaattc

SEQ ID NO: 701935 - DNA, 426 bp, Homo sapiens
ccatcaggattcagattgtctttcatgttcatccttcctgttgtttatgctattctcactttcaattctattacatttgtgtgtgtgtgtcgggggtggtggtgcaaagtagggaatgataggacacagatttatttcctcttaagataggcagacaaaaactcaagccacagtattcacattatttgtcatatggagataagtttatttacagmaaaaaattaatatttgttaggccaggttgtgctaacgaatgatcatttatttattcttcatatttttaaaatgatagctatgcacaatagataggtatttagactaattttctagactgtagcactaaaaataatgtggaggaaaattctaaataaacagaatgttttcatcgtttgcaacaagagaacatgaaatgcaaaattaaagaat

SEQ ID NO: 701936 - DNA, 574 bp, Homo sapiens
ttattaacactctaattttttgctggataattttcttcgatgtagaattctgggtcatttttctgtcagtcttttaaaggtgtcaccccattgtcttctgggcagacaggggtcctcctcagtcttcgtcacccctgacccctcgctgaggacctctgaccccatgccacctcctctcatgtgatcaaggatgcccagccacctkctctgctgcagcccaggggcctctgagaagcctactgcccctccgagagctctgccaccatcctcctgtggcttttactgcccttacactcccctacttgttacctcttacccacctgcccggaccctcagttatgctgtcagcccttgagcattgggcagcacacttctctgcctccccacagcatgtgctctggccctggcatttggcccatggaaggcaggggagagggagtgaggccccctatccttacaagcagggtgctcttgtcgggggatttgtgcagactctttatgagctattacttaacttttcttccttcaaattctcacttttgaggcttggttttcatcaaaaccaagtgtagtg

SEQ ID NO: 701937 - DNA, 574 bp, Homo sapiens
ttattaacactctaattttttgctggataattttcttcgatgtagaattctgggtcatttttctgtcagtcttttaaaggtgtcaccccattgtcttctgggcagacaggggtcctcctcagtcttcgtcacccctgacccctcgctgaggacctctgaccccatgccacctcctctcatgtgatcaaggatgcccagccacctgctctgctgcagcccaggggcctctgagaagcctactgcccctccgagagctctgccaccatcctcctgtggcttttactgcccttacactcccctacttgttacctcttacccacctgcccggaccctcagttatgctgtcagcccttgagcrttgggcagcacacttctctgcctccccacagcatgtgctctggccctggcatttggcccatggaaggcaggggagagggagtgaggccccctatccttacaagcagggtgctcttgtcgggggatttgtgcagactctttatgagctattacttaacttttcttccttcaaattctcacttttgaggcttggttttcatcaaaaccaagtgtagtg

SEQ ID NO: 701938 - DNA, 655 bp, Homo sapiens
attgccccacaatgacatctcttatgtttttatatcagtgcaaacctattagttgaagaaaaaaattgttcaatgaagagctggcatctacaaagcttttagcctggtttgaacctcagcagatgtggctggcaccccagcccagggcagactccgaaaacgattcctggcccctgtgacatatgcacacaggtgttcctctgtacgattctgtggggtcaagagcagccttgccggagtgacgttgtaatgttagctccttgctaggtctcactgaccccacagcagaattcatagctcttcctgtgtctgcagctccttgttcctgtcagttggtcagtattttgcttatggctcatgagtaagaatcttcccccctagaaaccgtagatcccttcagagcacagactatagctcagtgacaaaagggcacaccacagtaaaagcagttaataggtatctattcaatgaagacacacgttacaatggggggaaatacacagaaagttcttgaacttgtcaattcttggcccatacaaaccccaagtctttctttctgcagttaagcaaagattcctgggacggtgcctcctccttgttgaaccagcyagtaagacaagagccacattctgatacgcagaagtaacaataagaa

SEQ ID NO: 701939 - DNA, 876 bp, Homo sapiens
gactgattcatgaattggttataggttttctcgacaattttttcacttggaatcactcattctggatgtctttttattttgcttatttttaatttcactgacgtttggagtttcgctaggtaagttggtattcttctttatctactatagtgccttcacttttagggatattgggattcctaaactgtacacccatgaattgtgagagggaaaggaatttctacattggtccttttacttttttgcatgacagaaacatgagtctagtctctgtcacttgagtacaaaaatgatcattcatatctgacaagtggctgccagctgtaatccactatatccgggcccttagcatgtcctcactctgactgatgcctacacgtaaaattcagttcacaggcttgtattgagtttcagcaattgtgctttttggtaagaaagctcatggcccttggaaaagagctgacactgattaagtatcctagtcaaacttacatctgccaaacaaagaaagcctcctgtgtgctattgacaagatagacaattctgaaaaacataaagagcctcaggggtacctataaaaatattgtcccagacctattgactacatgactcacttcatgaacacaatttgctacagaccaatttgccatttctaaagttaatggcaaattttctttttattagagcattatgcacctccatatacaatgatataaataacctatattcactattaaaaagcctatgggagttttcaaaatttttacccctaactaggatgatttttagcrtatctttctggcctgctagaagagattgctagagtcagattaaatgctcagaatattattgaatattttcatgcctgagtttgta

SEQ ID NO: 701940 - DNA, 1784 bp, Homo sapiens
ctttatttctacctgggagaattgacataccagaccaatgattataactagccacacgatcattattgggtgagagctagcaaatgaatgtagaatcataaggattgtttagattttcataataataatacacctattattacatgtagattaaaacaattcataaccaaagtcctatttattttacaggtaaatgtctattttttgtaggttttttttttactacatgccttaacaaaattatattcatatcattaaatgggataggcttttcaaggaatgtaaatcatgttgaaatgtttcagttcttgccaacaaacatgcttaaattaataacaatacaaaagtaataactttttatccaaagtttgctctctaaaggttcttttttttctattttttgacttgattttattttattttaatttttattttactttaagttccaggatacatgtgcagaacatgcaggtttgttacataggtatacgtgtgccatcgtggtttgctgcactatcaaccccgttatctargttttaaaccctgcatgcattagatatatgtctttaagctctccctccccttgtccccaaccccctgactggccccgttgtgtgttgttcccctctctgtgtccatgtgttctcattagaactcttttttttttaacttttattttaagttgaggggaacaagtccatgttggttacataggtaaacttgtgccatggagatttgttgtgcagatcatttcatgactcactagttatttttcctgatcctcttcttctgcctaccctccactctgtgaaaggccccagtgtgtgttgttcccctctatgtgtccatgtgttctcatcatttagctcccacttataagtgataacacgtggcatttagttttctgttcctatgttagtttgctaaagataatcaccaccagctccatccatgccccttcaaaagacatgatcttgttctttttaatggctgcatagtattccaaggtgtatatgcaccacatttcctttatctagtctatcattgaggggcaattaggttgattccatgtctttgctattgtgaatactgctattaatacaatgaacatacttgtgcatgtgtctttacaatagaatgatttatattcctttgggtatatactttgtaatgtgattgctgggtcaagtggtatttctgcctctaggtctttgaagaagtaacaggtgctggtgagattgtggagaaaaataaccctttacttttaataaatattagcattagagttcctctacctttaacactcacttttcatttgccatcatctttctgctctagcccatatcctaaattttaatagaaattaggcacaccagccatcaatcaacactcgtgtctgatactttgaacattacatttattttatcaataatatactgattatgaaaattaaatagcagtcaacaaatttaagttactctacattgattacctgaataatttaacaggtaaaatataaaataacatatataacacattgagatccgtttattttcacagatgggacagtttgagtgcttacatagtcaaatgactgtttcagaatatggtcatgcaacaggaaatcctaatttgccgtttagtttaggagtcaaaactcttctattacatacaaaagtattatttattattattattattattattattattattattattattattgagatggagtcttactctgttgtccaggctggagtgcagtggtgtgatctcggctc

SEQ ID NO: 701941 - DNA, 1851 bp, Homo sapiens
  misc_feature 603, 604, 605, 606, 607, 608, 609, 610, 611, 612, 613, 614,615, 616, 617, 618, 619, 620, 621, 622, 623, 624, 625, 626,627, 628, 629, 630, 631, 632, 633, 634, 635, 636, 637, 638,639, 640, 641, 642, 643, 644, 645, 646, 647, 648, 649: n = A,T,C or G
  misc_feature 650, 651, 652, 653, 654, 655, 656, 657, 658, 659, 660, 661,662, 663, 664, 665, 666, 667, 668, 669, 670, 671, 672, 673,674, 675, 676, 677, 678, 679, 680, 681, 682, 683, 684, 685,686, 687, 688, 689, 690, 691, 692, 693, 694, 695, 696: n = A,T,C or G
  misc_feature 697, 698, 699, 700, 701, 702: n = A,T,C or G
tctcatttttataaattttgcaattttataaatcaatttgttacttttgttaccttttgagatactcttttttcatggctgttctatagtttatagcatataattgtaatttataacaacttgctttcaaataatatgtgatttcttatacaagaaacttaatatagcatgcttctatttctcctttccagatctttgtgatataaatggtcatatgtttatttcttttctcataatatcagcttttactttagatttggagggtacatgtgcattttgttacgtgggcatattgcacgatactgaggtttaaaatacaaatgatcctgtcacccaggtgtgagcatggtactcaacagttagtttaatttctayatatatatatctatatatatataaaatatatataatacatatagttgctattttcacttttaactcgagtatattgtaaagatatgtaaattataagaataacatttcacatttagccatatattcataatttttacatatccatattaacatctggtatgttttttcttctggtggaagaagtgattatataatttcttgttttatagttctgtggtgatgaattcnnnnnnnnnnnnnnnnnnnnnnnnnnnnnnnnnnnnnnnnnnnnnnnnnnnnnnnnnnnnnnnnnnnnnnnnnnnnnnnnnnnnnnnnnnnnnnnnnnnnaagcaatcaggtgtcagcgatatcctcctcttatggatcctaaagctgatattcagcatgggagtgccccatcagattttgattctgttactatagttttatgctatatttccttgtttactgtacagataagcagacgtaacttaaacatcaaaaactataaaaacttctcgctgaaaactaattttcaaagcttcttgttggcaaagaaaaatcaaaagctttaaataatctgtagtattttaggctgtcttccatgggaaaacaaatggtgacacttttacataaagagttcctgtaacctaggaacagattgtttttagaactatgtttttattatttcttgtttgtttgtttttgagatggagtctcgctctgtcaccaggctggagtgcagtagcacgatcatggctcactgcaagctccgcctcccaggttcaagtgattctcctgactcagtctcccgagtagctggaactacaggcatgcaccaatacgcacagctaatttttgtattagtggagatgaggtttcactatgttggctaggattatgtagatctcttgaccgggtgatccacctgcctcggcctcccaaagtgctaggattacaggcgtgagccaccacgcccggctgtttaaaactaaagttcattttcttaacagaaacaatggtatactagttaatatcatcaagtgttccagacaagctgcttgtaatatattacttaattcaatgcactagcattatagaatgaatgatactacttttggttttaaatcaatgacagacacacaaatgaagggctttttttgttttagaatacagaagttaccctttaaaaacttgtaaataaacagattagtttttgacattttccctttgtcttgttctgtgtctgttatctctttctctctgtctatctctcccccactctctctctctcctgctttttcaatctttttatatcctttcccctcaaatatctttgttctcctgcagataactttaaattggatattagtaaacaatttctaatatagcctccgttacaaattatcttaaacttctttttcactcaacaatacttccactctttcaaattgtattagtaaattttattagatggcaggagaaaattctattgag

SEQ ID NO: 701942 - DNA, 595 bp, Homo sapiens
catcagagagtagactttgcaacctctaaagctcctgaatcaaacaaaccaatatcaataactgaaaaaaatatagtgccggtgttcaatgtgcattgcctttaggaattcatcaaagtacctgaaatctctctgggagaaaagaggaacatgtagaaaggcatatagaagtaatcataattattatatataataccaagtagaatttattaatatatatatagttagtatgttactaatatataataagctaacacctgtgcaaaacactcatttaatcctcatggtaatgatctaaggagatgctattattacccctagatgacttttcgtgaggttractagcctgcccacaacgagtgagcagcaaagagggatgtaaacccaggtctgtctgacttcaaaccctgagcatttacctccccagaatgacttagcagccatagaagttttcctagacttgctcatcctcttctaattaaacctgggtcacggaaaattttttaacttatgtttatagtatactgtagtctgttaagtgtgcaatagcgttatgtctgtttcccctgcatctgcagttacctcctccgctgaa

SEQ ID NO: 701943 - DNA, 595 bp, Homo sapiens
catcagagagtagactttgcaacctctaaagctcctgaatcaaacaaaccaatatcaataactgaaaaaaatatagtgccggtgttcaatgtgcattgcctttaggaattcatcaaagtacctgaaatctctctgggagaaaagaggaacatgtagaaaggcatatagaagtaatcataattattatatataataccaagtagaatttattaatatatatatagttagtatgttactaatatataataagctaacacctgtgcaaaacactcatttaatcctcatggtaatgatctaaggagatgctattattacccctagatgacttttcgtgaggttgactagcctgcccacaacgagtgagcagcaaagagggatgtaaacccaggtctgtctgacttcaaaccctgagcatttacctccccagaatgacttagcagccatagaagttttcctagacttgctcatcctcttctaattaaacctgggtcacggaaaattttttaacttatgtttatagtatactgtagtctgttaagtgtgcaatagygttatgtctgtttcccctgcatctgcagttacctcctccgctgaa

SEQ ID NO: 701944 - DNA, 1065 bp, Homo sapiens
tgagagaataaacttccagccttctgctatgatgagagatgggtgatctcccacttgggcaaaaaccctttgatctcttcttaatggggtttcaaaaggaaacaaaggtagataatgtgtgtgttaagcccgtcttcagctggaagctcaaaatctttataatacactcattgctttttataatattcttaatccattttgatgtctctggcccttggcggcaaatactgccatgcctacccagaacctctaccgttgtcacatctttccagtcttatgctctatatttaaaaccatccctcctcccataaaaattctcctttccttagttacagggttacatcaaacagagaaaagtatagatgcattgatgtgtcatatcaaagtaacaggaattgactcactcctctctggactatgtatggctttttaaaaaataactttacttaaaaagtagaagaagaagacagtgaaaatacagccatttcaatccacagagacaacttcaaaaraaaccaaacctgctgacaccttgatcttgaacttgacatcagtgttaaatcaaagtaacaagaattgactcactcctctctggactatgtatggcttttaaaaaaataacttttacttaaaagaagaagatgactgtgaaaaacacagccatctcaatccacagagacaacttcaagagaaaccaaacctgctgacaccttgattttgagcttcagcctccaggatagtgaaaaataaatttctcttgtttaacccaaaaaaacccccacttttattgatttgtatgtgtgtaatttcaaaaatcatatatgtttatcataaaaaacttttaaagtatagaaaagtacaaaggagaaaaataagatcaattttaattacatcttttataacattattttggcatatacatgtgataatctgcagatggcctcccaagatccttacatatcctcatgtagtccttgctcatgctgaatcaggactgaccctgagtgaccaataggatacatgaaaagtgatgacgtatgacttccaaggcaaggtcataaaaaa

SEQ ID NO: 701945 - DNA, 840 bp, Homo sapiens
tacagttccaaatctgaaagaattttaagggcagctagcatcattgggaaatgcatggaagaagcagtctgtagaactggtttattcaacctgaatgataagtgttttggagaacctgacaaaagaccagaaagaaacccccatatagaattagatcatgataaccccaaagaatccacattgtgttaaagcatttkcaaaaactttgagttataggcggtatttgagattttgtctaaactttaccctcatcatcaattaacaagggcaaatattcaaaatagttatttggtaagacaatttttttttaaatcaagtaagctttttgcagcctattaaaaacccacatatgcaacaaaaccaagttctatacacatagtataaactactgtttcatgcaaatatatcagtggattactcattaagaatttccaaacattgactttgaaatgttagtaaatccttaaaacagtctgtggtcatgatcactaaactctgaccctaaatcactactgattgtctcaacatgaatgtcaatgttattttagagcaggttgtttagtctcccaatggggccttaagaacttgctgtttgtttaggacttgctgtggtgttgataggtactctctggcggccatgaaaattattgttctccagcatatacattttctcccaagtctgaaagggacacaataagccaaatttctcccagggtttgaattatttctaaaagaaaagtgttatttttaaagggcaatagagttttgttgggtgtgatttcaaaggctacaatatgttcttgtagcaaaaggacgttcattaacatgacttgtgaagcc

SEQ ID NO: 701946 - DNA, 840 bp, Homo sapiens
tacagttccaaatctgaaagaattttaagggcagctagcatcattgggaaatgcatggaagaagcagtctgtagaactggtttattcaacctgaatgataagtgttttggagaacctgacaaaagaccagaaagaaacccccatatagaattagatcatgataaccccaaagaatccacattgtgttaaagcatttgcaaaaactttgagttataggyggtatttgagattttgtctaaactttaccctcatcatcaattaacaagggcaaatattcaaaatagttatttggtaagacaatttttttttaaatcaagtaagctttttgcagcctattaaaaacccacatatgcaacaaaaccaagttctatacacatagtataaactactgtttcatgcaaatatatcagtggattactcattaagaatttccaaacattgactttgaaatgttagtaaatccttaaaacagtctgtggtcatgatcactaaactctgaccctaaatcactactgattgtctcaacatgaatgtcaatgttattttagagcaggttgtttagtctcccaatggggccttaagaacttgctgtttgtttaggacttgctgtggtgttgataggtactctctggcggccatgaaaattattgttctccagcatatacattttctcccaagtctgaaagggacacaataagccaaatttctcccagggtttgaattatttctaaaagaaaagtgttatttttaaagggcaatagagttttgttgggtgtgatttcaaaggctacaatatgttcttgtagcaaaaggacgttcattaacatgacttgtgaagcc

SEQ ID NO: 701947 - DNA, 569 bp, Homo sapiens
aatttctctttatcaccacagacatgagatttttttttaaagtgctgtgattatattacctgatactccataggagaattaagattgaggttagtaaatgaaataataaaaactctgaaagacaattaatttatttgataaatacttactgaggatctactagacaccagacaccgaacagaatactagagtggctggtagaaggggttggtgtcggggaagtgaaggataaatggataagcaagacagatacaatccttgcctctatagtctagcaaagaattaaaggaacaatgacaataaaatatcttatggagcacagagcaggtagggaggggcactaatttagtctagaagcctgaggagttttagcttagtaatgaagatsaagtcttttcaattatgagaaatcgaaaagacatttacaatgactaaagtgttatggcaagagatgagactaaaacgtcagtggaagtagctcatgacagtattgtaagctttagtaaggagtatatcctttatccaaagggcaacgggaagccattgtttgaaaggagaatggcatgatc

SEQ ID NO: 701948 - DNA, 535 bp, Homo sapiens
taacatcaaactacccagtaatctgggactgtcagataacggatgactcagatttcaaatggatatgattacacggactctacttctgaccacattcattcatatacatcatagggacatatatagaataaatacaattagactatacacacatacataattagcctgtgtgtgtgtgtgtgtgtrtgtatatatatataaatgtgtgtgtatatatatactatctctctctacacacacacacagtgaacacacacacatacacgtaactgtgagtacttctatgcaaaggggatacagcactggggttaagaatttgaactcttgaaccaaaccatctggagtctgaacactggggctctgtcactagcactgcattctatgccttcattttccttatttgcaaaatgggattaataatagtttgtacttcacagattacttaaggatataaataatttatgtgaaagatgtaaaatagtccctagcacacagtaaatgctcaatgaagactacttattattatacataggtg

SEQ ID NO: 701949 - DNA, 535 bp, Homo sapiens
taacatcaaactacccagtaatctgggactgtcagataacggatgactcagatttcaaatggatatgattacacggactctacttctgaccacattcattcatatacatcatagggacatatatagaataaatacaattagactatacacacatacataattagcctgtgtgtgtgtgtgtgtgtgtrtatatatatataaatgtgtgtgtatatatatactatctctctctacacacacacacagtgaacacacacacatacacgtaactgtgagtacttctatgcaaaggggatacagcactggggttaagaatttgaactcttgaaccaaaccatctggagtctgaacactggggctctgtcactagcactgcattctatgccttcattttccttatttgcaaaatgggattaataatagtttgtacttcacagattacttaaggatataaataatttatgtgaaagatgtaaaatagtccctagcacacagtaaatgctcaatgaagactacttattattatacataggtg

SEQ ID NO: 701950 - DNA, 1563 bp, Homo sapiens
aagtatcacatttttctcagaaaaaaatgtcttactaaaaaaatcagtttattaatgtataatttacatagaataaactgcttccattgcaagtgcacaattcaatgagttttggcatatattattatcatggtcaagatgcagaacatttccaatacctccaatggcttcctcatgcccttttgcagtttggcgttgtcctatttaaccacttaatctgttttctgttacttctgttactataattttctattttatataaatggaattacataacatgtattcttttgtgcttggatagctaagtttttaagataaaaaattacattaagctgatggcgattcttcttatcagactttaaatacaactagactaggatttctgactatggaaaagcaataaaccatatttgtatttgctacttagtttctggggttaattagctttttctctctaatgaagatattaggcatcagatataatcaacctattagatgaaaaaaagaattatcaacataacaatagttaccacttgttgatttgtaatggctaataagcaaaaggcttaaaatgtaatacagaatgtatttctgtgtktattttaataatactatctaatactttttgagtgttatatcctaggcactatgtatgtattaactcaaataatccctccagtgtctctaggaggtattactattattacatcctcatcttatagataaggaaactgaaacttagggagataaagtaacttgcctaaagtcatatagaaaatgtaaaaaagaatttgcatccaggactgtctgactgcaaggcattttctgaataatcaaccacctatatttatttaaaatcacagggccaaaaagattatcaaaagccccataattaggctatgtatcttttagagcaacataacaaagaaatcatgaatatctgtctacttaagagatcctaagacaagagtcgtaaacggaatgaaaaatagatttctgcagtttcctatttatgcaaagaactgtatcacagaaaagcgttctaagtctgacaatttattattcaatgcaattctactaaataagcccagtatatgccaaccactgcaaaaggtttaaggaaaccaagatgtacaagacttcatttctgccctggaggaccttagttcatttttaaagacagatagacttataaatatttactataggtagtgcctgcacttaggtatatttatagaatatgtgaagatattttcagaaaataaattaataactatatgatcaaaagcaccaggaaaaaaacatgttcaatagagactcaaatatataaccttgtacattaggtaccatctctaaaaatcaaaacacttgagtcataaatacattttttctttttctagtgaacctaaaaacctggcagcaaacagttattggaacccttggcaaaattttgaaagtcctagcaggaaaggtcaatctgcatcttggagaatgaccacaattgagagcagaagctgagccaaaacctacacaattgtctgaaataagagcagatggggaaca

SEQ ID NO: 701951 - DNA, 718 bp, Homo sapiens
aaataatatgaacacgttgtcctgcatcctttatgactgagcatagcatagccataggcaatttaaagcaaattcaaacaaaaaaccagaaacaagcmaacaaaaaaacactataaagccctttatatcttgagtttaaacaaaaatatcgaggcatcccagtaagtgctggttctatacaataaacattggaggattttccatatacctggactatcaaaaataatgttatttttgactttgccataataacgttggaaggcataaaattgatactatgaatatgatagctatgtaaaaagcttgaggtcttccaccataaagagaatagcagaaacttagaaatcttggtaaatttgtagtcctttttttacagaaaaaaaaaaatagtcgtgttgtattttttacgtggtggacagtttttataaatctacttactgatagttctttgaaacgaactgttcttttccaaacatattggtatgtgtcttttttgtgcatccttagagaagttcactattatggaatgtcaaaagtccaagtgatctactaagtctatcattacctaagtgttttttgttgttattgttgattgttgtttgttataatgaaagttagtccgatgtgatataattcagtgctctccatgtccatgtgacattattgacattatgattagacagattcaagagaaaatgtgatcgtgaaatttggaaaa

SEQ ID NO: 701952 - DNA, 1936 bp, Homo sapiens
tttaaactggcatcttttttatctttattattatttttcccattgtgctacgyttgctatgaaataaaaatatgggttttagcaattgtaaaaactattctcaaggatttttacattgtaatctagtattaattttcaacttaatttacataatatgttttaaaagtgttatttatgtacaaagaatattaatatacagctataattataataataaaatgaggcatgtatattaattattaatatctcattctagagacgtgaagtattgttcttgtaaaaaacaaaatgttgcaaatcagttgaggtttctcttggccccatatactgaaataatagtgaaggggggcaaatcatacagatgagatacagctaaagcagttcctatacagaaaattataggttaaatttatttattaggaaataagagttgaaaaatcaaaaaatgtaacttctatttcaagaagatagtgaaggaataacaacaaaatctccaaaaaaatgaagaaaataaactggtaaaatcagaaatgaataaaatagaaatatgatataaaataatgtcatcaaagcagaaatttcattccttaacaagttttaaaaaatccataatttaacaaaactgaaagaataaagagataaaacactaaacttattttaatgtataccatttgaactaatgtatgtatacccatttcagggtatacatacccatttcaggtacccagaatatgccatttgaactaatggcacttattccggagtcatgaaaattttacatttcaatctttatggtaaggcattagaatcacccagggagctctcaaaagttgtgatattcaggttcacttgatttatgacagtgacacaattctataaggaatagatggtatttacaatagatagagcaatttaaatgcaagtagaaagaaagaaatcttgagttttatcaaaacattaatttgagttggacaataggcctaagtattcaaggtaaaacaaaaaatcttgtagaaaaactatggtaatattttcatgatttgggataaccatggatacaaccaggaaaaacaaatttcatagacagaattaattaatagaaagcatttccatggaaagacctctgggaataaataatatcatcatatggaatagtactcagccttaaaaaaaggatgaaattctgtcatttgctacaacatggatggaactggagaacattatgttaaataaaataagccaggcacagaaagacaaacactgcatgttctcacttagatgtggaatctaaaacaattgaactcatagaaacaaagtagcatgatgaatactagatgatggggatggggggagtctggagatgatagtcaaaaggtaaaaagttagaaagaataaattcgattattttataacaatagcacagcatgctgaatatagctaatatttgagtcctctgtatttcaatatttctaagagtaaatttctaatgttctcatcaaaaaaaaatattattattatatatatctgacaaatgatatgtaaagaactgcaaatgaataagtaaaattcagtaaaaaataggcaatgcacttgacttgcactgttcaatttgcatttggaaaaatgcaaattaatatcacaatgaggtattatatcatacccattagaatggctaacatcaaaaagaataacaatcccaaattgtggtgaatatgtggagaactagaatgcttacactttgctattagatgtgtaaatcagtgcaagttctttggtgacaaagtttagcattatcttctataggtacataaatacctaccctatgacttaaaatatcatttctaaaaaagttagttcctgtttcaagcaaacacattctaagaatgtctataggaactttatcatattagccaacatttgaaaaagactctaatat

SEQ ID NO: 701953 - DNA, 1936 bp, Homo sapiens
tttaaactggcatcttttttatctttattattatttttcccattgtgctacgtttgctatgaaataaaaatatgggttttagcaattgtaaaaactattctcaaggatttttacattgtaatctagtattaattttcaacttaatttacataatatgttttaaaagtgttatttrtgtacaaagaatattaatatacagctataattataataataaaatgaggcatgtatattaattattaatatctcattctagagacgtgaagtattgttcttgtaaaaaacaaaatgttgcaaatcagttgaggtttctcttggccccatatactgaaataatagtgaaggggggcaaatcatacagatgagatacagctaaagcagttcctatacagaaaattataggttaaatttatttattaggaaataagagttgaaaaatcaaaaaatgtaacttctatttcaagaagatagtgaaggaataacaacaaaatctccaaaaaaatgaagaaaataaactggtaaaatcagaaatgaataaaatagaaatatgatataaaataatgtcatcaaagcagaaatttcattccttaacaagttttaaaaaatccataatttaacaaaactgaaagaataaagagataaaacactaaacttattttaatgtataccatttgaactaatgtatgtatacccatttcagggtatacatacccatttcaggtacccagaatatgccatttgaactaatggcacttattccggagtcatgaaaattttacatttcaatctttatggtaaggcattagaatcacccagggagctctcaaaagttgtgatattcaggttcacttgatttatgacagtgacacaattctataaggaatagatggtatttacaatagatagagcaatttaaatgcaagtagaaagaaagaaatcttgagttttatcaaaacattaatttgagttggacaataggcctaagtattcaaggtaaaacaaaaaatcttgtagaaaaactatggtaatattttcatgatttgggataaccatggatacaaccaggaaaaacaaatttcatagacagaattaattaatagaaagcatttccatggaaagacctctgggaataaataatatcatcatatggaatagtactcagccttaaaaaaaggatgaaattctgtcatttgctacaacatggatggaactggagaacattatgttaaataaaataagccaggcacagaaagacaaacactgcatgttctcacttagatgtggaatctaaaacaattgaactcatagaaacaaagtagcatgatgaatactagatgatggggatggggggagtctggagatgatagtcaaaaggtaaaaagttagaaagaataaattcgattattttataacaatagcacagcatgctgaatatagctaatatttgagtcctctgtatttcaatatttctaagagtaaatttctaatgttctcatcaaaaaaaaatattattattatatatatctgacaaatgatatgtaaagaactgcaaatgaataagtaaaattcagtaaaaaataggcaatgcacttgacttgcactgttcaatttgcatttggaaaaatgcaaattaatatcacaatgaggtattatatcatacccattagaatggctaacatcaaaaagaataacaatcccaaattgtggtgaatatgtggagaactagaatgcttacactttgctattagatgtgtaaatcagtgcaagttctttggtgacaaagtttagcattatcttctataggtacataaatacctaccctatgacttaaaatatcatttctaaaaaagttagttcctgtttcaagcaaacacattctaagaatgtctataggaactttatcatattagccaacatttgaaaaagactctaatat

SEQ ID NO: 701954 - DNA, 784 bp, Homo sapiens
tgttggggtgtttttgtttttggttttggttttggtttttttctttttttgagacagcgtttcgctcttgttgcccaggctagagtgcaatggcgtgatctcggctcattgcaacctctccctccagtgttcaggtgattctcctaccttaacctctcgagtagctgggattacaggcatgcatcaccacgcccgggttattttgtatttttagtagagacggggtttctccatgttggtcaggctggttttgaactcctgacctcaggtgatctgcccgcctyggcttcccaaagtggtgggattacaggggtgagccaccgcacccggcaagtttttgtatttttaataattaaggatgtggttaagtcaacataaggcagagaaaaatattctgataagatatagaatgtcttcaggcattttatactgaagccaaataaaaatgtattttacaatctcttatttatagcagacaaaaaatccaataacattgtgtcattttaataaagagagaaaaatcaaattttgggtttgcatcagtattatatttgatactattgttaaaaatcttataagaaatcttttaaaaattagccagcattgatgatgaaaaaatgtttttcatgaatcttttataatttttacattttattcattttttacacatttttaggatgattagtcattttctattaagatagcactatagttttttaaaaaaacgtcttgtatatcttgtttacaaagttgccttatgtcatgatttttcctaagaaaatca

SEQ ID NO: 701955 - DNA, 760 bp, Homo sapiens
ttcctctgtgcagaatttctcctgtttcagtatttgtctggctacttttaaagtttttttttttctttttgatgctggctttcaccaatttgtttatggtatgctttagtttggttttctttctttctgctacttgatgttaattgtactttgtgtatctgcatttrtaattgttatcaaattcaaaaagatgtaagtaattatttcttcatataattttctgaaccccacacttcgagtattcttctgagacctcaattgctgatatgttaaggcaagtgacatagtcccacagttcaataaggctcatggttggtttttctttttcatattctttctcctatgtgctttattttggataaggtctttcatatgtcttcagtttcaaggattttttttcttctgaagtgtccaatgtgcttttaataccatccagcatatatttcatttcatttattgtatgtttcatctctagacattctagttagaatgttgcatatagtctccagacagaaaaccctaattggtgaattcctagctcctggtattctgctcagtttctctgggcagttccttcaacttacagaaccctgtagtacatatctcatctacttctgcatcctccaaactgagtctgagctttcagaattggttgaatcccagagaagtttttgtctttcatctgttgggctgtacccaactctctttccccagtgttcttttcctgccagccataaggtagataacagatattcatttt

SEQ ID NO: 701956 - DNA, 760 bp, Homo sapiens
ttcctctgtgcagaatttctcctgtttcagtatttgtctggctacttttaaagtttttttttttctttttgatgctggctttcaccaatttgtttatggtatgctttagtttggttttctttctttctgctacttgatgttaattgtactttgtgtatctgcatttgtaattgttatcaaattcaaaaagatgtaagtaattatttcttcatataattttctgaaccccacacttcgagtattcttctgagacctcaattgctgatatgttaaggcaagtgacatagtcccacagttcartaaggctcatggttggtttttctttttcatattctttctcctatgtgctttattttggataaggtctttcatatgtcttcagtttcaaggattttttttcttctgaagtgtccaatgtgcttttaataccatccagcatatatttcatttcatttattgtatgtttcatctctagacattctagttagaatgttgcatatagtctccagacagaaaaccctaattggtgaattcctagctcctggtattctgctcagtttctctgggcagttccttcaacttacagaaccctgtagtacatatctcatctacttctgcatcctccaaactgagtctgagctttcagaattggttgaatcccagagaagtttttgtctttcatctgttgggctgtacccaactctctttccccagtgttcttttcctgccagccataaggtagataacagatattcatttt

SEQ ID NO: 701957 - DNA, 760 bp, Homo sapiens
ttcctctgtgcagaatttctcctgtttcagtatttgtctggctacttttaaagtttttttttttctttttgatgctggctttcaccaatttgtttatggtatgctttagtttggttttctttctttctgctacttgatgttaattgtactttgtgtatctgcatttgtaattgttatcaaattcaaaaagatgtaagtaattatttcttcatataattttctgaaccccacacttcgagtattcttctgagacctcaattgctgatatgttaaggcaagtgacatagtcccacagttcaataaggctcatggttggtttttctttttcatattctttctcctatgtgctttattttggataaggtctttcatatgtcttcagtttcaaggattttttttcttctgaagtgtccaatgtgcttttaataccatccagcatatatttcrtttcatttattgtatgtttcatctctagacattctagttagaatgttgcatatagtctccagacagaaaaccctaattggtgaattcctagctcctggtattctgctcagtttctctgggcagttccttcaacttacagaaccctgtagtacatatctcatctacttctgcatcctccaaactgagtctgagctttcagaattggttgaatcccagagaagtttttgtctttcatctgttgggctgtacccaactctctttccccagtgttcttttcctgccagccataaggtagataacagatattcatttt

SEQ ID NO: 701958 - DNA, 664 bp, Homo sapiens
tatcttcttccccaataacaaaatgattctaaacctcacatatattttgtataattatttgaaaaattgcagctaaagttatagaactttatgtttaaataagaatcatttgctttgagtttttatattccttacacaaaaagaaaatacatatgcagtctagtcagacaaaataaagttttgaagtgctactataataagtttttcacgagaacaaactttgtaaatcttccataagcaaaatgacagctagtgcttgggatcgtacatgttaattttytgaaagataattctaagtgaaatttaaaataaataaatttttaatgacctgggtcttaaggatttaggaaaaatatgcatgctttaattgcatttccaaagtagcatcttgctagacctagttgagtcaggataacagagagataccacatggcaagaaaaacaaagtgacaattgtagagtcctcaattgtgtttacattaatagtggtgtttttacctatgaaattattctggatctaataggacattttacaaaatggcaagtatggaaaaccatggattctgaaagttaaaaatttagttgttctccccaatgtgtattttaatttggatggcagtctcatgcagattttttaaaagattctttaataacatgatttgtt

SEQ ID NO: 701959 - DNA, 628 bp, Homo sapiens
cctaagacctgagccgtcagagtagaaaagggagtatattagcaggctttgtgggggtgaaggagggactctttaaacacaagatgattttctccataatgttacatttacatttatttaaaacttaaacttttaattttaagatagttatacattcaaatacagtttgtaagaaataatacatagaaagattgtgtgttctttactagttttcccaatggtaaaatcttgtaaaactaattacattaccacaagctgaatacttgtcattgacacaggcaagayacagcacatttccaccacaaggatcactcctgttcccttttatagccacactcacttatatccctcactctctctccctaatcccagacaaccactactccatctccaatatttttcatgtcaaaaatattacgtgaatggaggtatgtggtatgtaacctttggggactggcttttttcatgcaggagaattccctggagattcatccaagtcgttgcatgtgtcaacagctctttctttttaactgagtgccagattccatgatatggatgtgccacagtttgtttaaccattcacacattgaggggcacctgggttgctttcagcctttggctatgatga

SEQ ID NO: 701960 - DNA, 1034 bp, Homo sapiens
cctggaatagaagacatgagctggcagaattgctaagcagggttctctttcaacagagtggtagagtgtactcgggatgtgcatggattctggagcccacaatttgggttcaggtccctggttttttcacttccttattgcctggccttgagcaagtgacaagacctcttagtgcctcattttccatatctggaaaataggaataatatagggttgttataaagaataaatgagttaatcttataggagtattataagcactaaataagttaatcttataggagtattgtaagcactaaataagttaatcttataggagtgttataagaattaaatgaattaatcctgcagagctgttataaggtttagctgagttaacatgctaagaacaaggacagtgcttggaacatggtaaagcagcctacgtatcagctattagtatttagagtgtcataatgtattaaaatatggaatatttattatttgctgatttttttgttttgcctctaatatttgacaaactgtttccgttaaggattatttagtggtaagatggtagttcttttctccagttggtccttccagtaaacaytaatgtctctttagagatctgtccatttgtgaagcctaagaaatgagggaagaaggcacagccagtacatttatttccaaaaagaatttgggctggggcaggggtgtgctatgtaaatcttacttttgcaaaaaaaattttatgatggaacgcctcccaggttcaagtgattctcctgcctcagcctcccgagtagctgggactacaggcgtgtgccaccacaggcacgcgccaccacgcccggctaatttttgtatttttagtagagatggggtttcaccatattggtcaggctgatcttgaactcctgacctcgtggtctgcccgacttgtgatcaaggcctttgcgatcctcccaaagtgttgggattacaggcgtgagccaccgcgccctgccatcttctgtcttttttacagtcagggtagttgaaatgaagcacaa

SEQ ID NO: 701961 - DNA, 1729 bp, Homo sapiens
  misc_feature 1046, 1047, 1055, 1056, 1393: n = A,T,C or G
gaattctgaatgttcccaacacgaagaaatgataaatgtttgaggtgacagctatgtccattactctgattttatcagtctacattgtacacacatatcaaaatatctcatgtacaattatgtgtcaattaaaaacattaaaaaatgaatactactattttaacaaaggttctcactaaaacttttccccagtggtcctgaaaaattataccttgctcttaaaagatgacactatcttaaaacttcagttccgagaaaaacttaaaaagaagaaaaatatgccatggagatacaattttaaagtagtaacactcatatttaaaagaagctcattaatctactaaacaatgcactgtctattgattcttctctcttaactggtggttcctgtggagttatgctctgtggctgttgttgaacatattcatcccatacatttttattttctctccacggcatatacccttagaaagtaagcaaacaaaaatagtatataagctataaatgtaggccacaaacataattctaaattttctagaagctacattaaagcaagtaaaagaaacaggtaacatttattttaaaaatatattttaactcaacatacaaaaatactataatttcaacatgtactcaatataaaatattaataattttatgcttttatgatttcttatactaagtcttcaaaatctgctgtgcattttaccccgacagcacattcaacttggattagccacctttcaaaccctgaatagccacgaagggccagtagctgccatattggacaatgcagttctatagagtagttttaagggtataatgagaattagaaaatcaggatgttttggctgggtgcggtggctcacacctgtaatcccagcaccttcgggaggtcgaagcggacagatcaacctcaggtgaggagtttgagaccagcctggccttatgtggaaaaaccttgtctgtactaaaaatgcgggccttagcctggcatggtggcaggcgcctgtaatcccmggtaacaagaaggccgaggcaggagnnttgcttgnncccgccaggcaaaaaaagcagtgagccaagactgcaccactacactccagcctgggtggcagagcaaggctctgtctcaaaaaaagaatgtttctcactcccaatcaccaaaccattggtcaaggggaaaagttagaacaagtggtaattctgcactgtttaagtattgttttagcataaaagtctccttaaactagaatttaaatagcagcctacattgtaaaaagtggacactcttattgggaagtagaggacatatatcagcatcccaaagtatgtagtttgaaaaaggaatattcaatattacagtgaaattttgtatttggaaaaaaagccnatatagatatatatacacacaattgtcaatatctaaataatgaccatcagcaaaatctcagccagtatgggcacccagtgtaaccacacagagggaagcagtgggagaaaatgtgggagaacactattaggtgacttgaagttctgaagatcagtgataaaactggagcccagatcatttaatttcctcctttccaccttccctgtcttacttgattgaggtctgtcctcagatgtctcctcccctgaaaggttttctgcaaccacttatctaaaatatatccaccagcccccgacctccgtcactccatcccattactatggttatttttcttca

SEQ ID NO: 701962 - DNA, 1067 bp, Homo sapiens
tcctccagcttctggaggctcagcacagccttaggcagcctggctatgccaggcccttcccacgtgggggtgtggggcgggctgagcacttgtgggcaggtttttcccccatgcgtcctgcctcttaggaaactcctcacaggtgagttaagaaaggctgagcctttcttaggaggtgggaaattctggaatgtcgaacaactcaagatccctttgggctcctgggaagacagactcttgggaggagagtccaggggaaccagcgacagagctaggatcccagacacattccctgaacacacggtccacacggagcctcagcagagcacgctgaccacggaagaaagtccaaagggttgtctctatatattcctccaagtagaacctggcttgcttactgtctgcaaaacaactcaagggtggtgacattcaaagttgtctgaggactagaaggttagagaagcacccagatcagacagaacagagcctggaaagcccttggaggaacacagtccatgaggattctggcaggaagggcttggggcagtctgagtggcagactccaaaaggggcagaacaggaccaggacacagctgggggttcaaaactggccccatctctgctaattagctgtgtgatcttgggcaagttgcgtaacctctccaggacctaaattctttgaggaaaaacagtaagtcccacttcttggaggttagagatgctaactgtgaaacctccctaggatgcataaaacactaggggcccaggagcttggggcccagggagtcggccgccctccccgcatccttcccctgaagcccacctgcagtgctgcccagggctcgccaccagctctcagcctgctcttcggacggtgctgcaaacaggatctctgccccactggtcagcctggcacccacagtcacaggtcaaactccactgtccctttggggacccccacgcctccagcccccgctgagccaggtggctgctgggggygatgccggagtccatgtctctccgctcaccttaaggagaatgtgtgtttcctgccgtggcggccccgc

SEQ ID NO: 701963 - DNA, 997 bp, Homo sapiens
gcattctcccaaatattttcrtttatataaaaagataagtctcaccctaaatcaatgttaaacttatagaaagaacaggtagtcacagttagaatgtgattttaggggctaggaaatcaaccccagacttcagcaaatcaatgttccaccactgaagtgtgctaatatttagtatgaaaccgcttacggatttcagatcttttcctgaaagcaaactttaatatagcagaagtcatctggatttgggctggagatggggagaatgagaggaggcaagtactataaggggtggagtgtaggggtaggagagagtaaagaaaggcattaattaaatgtcagaagtgaatttattcattttgtagttttatctaaactgaaaactgatccttgcttgaatggcttgatagagaatgcctctctcatggggcaaggataaagctataattataaaacttcaagcttaaaataatgggactcaatgtttggggcatctttttaactcagctaatctaaggatatgagaaaatactgttcctatttaaggagcaaaaattggtagatatgtgtttgggagaatttttagatttgccagcatttgtgtttcagaacactaaacagcctcatggcaagcctgaatttctgaatataatgaagcagagactgttttgtcttgagtagatccagttcgtgaagtctcaggggaacagcatgcttcatgcctgccagcagatgagcttcaaagtgccttaaggaagcactttgaccagaaggtagataactcttattatagaagaagaaggagtgtgtaatcatctcctactggtaagaatagttattgcttttgcaaacactgtaaatgtgcaatctagaagctagaaataagtacgcagttagaaggcagtcttttttttcatatgtagtgaagctactacactttctgcagtggcaaatcttagcagagattgtaaatctaagcagagaggtatccaggattgtg

SEQ ID NO: 701964 - DNA, 747 bp, Homo sapiens
atagcaatgataaaagagaaaggaaggaagaattaggaatattgtgttattaatatatcttctacctgtgaagtggtatagtgtcatttgaaaatgtacttggattagttgtaaaaatatattgcgaactctaggactaatgttttaaaactttaaaaaagtataattgatatgctaaggraggagagaaaatgaaattatataaagtgctcaattaaaacacaaaaagtagaaaactatgcacaacaaaaataactaagagcaaggacggcaaagaaaaatcattaacagagatggtacatattaattgctatatcaatagtcatcttaactgtcaatggtctaaaacacaccaattaaaatacagagactgtcatagtaaatcaaaaaacaagacccagctgtctacaagaagctcattttaaatttgaagactcatagagataaaaattaaggggatggaaaagatactgaggtaaattataaagggtggtcatagcctcccttaaaggagaacaaacttgctaaatagatggagagaataaactacccgacagtgcacaaaccacatcatgggctcagggttagaacatcctgcagcaaggaggtagaaaaatagaagggagaattcccaaattcacacaagcacagaaacccatgattagtgtccttggactgacctatattcactataatagtaaaagaaaaacacccctgggtggagatttaagatgctaatgatacatg

SEQ ID NO: 701965 - DNA, 747 bp, Homo sapiens
atagcaatgataaaagagaaaggaaggaagaattaggaatattgtgttattaatatatcttctacctgtgaagtggtatagtgtcatttgaaaatgtacttggattagttgtaaaaatatattgcgaactctaggactaatgttttaaaactttaaaaaagtataattgatatgctaaggaaggagagaaaatgaaattatataaagtgctcaattaaaacacaaaaagtagaaaactatgcrcaacaaaaataactaagagcaaggacggcaaagaaaaatcattaacagagatggtacatattaattgctatatcaatagtcatcttaactgtcaatggtctaaaacacaccaattaaaatacagagactgtcatagtaaatcaaaaaacaagacccagctgtctacaagaagctcattttaaatttgaagactcatagagataaaaattaaggggatggaaaagatactgaggtaaattataaagggtggtcatagcctcccttaaaggagaacaaacttgctaaatagatggagagaataaactacccgacagtgcacaaaccacatcatgggctcagggttagaacatcctgcagcaaggaggtagaaaaatagaagggagaattcccaaattcacacaagcacagaaacccatgattagtgtccttggactgacctatattcactataatagtaaaagaaaaacacccctgggtggagatttaagatgctaatgatacatg

SEQ ID NO: 701966 - DNA, 747 bp, Homo sapiens
atagcaatgataaaagagaaaggaaggaagaattaggaatattgtgttattaatatatcttctacctgtgaagtggtatagtgtcatttgaaaatgtacttggattagttgtaaaaatatattgcgaactctaggactaatgttttaaaactttaaaaaagtataattgatatgctaaggaaggagagaaaatgaaattatataaagtgctcaattaaaacacaaaaagtagaaaactatgcacracaaaaataactaagagcaaggacggcaaagaaaaatcattaacagagatggtacatattaattgctatatcaatagtcatcttaactgtcaatggtctaaaacacaccaattaaaatacagagactgtcatagtaaatcaaaaaacaagacccagctgtctacaagaagctcattttaaatttgaagactcatagagataaaaattaaggggatggaaaagatactgaggtaaattataaagggtggtcatagcctcccttaaaggagaacaaacttgctaaatagatggagagaataaactacccgacagtgcacaaaccacatcatgggctcagggttagaacatcctgcagcaaggaggtagaaaaatagaagggagaattcccaaattcacacaagcacagaaacccatgattagtgtccttggactgacctatattcactataatagtaaaagaaaaacacccctgggtggagatttaagatgctaatgatacatg

SEQ ID NO: 701967 - DNA, 747 bp, Homo sapiens
atagcaatgataaaagagaaaggaaggaagaattaggaatattgtgttattaatatatcttctacctgtgaagtggtatagtgtcatttgaaaatgtacttggattagttgtaaaaatatattgcgaactctaggactaatgttttaaaactttaaaaaagtataattgatatgctaaggaaggagagaaaatgaaattatataaagtgctcaattaaaacacaaaaagtagaaaactatgcacaacaaaaataactaagagcaaggacggcaaagaaaaatcattaacasagatggtacatattaattgctatatcaatagtcatcttaactgtcaatggtctaaaacacaccaattaaaatacagagactgtcatagtaaatcaaaaaacaagacccagctgtctacaagaagctcattttaaatttgaagactcatagagataaaaattaaggggatggaaaagatactgaggtaaattataaagggtggtcatagcctcccttaaaggagaacaaacttgctaaatagatggagagaataaactacccgacagtgcacaaaccacatcatgggctcagggttagaacatcctgcagcaaggaggtagaaaaatagaagggagaattcccaaattcacacaagcacagaaacccatgattagtgtccttggactgacctatattcactataatagtaaaagaaaaacacccctgggtggagatttaagatgctaatgatacatg

SEQ ID NO: 701968 - DNA, 747 bp, Homo sapiens
atagcaatgataaaagagaaaggaaggaagaattaggaatattgtgttattaatatatcttctacctgtgaagtggtatagtgtcatttgaaaatgtacttggattagttgtaaaaatatattgcgaactctaggactaatgttttaaaactttaaaaaagtataattgatatgctaaggaaggagagaaaatgaaattatataaagtgctcaattaaaacacaaaaagtagaaaactatgcacaacaaaaataactaagagcaaggacggcaaagaaaaatcattaacagagatggtacatattaattgctatatcaatartcatcttaactgtcaatggtctaaaacacaccaattaaaatacagagactgtcatagtaaatcaaaaaacaagacccagctgtctacaagaagctcattttaaatttgaagactcatagagataaaaattaaggggatggaaaagatactgaggtaaattataaagggtggtcatagcctcccttaaaggagaacaaacttgctaaatagatggagagaataaactacccgacagtgcacaaaccacatcatgggctcagggttagaacatcctgcagcaaggaggtagaaaaatagaagggagaattcccaaattcacacaagcacagaaacccatgattagtgtccttggactgacctatattcactataatagtaaaagaaaaacacccctgggtggagatttaagatgctaatgatacatg

SEQ ID NO: 701969 - DNA, 1945 bp, Homo sapiens
cattttacactcccaatagagtacaaggattccaatttctccacatctttgctaacacttgttatctttttgttgttgttttgacaaccagtggggagtgatatctcattatggttttgattggcatttctccgattagtgacattgagcattttttcatatgtgtgttggctactcagatattcttttagagaaatgtcaatccaagtactgtacaccttttaaaaatctgggtatttgtttcwggcgattcagttgtagggtttccttatatatgttggatattaacaccttattagataaatagtttgcaagtattttctcctattttataggttgccttttcaatctgttaactgtttcctttgctgtcataaagcttgaaccctttctgggtttaccctacagatatcttgtcattatgaatcttcttaaatgatttcatttttatatgtacaataaaaatcaatgagaattgttaaaaacaaaaacctcagagagataggattttactccacagagaacaaagtggagctcatatcaacctgggattaataaaaggaaaactcttttcactcagataaaactctcaggcaaggcatttggaaatatttttgatgcattcattgtctttgaacaatttaagagtatatttatatcacatgttcttacctacaagtggaagctaaacattaggtacatatgtacacaaagatgagaacaatagattctagagaatctgaaggacagaaaagagggaaggggcaaagggtgaaaaactacctatcaggtactatgttcactatttgggtgatgggttcagttgaagaccaaacctcagcatcacgcaatacatccttgtagcaaacctgcacatgtacccccgctccaaatctacaataaaaatagaaatctttggcaaaaaagagtgtatctacagctcttaagggctatgtttatatatctctattgtcttttgctttatattttgtttatattttgacaatttgtgaaataagtacatcttttaatgctctttatatagttctaatgtaacaacatagctacacaccgttctcataaaaacaaggacaggacatttagaggtagcaataatgaacaaaggtaacatttcaatggaaactgagctaaatgactaaaaacaatacaaatgatatgtaaaggattacaaggttgataggatattgtgttcaagccctagataaatccaaacaactaatctttgagagagaagtacgtagtatggaagcatgtaactgtaattattttgagaaatgctaaacctcaaaataaaaaatgtgtttttttgcacttgtcataattgaaagtttgtttttcctctctttttggtaacattctatcactctcgcctgcaaccaaaatgaccctcaccctggcagccagcactgggattccatcctcatcgagctccttgacacgaaggtcagcttcaccgtgggcaagcataatcatcatttgcagacaaaaggagaacccagttatttgatcttgattatcagatgtgacaattatctctcaaatattacagattttatgtcataaattgctctggggcactgcaacctagcaagtcctcctgagaggcccatctagcctgctgcccaggccacaaccaaccttgccactagccttttcatcaatacaaaggacaactatttgtaattgtcctccaattgaaagaacatgtctgaagttgtcaattgtgtttatatattttaggtaggtaggtaaagaaaagttcttgttgttggtgaatcacagacaattgttcaatttagaggagaaggcagcctgggtagtggagaggaggacattgttttcattgttgtgtacccagggcccagcatagagatgggaaaatagttggcatcagataaactactattgaattcaattatcatga

SEQ ID NO: 701970 - DNA, 2767 bp, Homo sapiens
acagttttggagactggaagtccaagatcaaggaatcagcacatttggtctcttctgaggcctctctccttcccttgccaatggccaccttcttactgtgtcctcacatgattgtcccgtggtctgtgtgtggtctctgtccacatctccttgtcttacaaggaaatcagtcttactgattagggcccacccatataacctaattttacctcaattacctctttataggtcctctttccaaatacagccccattctgaggtactagaggtgaggacttcaacataaatttgaggcaacacaattctgtccatgacaattgtccaccttagttttatggtgaaccaaggctgtgaaaaagacttgacttggggccgggcatggtggctcacgcctgtaatccctacactttaggaggccaaggtgggtgcataacccaaggtcaggagttcaagaccagcctggccaacatgatgaaaccccatctctactaaaaatacaaaaagaatgagctgggcttggtggcgggtgcctgtaatcccagctactcaggtggctgagatgggagaattgcttgaacccgggaagtgaaggttgcagtgagccgagactgcaccactgcactcaagcctggacaacaagagcgaaattctgcctaaaaaaaaaaaaaaaaaaaaaagacttgagtgaaggcagtgacctaagtgtgaagcgataacagctggcaactgttccgcaagaaggtgcaaagcccctgcaggcctgggaaggtgcagagcctgcacctcagatttgactcctctcatagaatcatggaatttaagtgaacctcttccagtattagggaatcttgaatggaaactctaatatcttaatccccagtgtaacaaacttttactacattgttctcatgatgacaaatgtctcatcagaaaatggcttaaaatataattattatgaaagcagactggcttatttaaaacaaacataatctgaaaactgtaatccaaaaagtaaacatccatatatatatatattcattcattctctttgctttgaaactttcactgaatgacctttgtccgttttatcggtcaccatattttagtggtgctgtgcagtgacttttgtagagtaatatctctcaaagtgtgcaatgatcaatattgtgttgtcaaaagattctgtagtcaaagaagtttggaaaactttaattttttgattaagcaaagcaagaagtctgagtttcatttattggtttactatgaaaagtgttagaggctttatgatgtgcaagaaggacatgtgtcataatatttctcaaacctatttgacttccaatacttgcttttttgttttttcttcttttgttggagaaatttcaaaaactttggaaaatactttttaagtgagattcaggagtttgataagcaagatgacaaatactaaaaatatacactccaaatatagacacgatgaatactaaataaactcactgtttttagtcaacattattcaaggatatccaaagtttttcacggcataaaatgctctttttcttttcagtaatatgatacatgtgatattcctggaaacttaaaaaaaatcatcatttatrtgctctcttgtcagtttcatgctgtatttttgatgtagaagaaagaatttggtatcttctcaggaatacattgtcacataaaaatatgtaaactccttcagataaattctcaccttctgcagaatgagtcaaacagcagggggagaagctgaatctagtgttcacagtgggtgacctgtcttcctcaacactgtcatctcatccattgtcttggatgctcaagaaacggaactatataaatgtggcttctggccttcatatattacagtgccaaagcttcaaagaaccagtttttatttaatacttactttgtttctttgcattttttttcaaaaatacaatatgttgttattaactatagtgaccatgttgtgcggtagatctcttcttgaatatttcccctctcctaaatgaaattttgaatcctttgataaacatccccactccccaccccaagtccagctcctggtaaccaccagtctactctctacttctatgagtttagctttttcagattcgacataaaagtgaaatcatatggtctttctgtgcctggcttgtttcatttaacataatgtcctccaggttcatccatgttgtcacaaataacaagatttcattattttttatggctgaatagtatttcattgtgtatatatactactttttaaaattcattcatccattgatggacacttacattgtttccacatcttgggctaatatataaataagatttaatgtatatggtgttgcagatatctcttcgacatacggatttcatttcctttggatatatacccagtagtgggattgctggttcatatggtagttcatttttaatttttgaaggaacctccatgctattttccatgatgcctttccttcaaatcttctccaacacttgttatattttgtcgttttataataaccatcctaacacgtatggggtgatatctcaaagtgtttttaatttgcctttctctaatgattagtaatattgagcattttttatatgcctgttggcctgtatgtcttcttttgaaaaatgtctatttggatcatttgtccatttcttattgagttatttttggttgtctcttcactctgctagcacctattttgtataagacaataatgctcttacattt

SEQ ID NO: 701971 - DNA, 2523 bp, Homo sapiens
ttatccaaacttgccttaccaagagtttaccattgtttaccttataaacaatggcccttagcaaccacactctttgcaacaatgtcctaacaatattactattagcaaaaatcccctaagaccagcattcttgacaacagccctcttggcccttagaagcaatgactttagcaaccaacgttgagccataaaaataaagccttggtaataatgctcttagcattgaccttagtaaaatggtcttagcaacagtctttagcaagagtgactctagaaatgtccccttcccaacaatgccctttgaagaaaatacctgtaacaacaatgcctttagtcacaatgccttcagcaaaaatgtcccttgccaacattaacaccctaggaacaatgatctgagaaacagtgtccttaacaataatatacaaaaacattctaagcaatagtaccctaagcaacaatatacttagcagtaataccctcagtaacaatactcttagcaacacgagatttaggatcagtgctggtagaaacagcatcatgagaaacactagcaatagtaataatgcctttagccacaatgaccttcaacagttctcttatgaacatcacccataactacaatggctccaggaacaatgcacttagaaataacttccttagcaacagtgaccttactatcgatgccaattgaaatatcatccttaggcacgtgttccatggaagcaacatcattagtaaccacagcttttgtaacaatgacttttagcaaaaacattagcatagtgccttaacaaaggcccttagaaacaatgcaactacaggccgggcaaggtggctcatgcctgtaatcccaagcacattgggaggctgaggtgggtggatcacttgaggtcaggagtttgagaccagcctggccaacatgatgaaaccccatctctaccaaaaatacaagaattagctgggcatggtagtgcacgcctgtaatcccagctactcgggaggctgaggcaggagaatcacttgaacccgggaggcggaggttgcagtgagctgagatcatgccaccacactccagcctgggcaacagagggagaatccatctaaaaaaaaaaaaataaaaaaaataagaaaagaaaagaaaaaagaaacaatgcaattatcatcaattcccttagcaacggatcctttagaatataatgctcttaacaacagcactcttagcaacaacatccttgacaacagtgtacttagcaacagtgcctttagctaaaatggcctttagtaaaatcaactttagcaacaatgcccttataaaagatgccccttgtaacagtgtccttagccagaatctctttaggaacaatgcctttaccaaaatgcatttaagttcaacggccttagcaacactgtccttggcaatattagatcttagtggcaatgctctcagcagcagtggtactcagcaatgatttctcttacaacacccttaacaacaatacccataacagcagcacactttaaaaaacaggcttagcaacaatgtccttaacatcaatgccttttggaacatcaaccttagcgacaactgcacttactaagagtgcctttagcatcagtccccttagcaataccaccattcaaaccaataccccttagccaaaatgattctaataacggcacactttattttctttttgacagagtttccttcttgttgcccaggctggagtgcaatggcatgatctcggctcactgtaacctccgcctcccaggtttaagccattctcctgcctcagcctcccaagaagctgggattacaggtgtgcaccactaagcccagctgattttgtaattttagtagagatggggtttcaccatgttggttggtcaggctggtctcaaactcctgacctcaagtgatccaccggcctcggccttccaaagtgctgggattacaggcgtgagccagcgtgcccggccaacagcacactttcaaacaacaccttaacatcaacatccttaactctctttgcaacaatacccttaggattaagtccctgagcaatagagtcattaacagcagtgtatttagtagcaatgcytctttactgtaatacacttaacaataatgaacatagtaacaatgcccttagccataaaggactttacaacaacaaccttagcaacgacactcacagtgacagtgtccttcaaatgagtttcttagaaacagtggtcttaggatcaacattttagcatgaatgctctttgcaacaattattctaggaaaagtgcttctagcaactagccctttagcaacaacacactgaacaagaatgctctagcaaaaatgtacttaataacaacatccttagcaaaaatacccttagcaaaaatgagtcttagtaacagagccttaatgtcaatgtccttagctacaatgcccctaatatcattgtcagagtgacaatatccttagcaacaataggccacatcaacaaaacacctagcagcaagttcctc

SEQ ID NO: 701972 - DNA, 2523 bp, Homo sapiens
ttatccaaacttgccttaccaagagtttaccattgtttaccttataaacaatggcccttagcaaccacactctttgcaacaatgtcctaacaatattactattagcaaaaatcccctaagaccagcattcttgacaacagccctcttggcccttagaagcaatgactttagcaaccaacgttgagccataaaaataaagccttggtaataatgctcttagcattgaccttagtaaaatggtcttagcaacagtctttagcaagagtgactctagaaatgtccccttcccaacaatgccctttgaagaaaatacctgtaacaacaatgcctttagtcacaatgccttcagcaaaaatgtcccttgccaacattaacaccctaggaacaatgatctgagaaacagtgtccttaacaataatatacaaaaacattctaagcaatagtaccctaagcaacaatatacttagcagtaataccctcagtaacaatactcttagcaacacgagatttaggatcagtgctggtagaaacagcatcatgagaaacactagcaatagtaataatgcctttagccacaatgaccttcaacagttctcttatgaacatcacccataactacaatggctccaggaacaatgcacttagaaataacttccttagcaacagtgaccttactatcgatgccaattgaaatatcatccttaggcacgtgttccatggaagcaacatcattagtaaccacagcttttgtaacaatgacttttagcaaaaacattagcatagtgccttaacaaaggcccttagaaacaatgcaactacaggccgggcaaggtggctcatgcctgtaatcccaagcacattgggaggctgaggtgggtggatcacttgaggtcaggagtttgagaccagcctggccaacatgatgaaaccccatctctaccaaaaatacaagaattagctgggcatggtagtgcacgcctgtaatcccagctactcgggaggctgaggcaggagaatcacttgaacccgggaggcggaggttgcagtgagctgagatcatgccaccacactccagcctgggcaacagagggagaatccatctaaaaaaaaaaaaataaaaaaaataagaaaagaaaagaaaaaagaaacaatgcaattatcatcaattcccttagcaacggatcctttagaatataatgctcttaacaacagcactcttagcaacaacatccttgacaacagtgtacttagcaacagtgcctttagctaaaatggcctttagtaaaatcaactttagcaacaatgcccttataaaagatgccccttgtaacagtgtccttagccagaatctctttaggaacaatgcctttaccaaaatgcatttaagttcaacggccttagcaacactgtccttggcaatattagatcttagtggcaatgctctcagcagcagtggtactcagcaatgatttctcttacaacacccttaacaacaatacccataacagcagcacactttaaaaaacaggcttagcaacaatgtccttaacatcaatgccttttggaacatcaaccttagcgacaactgcacttactaagagtgcctttagcatcagtccccttagcaataccaccattcaaaccaataccccttagccaaaatgattctaataacggcacactttattttctttttgacagagtttccttcttgttgcccaggctggagtgcaatggcatgatctcggctcactgtaacctccgcctcccaggtttaagccattctcctgcctcagcctcccaagaagctgggattacaggtgtgcaccactaagcccagctgattttgtaattttagtagagatggggtttcaccatgttggttggtcaggctggtctcaaactcctgacctcaagtgatccaccggcctcggccttccaaagtgctgggattacaggcgtgagccagcgtgcccggccaacagcacactttcaaacaacaccttaacatcaacatccttaactctctttgcaacaatacccttaggattaagtccctgagcaatagagtcattaacagcagtgtatttagtagcaatgcttctttactgtaatacacttaacaataatgaacatagtaacaatgcccttagccataaaggaytttacaacaacaaccttagcaacgacactcacagtgacagtgtccttcaaatgagtttcttagaaacagtggtcttaggatcaacattttagcatgaatgctctttgcaacaattattctaggaaaagtgcttctagcaactagccctttagcaacaacacactgaacaagaatgctctagcaaaaatgtacttaataacaacatccttagcaaaaatacccttagcaaaaatgagtcttagtaacagagccttaatgtcaatgtccttagctacaatgcccctaatatcattgtcagagtgacaatatccttagcaacaataggccacatcaacaaaacacctagcagcaagttcctc

SEQ ID NO: 701973 - DNA, 591 bp, Homo sapiens
gtcccaactctggcttgctccttgccaccgcaccagccttttatagtcctaagagctaaatattccatacatggtcctgttggaatcccctttgggaaccatcattcactgctaggtggttccctgggcttgtcattacaaaacgttgtttaatgtacatttctaggaataaacacactgacttattccatatgacacaactatttcagaaacaatagagatctcttcctgaaattgatataacaattgacccaaatttatactctgtaatttccttctgatgctttccagacactggacaaaacttaygttaaaaagatctttagttttttggactgtgaacccattgatgggtttatgattgaacacttccaaaattaaacagggtgattgaccttgtgagcatattttcaaaattgagggattaactcttaagttaaaacttctcaaattctagccagagcatattttttgtcctgttctttcaccatcagcctttgccaataccctgaacttcaataatttatgcagatcacctgatgttgaaagttaaataatatttacatgtcttttttcttgagctaaacagtt

SEQ ID NO: 701974 - DNA, 591 bp, Homo sapiens
gtcccaactctggcttgctccttgccaccgcaccagccttttatagtcctaagagctaaatattccatacatggtcctgttggaatcccctttgggaaccatcattcactgctaggtggttccctgggcttgtcattacaaaacgttgtttaatgtacatttctaggaataaacacactgacttattccatatgacacaactatttcagaaacaatagagatctcttcctgaaattgatataacaattgacccaaatttatactctgtaatttccttctgatgctttccagacactggacaaaacttacgttaaaaagatctttagttttttggactgtgaacccattgatgggtttatgattgaacacttccaaaattaaacagggtgattgaccttgtgagcatrttttcaaaattgagggattaactcttaagttaaaacttctcaaattctagccagagcatattttttgtcctgttctttcaccatcagcctttgccaataccctgaacttcaataatttatgcagatcacctgatgttgaaagttaaataatatttacatgtcttttttcttgagctaaacagtt

SEQ ID NO: 701975 - DNA, 641 bp, Homo sapiens
tttttctattacataatttatataaaactttttaagaatattattgatacttgtaccttgcaacattgggtgttcaaataattacatagaatatgattgtttaacttttatatgtgtctagaacagctctaaatttcatcagcatctttagtggaaaaactgcagcacgctttgaattttttctttagattgtgtttttttttaaataaaataatcacgattgattctctaaaagasaatcaggttgagaaactattatgtaagatttttttctgtatgtaaattcacacaaaaacaaaatttttttttgtcatactacatattttgatttttgaaagagagaaaaaaaaaacctacaaagaaggaaaacaattaggaaaaatgagcagttcacaaagagaaaaaactaaatattcaataagtatgtaaaaatatactcaagcacatttgtaatgaggaaaataaatattaaaactacaagaagacatcattacacactcagcaaattgcttgcttttatgcagcctagtgggattgcaactggtaaaatcactttatggagcaatttggccatactcagaagttttgagtgtgctcttagtctacacccaataattctttcacatgtgcatgagaagaca

SEQ ID NO: 701976 - DNA, 692 bp, Homo sapiens
ttttttttcgccgtctcgctctttaggccaggctggagtgcagtggcgctatcccggctcactgcaagctccgcctcctgggttcacgccattctcctgcctcagcatccggagtagctggaactacaggcgcccgccaccacgccmggctaatttttttgtgtttttagtagagactgggtttcaccgtgttagccaggatggtctcgatctcctgacctcgtgatccgcccaccatggcctccaaaagtgctgggattacaggcgtgagccaccgcgcccggccaagaattttttaagaattcagttacatgtgaacataagtttagtacatagtaacagtaaaatagcttttttaacattattactgtttccttatttgtcttatcataaaaactcttgcacatattataaactaaaacagtaaaaagctttataaaaggtaaaacatcttctcaaacttgacttataattttattcttgaaaaattatcactaccaataaggtcatttgtatcagtacagaaaattttcctaattgtatgtttcatttttatacaagtgggagtatgtgacccacattttcagtactctcctttgtaatttaattaacaatatatcttaagtacttcatcctacaataatattgtagagtcctttagagtctatattggtaatcaataatttaattag

SEQ ID NO: 701977 - DNA, 637 bp, Homo sapiens
tctcataattatagtatctattttggctattttcatatatctgatatatccatagtaaaggtatcaagtctgggaaaagattgaaaaaggtctaattactgccatacattattgacctctcactaacttggaaatttggataaagtaactcagttaaaacatatttctctcaataataggtatcacagaattcaaataaattatttgatgtaactgaaaaatattaaaataattttatgactatccttayatatatgctaatattttccccttggccaaactccagcaacatttatcttgtagtctaagttgttcttgatatatagtggattatcaaaatatatttttatcaagtaaataataaatacatataaacaattaattaaaatgtacatttaaaataatgattcacattaattcttcacatattaattatatataaataacaaatcatgggctgtaaattattatgaaaatgtctgttagaataactcaaatatattaaaacaacataataattgcttgaagaatagcaatattttaaccatttcactatagtaatgtctagcctaaaacaaattaaaatacatttttaaaagtaaaattctatatgaaaagtagaaacagaattagttta

SEQ ID NO: 701978 - DNA, 1200 bp, Homo sapiens
taaagatgcaaagatgaaaaagcagtcatttgtggtattaagtttctgattggttaatagatgacttttccacacctaatttaattactactttaagtagatgattatacagagaaaagttacttttatttcagtacgaagaatagaaatgcaaatgtgaggagcgataagattcggcaagaaacataaatttttgccacctagagtgttttcttaggtataacttcccaacatacagttgggtctggaattgaaatgtggcttataatagatatatcattttcagggtcatcaacattcatggaagaaagtgcctcagtagtatttgtgaaatgatcaagttgcatatacagaagaagaataaaggaatatggctagatccatgggaaacttctattattttcctattttctacacctaattcaattgcttcagttttggcccaaccatctcctgaattaactgtatactttctactctgtctttctgcatcttgtcattctcttctctagttcattttccacatgacctctgtattgacatattaaaagtagatcacttttcatatcacaaacctaaataaatctttgtttcctttttattcacagaagaaagcacactcatcctagtacttggtatctttcattgtttggctgaaagttgtattggctgtgattccagatataaccatagaatctgaattaaaattgatttttctcttattctctcataattgtttattaccattttcttatagctcttttaaaatcttaattgtatggccatgcagatgtctgattgttggggaataaatcatgaagggaagaaattcattctaagtaatcaactaatacaggcttttcatataatagatactcaattatttactttttggtttgatttgataaaaattatataactttggatgtttggtacttggtggttctcatacaacaaaatttcaattttaaaaaagtagtctgattttctagaaatatcttatttgccttctctatctgtcccmcagttgtagatttccactattcttcattattctatcataattcaaaggtatgtctttagctttttattttatgtactttattaggtctctgtataaatctggaacatagaaacagaatatttatatcttgtgcttgcaattatgtattactataagcaattaaatgtttattttca

SEQ ID NO: 701979 - DNA, 952 bp, Homo sapiens
ttgcagaacatgttttgttacgtaggtatacatgtgccatggtggtttactacacctatcaacccatcatctaggttttaagctccacatgcattaggtatttgtcttaatgctctccctccccttgctccccacagcctgacaggccccagtatgtgatattaccatccctgtgtccatgtgttcccattggcttaactgatttttattgttgctgtttgttttcgttgttgttttagtctttttctcattgggtttgatcaactctatttgacttgatcaaagccaaaggaagttccaaattatggagaaggcctctgaagtggctaaattcccccaacacacacacacagagggtggtggggtgggggagagaaatggcaaatggccagaaaaaggcaaaaaaaaaaaaaagaggaaacgtttttggtcttaactactaaggggatttacttacataacaaagccacctttttgctagccaggataaactgaaagagcaatggctatactcctgaaatagcagcaatttgtcctggctgaaatatggtaatgatatttaaaaagattttttttaatgtactcaatggttaaaagtcagcttaattaaaagctaaccyccaagatgtatgtatataaatgtatatgcatgtgtttgtatttaaaatgtcttcatgtttttgtttttctcctaggacctgtctttttttgagcaaaagtttttcttcttctctgttgactgaattctgttttcttcatttacttctgctatctctcctttctcttgtatcctctgcagcatgggcgacctaaaatagtttataatagcctgccttccttaaataaaatggagaaggcaccagactcccctaggagaaaaaacctgtttttcttatggaaccccaaaaatgtaaacagacaagttcatctcagatcttaaactgcttacttt

SEQ ID NO: 701980 - DNA, 1375 bp, Homo sapiens
tctgctcccaatatatagggctagatgtagtggttgagaacttaggctctcaagaccaacgtttccagttggaatcttgctttcaaaacgtgagtaacctgaacaacttactgaaaccctatatgtctcagcttcctaatgtgtcatcctagttcctaaagttgttgtattaacttctacttaaagagcttatgacaagctgtgacatacagtaaatgcccagtaattgtcggctattattattttcatcattattaatagatgggggcagttctggtgaccataaacagctctcccttttgtgcatggttccactgtggattagaagcatgtcttatcttattgtgcaccactacagaaatgatctgcatatagaaytgatttctacagaaagtctgtaacctacttatcttcatagcgtatcaagtaacaggatgaatgaaccccaggtgtatattatcagtacaagtttggagaaaaggtttagggtcctttaggataatgaaaatgaaatgtatttattcatcttttatttgaggaagaacttacagacttagttcaaaagttgatgcaaaagtgaggtgagagatcaaatgagataatcagggaatacaaatcagttgattttatactcagattatatctacacaccctcctatttgtcctgtttgtatttctcactgtaaggctactttcaacttgaccttactgttctttgaaaagtcttctggaaacactacaaaagctgacaaatttttccaggctagatttgtagcattctaatgtagcctggaaatgaaattgaactggaaatcatctatgcatacgaaatgaaattgaactggaaatcatctatgcatactaaggccaatgcccgcccattctgaatggatcaccggtggcttatcacaatttctagacgcaatactcaacttaaatagaaaatgattctcagaagctaaaaggctttcagttttcagggtttctttcctttgtcctttacggtcctgaactcaatcaaattgtcagaggactccctcccatcacaaggatgatggaaatggaaatttgggtctatttatttttgaaaagaaagcgccatgggtaggaaaacttcaccactcagcattttatcaacatgcaatacaccaaatcaatcataactttcttgcatgaaatacttttctaaaaataccaaacagcaaataaactttctcctgaggtcaaatccttactgtaattgacactcttagtgacatgctttctgtctatttttccctataaatactttaagtgacattgatgaattagactaagaggaaaccataggatcttttatgctgaaacagagtttattattatagtttactattca

SEQ ID NO: 701981 - DNA, 1375 bp, Homo sapiens
tctgctcccaatatatagggctagatgtagtggttgagaacttaggctctcaagaccaacgtttccagttggaatcttgctttcaaaacgtgagtaacctgaacaacttactgaaaccctatatgtctcagcttcctaatgtgtcatcctagttcctaaagttgttgtattaacttctacttaaagagcttatgacaagctgtgacatacagtaaatgcccagtaattgtcggctattattattttcatcattattaatagatgggggcagttctggtgaccataaacagctctcccttttgtgcatggttccactgtggattagaagcatgtcttatcttattgtgcaccactacagaaatgatctgcatatagaattgatttctacagaaagtctgtaacctacttatcttcatagcgtatcaagtaacakgatgaatgaaccccaggtgtatattatcagtacaagtttggagaaaaggtttagggtcctttaggataatgaaaatgaaatgtatttattcatcttttatttgaggaagaacttacagacttagttcaaaagttgatgcaaaagtgaggtgagagatcaaatgagataatcagggaatacaaatcagttgattttatactcagattatatctacacaccctcctatttgtcctgtttgtatttctcactgtaaggctactttcaacttgaccttactgttctttgaaaagtcttctggaaacactacaaaagctgacaaatttttccaggctagatttgtagcattctaatgtagcctggaaatgaaattgaactggaaatcatctatgcatacgaaatgaaattgaactggaaatcatctatgcatactaaggccaatgcccgcccattctgaatggatcaccggtggcttatcacaatttctagacgcaatactcaacttaaatagaaaatgattctcagaagctaaaaggctttcagttttcagggtttctttcctttgtcctttacggtcctgaactcaatcaaattgtcagaggactccctcccatcacaaggatgatggaaatggaaatttgggtctatttatttttgaaaagaaagcgccatgggtaggaaaacttcaccactcagcattttatcaacatgcaatacaccaaatcaatcataactttcttgcatgaaatacttttctaaaaataccaaacagcaaataaactttctcctgaggtcaaatccttactgtaattgacactcttagtgacatgctttctgtctatttttccctataaatactttaagtgacattgatgaattagactaagaggaaaccataggatcttttatgctgaaacagagtttattattatagtttactattca

SEQ ID NO: 701982 - DNA, 1375 bp, Homo sapiens
tctgctcccaatatatagggctagatgtagtggttgagaacttaggctctcaagaccaacgtttccagttggaatcttgctttcaaaacgtgagtaacctgaacaacttactgaaaccctatatgtctcagcttcctaatgtgtcatcctagttcctaaagttgttgtattaacttctacttaaagagcttatgacaagctgtgacatacagtaaatgcccagtaattgtcggctattattattttcatcattattaatagatgggggcagttctggtgaccataaacagctctcccttttgtgcatggttccactgtggattagaagcatgtcttatcttattgtgcaccactacagaaatgatctgcatatagaattgatttctacagaaagtctgtaacctacttatcttcatagcgtatcaagtaacaggatgaatgaaccccaggtgtatattatcagtacaagtttggagaaaaggtttagggtcctttaggataatgaaaatgaaatgtatttattcatcttttatttgaggaagaacttacagacttagttcaaaagttgatgcaaaagtgaggtgagagatcaaatgagataatcagggaatacaaatcagttgattttatactcagattatatctacacaccctcctatttgtcctgtttgtatttctcactgtaaggctactttcaacttgaccttactgttctttgaaaagtcttctggaaacactacaaaagctgacaaatttttccaggctagatttgtagcattctaatgtagcctggaaatgaaattgaactggaaatcawctatgcatacgaaatgaaattgaactggaaatcatctatgcatactaaggccaatgcccgcccattctgaatggatcaccggtggcttatcacaatttctagacgcaatactcaacttaaatagaaaatgattctcagaagctaaaaggctttcagttttcagggtttctttcctttgtcctttacggtcctgaactcaatcaaattgtcagaggactccctcccatcacaaggatgatggaaatggaaatttgggtctatttatttttgaaaagaaagcgccatgggtaggaaaacttcaccactcagcattttatcaacatgcaatacaccaaatcaatcataactttcttgcatgaaatacttttctaaaaataccaaacagcaaataaactttctcctgaggtcaaatccttactgtaattgacactcttagtgacatgctttctgtctatttttccctataaatactttaagtgacattgatgaattagactaagaggaaaccataggatcttttatgctgaaacagagtttattattatagtttactattca

SEQ ID NO: 701983 - DNA, 625 bp, Homo sapiens
cgtgtcacagatgtgtcctcaaccctcctgaggccgtcttgaaccgtgggaaaatgaactttctaaatgggctgagaactgtctcagagacacttctggtttacaggaagcattctctcctgcaggtatrataatgaaatcacatggaattataaaatgccactttagtaaaggctgaaggaattagggtttgacatgctttaaaaaaaaaaaagaggaacgttctatttatcaatggaccatgaagcccacgcccccttctgcagtgacgatggtcaactgggacgaggagcccctcctgcggatgcagcagaggccgccccctgaccccacttcccagagtccatgcttctgctgctcaggtaacagcaaccctagcttcacagggctcaggcctccaaacacaactcccacccatgctggagaatcaccccggggacgtgcgaaacggggaggtgcaactctcacttcatccccttaaaggggaaaaggcgccttcccactcctcttcctgctggtggggacagaggcaggagccagatggtcaggagttgggcggcaggagggaagcagcctgggtccctgctagtcacagatggcaaatgccaaccagccccgaccttca

SEQ ID NO: 701984 - DNA, 676 bp, Homo sapiens
tatatatttaatatatataaaataaaatgacatttcttccttctgctggaaatacaaatgacaatagcctgactggtggccaatcaataaaacagtcatcatcatggctggttgacaactggtggcagctacagagcacccatccaaagaggccataatttcctatgaggtgagagtagatgagagagtcaaacaattgttaaagtaacattttagacacatacccaagctcctatccatagctaagcagcaagagtaggmcacttgagttcaaaattaaatcataaagggtatatacagtttaggtcgagaaaaataataatcatagaactgaatcacaagatttatggttcacagatcattactgggggttttttgttctaggaagtagagatataagtgggaacgaataaagatatgaccttgaaggttgttttgggtctcttaaactttgtttcattgccaaaaaaaaaaaaaaataaagaaagaaagaaaccatcagctcagggtgttgggattttcctaattgttgctggtttgcagttattactgatgcctccaagactaccagatttctagattcactgaggcttgctatgattcatatttgggaaggaattcaatgagacattgcaagtccagaaaacagaagtggagaaaactcttcctggagctt

SEQ ID NO: 701985 - DNA, 676 bp, Homo sapiens
tatatatttaatatatataaaataaaatgacatttcttccttctgctggaaatacaaatgacaatagcctgactggtggccaatcaataaaacagtcatcatcatggctggttgacaactggtggcagctacagagcacccatccaaagaggccataatttcctatgaggtgagagtagatgagagagtcaaacaattgttaaagtaacattttagacacatacccaagctcctatccatagctaagcagcaagagtaggccacttgagttcaaaattaaatcataaagggtatatayagtttaggtcgagaaaaataataatcatagaactgaatcacaagatttatggttcacagatcattactgggggttttttgttctaggaagtagagatataagtgggaacgaataaagatatgaccttgaaggttgttttgggtctcttaaactttgtttcattgccaaaaaaaaaaaaaaataaagaaagaaagaaaccatcagctcagggtgttgggattttcctaattgttgctggtttgcagttattactgatgcctccaagactaccagatttctagattcactgaggcttgctatgattcatatttgggaaggaattcaatgagacattgcaagtccagaaaacagaagtggagaaaactcttcctggagctt

SEQ ID NO: 701986 - DNA, 638 bp, Homo sapiens
attattcaccttgagagccttaacaaaacggaggaaaaaaaacttcctaggaacaatcgtaacagactccgtgtgcaaagatttaaacttttttttttataatatctggcacagcagatgtgttcttaaaatctcaggatattaagtttatgagtaaagttacttaaaacccatttattatggagagctggtgatgggaggggcctaaagatcaaccttttgtcacacaggaagccactggtgtccaaggagattaaataactttcctaaagtcaagctgatgagcaactaaagccataaccagagaagattttccagccagtgtcctttcacctgtatttatttgtttaggaaaatggcaaaataatggaaacaccaatcttctaatattaatcagtccatcaccagtaaacagttattatttcatgacaccttttgagcaatcgcaacactgtaatcattacaaaattagtagcaatttcaaaaagagactggctcatttaaaaatctgagattacttattttacctagaattaaaaaaaaaamaaacatgaaaaaccaaaaaacaaaacctgcggtagaagcgcgtggttatgagggcgtttgggcacggagccgtccaatggaagaattcatac

SEQ ID NO: 701987 - DNA, 594 bp, Homo sapiens
gcccgctacggaggccctgaatcctctgggagagaccgagtctttcctgttagtaggagtgaaagtggggaaaaggcaattcaagtagtagtaatttaaatgaaatatgtcaaagtacctaatgctagcacattgcaagtttcaacaaatattaaagtaagatatattattagaacttcaaccactgattgatgtttgatactaagcaatcattgtaaattttaaagtatcatgatggtattgtggtcatgtttagaaggaaaaatatgtctttatcttttasagatacatgccgaacaatttagtgatgatgaaatgatataaaatatgtgatttattccaaaataatgagggaggggcacaggaaatgagtggtggtatagcacatgcatctagattaggcatgtgaatggaaggggttcgatctttaatagtgcacttaatagtacactagaaagaaagtgtactattctccttttgtatatgtttgaagtgttccacaacaaaaacatttacaaacaataagaaatgtcacatagcagcatgagtattcttgacttctttggatgatcaacgcctcctttgaaaacgaaa

SEQ ID NO: 701988 - DNA, 1080 bp, Homo sapiens
ctaataaaggattatgaatgtttaaaagatatttttaaaatattggactttctcttaacccattataggaaactccacgttaacaaaaagttctttttttctcatttaccttgaaatttatgatccaatccactcttagtagagtcataatcatcgatcagttttcgattcttggttgaatcaacatcttccacattcaacttattatcaagtggggagcttcttatagattgtctttctttctcaattttttccttttctgttattgcctttagcaggttcaagttatcaacaaaagaatagttgctctgacctggcttgttttctggaagaatagccccaaacccaacacagccattttagttcagattctcatagcctacattatttaaattaacatcaatatgatttctttttacctggaggatatgtttttttaatcttgtcttcttctgcttcagcaatctgtgaagcaaacaggagatagacttggtttaaaatcattgctccactacttaccaagtacaagagccaaatgatttaatctccatgggatttaattgtcttgtttgtaaaatgtggataattcctatttcagagcactgttataataattaaatgagataaaattaagggtagatgctcagtcagtgttaatttctttctcctataatattgttgaaagagaaatctctggtaaattaggcaatcttacaacagagtggatgtgatgctgagcttactgggttattatatagttactctatgtattcattatacagaactcaatgtaaataactgctagggcatagaatttaccaaaactagatwtcccgtcctaatttctgtcaattaactattaagttcctgatgtttgtaaattcaaaatgaccaaaatgtcacagcataattacattaaataataataactaaatcaaaatgaaatagcattcataatgttacttttgacctacctgttcattcaaaggtctttctgcacttaattctctattatgtagagatttgtctagaataaacacatgtgaatataaatttaattgtgcgttgaaggacaaaata

SEQ ID NO: 701989 - DNA, 2888 bp, Homo sapiens
  misc_feature 1098, 1099, 1100, 1101, 1102, 1103, 1104, 1105, 1106, 1107,1108, 1109, 1110, 1111, 1112, 1113, 1114, 1115, 1116, 1117,1118, 1119, 1120, 1121, 1122, 1123, 1124, 1125, 1126, 1127,1128, 1129, 1130, 1131, 1132, 1133, 1134, 1135, 1136: n = A,T,C or G
  misc_feature 1137, 1138, 1139, 1140, 1141, 1142, 1143, 1144, 1145, 1146,1147, 1148, 1149, 1150, 1151, 1152, 1153, 1154, 1155, 1156,1157, 1158, 1159, 1160, 1161, 1162, 1163, 1164, 1165, 1166,1167, 1168, 1169, 1170, 1171, 1172, 1173, 1174, 1175: n = A,T,C or G
  misc_feature 1176, 1177, 1178, 1179, 1180, 1181, 1182, 1183, 1184, 1185,1186, 1187, 1188, 1189, 1190, 1191, 1192, 1193, 1194, 1195,1196, 1197: n = A,T,C or G
acatgtacataaaattgatttatatatgtgtatataaataaacaaatatgtttgtatatatacaactgtaaaaaaaagtctcagtttttttagtataaatatatacaggaagaacagacctctattttgtatatggatatatgcactcatttattttttctatgataatagaataaagactattcaacaaatagtctaatgagccaataccatatgtcttcggaaatgcagggtgagaagatagaatctacaacatcatggaccacaaattctcatatgtttaaggtagaataatttgtattatatcaaattataaaacagatagatactcttactatttggtatatactcttccttctatacatactggtatacagattgaatattcaaattcaaatctagctatattctattttttcacttaacatttaatcatgactttttggtacttaacagtaactttactgtccttacaatttagtagtgtataatgtgccatcttatggaattattatatttatcaaactatttctcttgtttgacagttaaggatttgtcacttttttatatatgtagcagtgcaagaaacagctttgtctacagcaaaaaaagagcagttaaagagaaaggcagagcctggtatctctgttttgctgagatttgaataggattgatagttttctaaatgacttgttgtaaatgtaaagtatgtagtcctgagaaagctctttgagctcaaggatgtgtctgcatgcgtgtgtgtgtgtgtgtgtgtgtgtgtgtctgggtgtctgtgtgtagtagtagtatattacatctgatcatccaaaagatcaccctaacaattacctatgcaaatatgttgaaagtgactaatttttaatataattaaaacaaacaggttagttaaaaagataatcaaacttctgaactcaatcaaatacaagtcttactaaaagtagaccaaaacagagagagagagagagagagagagagagagatgtcttctacctcagtgatagcacacataagcagttacatgtacacacactcatccacacaacgagcaaagctttcatgaaaggggacattatcccnnnnnnnnnnnnnnnnnnnnnnnnnnnnnnnnnnnnnnnnnnnnnnnnnnnnnnnnnnnnnnnnnnnnnnnnnnnnnnnnnnnnnnnnnnnnnnnnnnnnttacctgtacacacccaccttttaccacttgatcccatttctttcattagctccaaaaccctatagtccatcattccttaaacaagttattaattttcagacctttgtttatgtttttgcttcttctcctgcatctgcccagcatttacttgtcacttaaggctcagcttaaatataatctcagtgaagtcatcactggctacctacgtacagttcatcctactctctcctatgttcccacagtattctgtgcatatctatcttacagcacttgcatcattgtataaaattactcaattatggtgcagaaaagctagttcataactagactattagcttcttgaagacagagatttcccaatttctcatattcatctttgcaggtgccaatctgtgtgtttggcatgattaccttctatcctcaatgaatgtcctaattgttaagattctataactctgactgattcactgagcttcttgatgtcacagaataaatttatcttcttaggtgtccttttacaaatattaacttatttgtagaaaggagttattatacttaagatattactagaaacatacttataaatattatgcagattcattccttatgatcaaatgcatgcrcacattggggagaaaggctgtggggaacaagaaaagaaaccaacacccactgagtgactaatgtgtcaggaagtaggtaagggtcttctacacaattaattttatttaatcttccccacaaccattagttgtgggtattgcatttttatttaatagtggcgataatgagagagatcttaacctccttgcctgcagtcacatagtgagttaccgtttgtaagtcaggttaggctaggttctgcttcactaaaaagcaacctgtaaatcaaatcatgaacatttatttctcactcactctacatgtcccatatgggttggcaggtaatctctatccatcagtcactctgggatgtcaactgacagatcagcctcataccaaatctcatcagacaccaccgttcacatgttattgctaaagccccatcagacaccaccgttcacatgttattgctaaagccccacctggccacacttaacttcaagaggccagagatgcaaaattctaacattttccccaaaaggaagatagaaagaattatctgagaaatagataataatcaccctcagggaaaaagttaaaattgagaacacagctgcctaagttcaaaattttaccactggacatttttccttcttttttcttcatttagaatgagattaaatgacattttagaaatatcatttgtaatgtatggtccttgaggaaggtgtgcagaacctctaggctggtaattctcagggtcgatgtccattaaggtcacctgcaaattccagatttctgaatacaaaaatcagaatcctctagggatggcagggaacctgcatttggaacaatctccccaggtaaccatgggttgctacatgttgaaagaacagtggtttaggactgaaggttcacctcctccgaacctcattctaagtcgccttgctgtttattacatgtttcctttctggggagttttcagttcaaaatgtaatgcacacttcctatgaacacatgatcatctcaattctcttctaaagcagagtcactgcatctcccaaatttctttgggcactggagagaa

SEQ ID NO: 701990 - DNA, 644 bp, Homo sapiens
ttgttagttttttgaaagacaaagccttttgttttggcaatattttttagctccattcaaggaatggagttcattgtgtttctgaggtcaatgcacacatgagyactgagcctcacaagtctcctttgttcgtctgcctgtcttgccaggttccccagaaaacagggcctgaggaaaaggcatcgcactaaaatgttattaacatatgcaatctctaggaacagaagtcagaataaaggggaatgaggcaggaaaggaggaagaatccatatcaagggaggctgactggttgatcttgtagaatatatcttccaaggcgctgtataattggttatttctcaggacatttcatgtgggggaacaaaggaaagatctgatcccccggttcacatttcccatgggtcaaagatttatcctctgtggtgttacacccttccttgggttttgcaacattttgtttggctatgtgttgacaggagtttagagatgcgcatggtggacatgccacgaggaactagcaggctgtgcctgtgtgagggtggtcagtttgtcacacagtcaaactctgcagcagcaccaggggcagaacaaagtgacccaaagcccccaaactcgtaaggctgagaggacctgaagaggcacca

SEQ ID NO: 701991 - DNA, 627 bp, Homo sapiens
tggggattaggacccaatcccacatttaaccatcgtagtcaggatctcacaccttacagctgtttctctaaagtctagacacaaccacctggatctccactgcttacttaataagagttttacctcttacctgcttcccttgtatgggaggaaaagtaatattttaactcactcattgtaagayttatggttgatacccctgaaacaaagacagattaacaagagaaaagtataacaaatttatttaagttttatatgacatgggaaactttagaaatgaagactcaatgacaaagcaaaagctgtatatttttatgcttagttttgataaagaataagtagttggaccaaagggagtatgagctaatggtaataaactagggggaacttagcaaggccagtttcttccaattcttcttggcttcagaatatagggcaggacctctttggagtcagcatcctatgatttacttccaggggagataggtcatataattatttttatggtgttaggtgagaaaggtgggagaaggtcaggaaaaagaaagaaaaggtcagagagccctttctgcttttgcacgtttgttaatttcctccagcttaacatactgaatatgtcaaagtgtc

SEQ ID NO: 701992 - DNA, 624 bp, Homo sapiens
ggggtgtagagggaaatagtagaaaaaaagattaccgaagggtacttaatctacttttattgttaatttattatggcagttccatttgatttctttgttattcaaaaccactgttttataattttctggcccaaagtaattttggctatcttatgtgttggacagtttaaaagagtctgtagcacctattttcttttcaaaaatgcattgttatgtactggcactatttcctgaggaaatttctcattatgtctttagccgtctacatgcctaccttggtattggggactattgtttccaccaggaaatgctgaaaggtgggaagctataaagatcataattgaacctaccaatttctgtttcctatgtgagcctatgcataataataatgtagacatcccagtagctaaaatctattgagcactttctatgtkccaagaacaaatgctttaaatattagcgcatttaactgccaaaacaaacatgaggtagcactactattattttcattttatagatgaggaaactgagataccaaaatgttaagtaacttggtaaaggtcactcaaattgtgattggaggtcttcaccttgagacgtcagtaactactgctcgaaagccca

SEQ ID NO: 701993 - DNA, 624 bp, Homo sapiens
ggggtgtagagggaaatagtagaaaaaaagattaccgaagggtacttaatctacttttattgttaatttattatggcagttccatttgatttctttgttattcaaaaccactgttttataattttctggcccaaagtaattttggctatcttatgtgttggacagtttaaaagagtctgtagcacctattttcttttcaaaaatgcattgttatgtactggcactatttcctgaggaaatttctcattatgtctttagccgtctacatgcctaccttggtattggggactattgtttccaccaggaaatgctgaaaggtgggaagctataaagatcataattgaacctaccaatttctgtttcctatgtgagcctatgcataataataatgtagacatcccagtagctaaaatctattgagcactttctatgtgccaagaacaaatgctttaaatattagcgcatttaactgccaaaacaaacatgaggtagcactactattattttcattttatagatgaggaaactgagataccaaaaygttaagtaacttggtaaaggtcactcaaattgtgattggaggtcttcaccttgagacgtcagtaactactgctcgaaagccca

SEQ ID NO: 701994 - DNA, 623 bp, Homo sapiens
agtagctgggactacaggagcccgccaccacgcccggctaattgcttttgtatttttagtagagacagggtttcactgtgttagcctcctaacacgtggtttcgatctcctgacctcatgatccacccgcctcggcctcccaaagtgctggkattacaggcgtgagctgcggctcccggccagatcttttaaacttggtgaggacacagtatcaatttgtgtggtaaggctttccacctgaaatggcaataggtaggactgcttctatatgaaaatggctatattgatcaaaagacgcaaaatgccaacttttcaaaattggcaattatctaagaatttatcatcagaaactaatcacagacatgcttaaatatgtagccaccaaagatgctcatcttacttaatggtagaaaattaaaaacaaatgttgggaagggtgggttatggaatactcatgttatggaaagacaccatatactaactggtaaaaacagactatgaaatagattacaaccctgtaaatgaaataataaattcatacagaaaaaaagagagaatactttggtaggctaaaacagggggaggatcacttgagcccaggggtttgagaccagcctaagcaa

SEQ ID NO: 701995 - DNA, 623 bp, Homo sapiens
agtagctgggactacaggagcccgccaccacgcccggctaattgcttttgtatttttagtagagacagggtttcactgtgttagcctcctaacacgtggtttcgatctcctgacctcatgatccacccgcctcggcctcccaaagtgctggtattacaggcgtgagctgcggctcccggccagatcttttaaacttggtgaggacacagtatcaatttgtgtggtaaggctttccacctgaaayggcaataggtaggactgcttctatatgaaaatggctatattgatcaaaagacgcaaaatgccaacttttcaaaattggcaattatctaagaatttatcatcagaaactaatcacagacatgcttaaatatgtagccaccaaagatgctcatcttacttaatggtagaaaattaaaaacaaatgttgggaagggtgggttatggaatactcatgttatggaaagacaccatatactaactggtaaaaacagactatgaaatagattacaaccctgtaaatgaaataataaattcatacagaaaaaaagagagaatactttggtaggctaaaacagggggaggatcacttgagcccaggggtttgagaccagcctaagcaa

SEQ ID NO: 701996 - DNA, 623 bp, Homo sapiens
agtagctgggactacaggagcccgccaccacgcccggctaattgcttttgtatttttagtagagacagggtttcactgtgttagcctcctaacacgtggtttcgatctcctgacctcatgatccacccgcctcggcctcccaaagtgctggtattacaggcgtgagctgcggctcccggccagatcttttaaacttggtgaggacacagtatcaatttgtgtggtaaggctttccacctgaaatggcaataggtaggactgcttctatatgaaaatggctrtattgatcaaaagacgcaaaatgccaacttttcaaaattggcaattatctaagaatttatcatcagaaactaatcacagacatgcttaaatatgtagccaccaaagatgctcatcttacttaatggtagaaaattaaaaacaaatgttgggaagggtgggttatggaatactcatgttatggaaagacaccatatactaactggtaaaaacagactatgaaatagattacaaccctgtaaatgaaataataaattcatacagaaaaaaagagagaatactttggtaggctaaaacagggggaggatcacttgagcccaggggtttgagaccagcctaagcaa

SEQ ID NO: 701997 - DNA, 602 bp, Homo sapiens
tgcctcaactaaattaaaaacttgctatatgccaggcattgtgataaacactttacttacgatatttaatcatcataacaaccctttcagagattctgtcattttttccttttatagatgatgaaatagcctctgagaggttaagtcactcacccaaaatttccactgccaggaagtrgtagtgatgggattcaaacctgggtggccctgagaccagagcttccgctctacccacttcactatacttctcttactacaggtaaaaaccacatcaactctgttcttttttgccatttctcctgagtgctcaccaagattttaccaacctttagcaaattatctgatatcattcagtgccaagattctcattctggtagtcatttgcatgaaacatttttcgatagagattatactgccgggttccatatactgagatatacatatactgagaggaagggtatatcaaaagtaggttgtggaagagtaggaagcattgcacctaaacttccatgattaactccatgtgttttactcaaagcatcaggttgctctttagacttcttggttgctttggaaattttgatggtgctttttggagagtg

SEQ ID NO: 701998 - DNA, 1256 bp, Homo sapiens
ttaactcatcatttacattaggtatttttcctaatgctctccctcccccctccccccaccccacaacaraccctggtgtgtgatgttccccaccctgtgtccatgtgttctcattgttcaattgccacctatgagtgagaacatgtggtgtttggttttctgtccttggcaatagtttgctcagaatgatggtttccagcttcatccatgtttctacaaaggaaatgaagtcatccttttttatggctattgttcttaagatttaatatcttagctctatggctattgttcatggctttattatttatagacaatcatttttatatttatgggaaatatttttatgtcaaaaatcttgtgattggatgaattcagggtgacatttttgttattacataatgaggatgtttaaaatgataacctagttaccccattcaggaagtatctgaacacagaaatttagtattttctttgaaggtcagttgtgagattaagttgtaatctggttacactacatctgttgtgagaggattttctgttttgttttgtttaaccagacgttattttcaaaagttcaattttcatgggcaaaaggcattccattaaaagctgatcactttcaaagtgctggattaaaagatgttttcaaaattaaataacattctattagaaatgtaagacatagtacttgttttccaaaacttataaagtcattagctgtctctgtgaccttggtaaggataccttcaactttccttatcttcagattcctacagtgaaaaatcgagagggttggatcaaatgactactaaggcttgctccagttctaattcagagttcagaatgatctcagtgcaatttggataaaataattgtaaagaacatgatgtacttatacgctaagatgtgttgcatacaaacattcaacgtgtatgcataaaaattgtgttgatctaagtttgaagaaggaagaatatctgtgatattcttgctgggacaaccaaagcagccttctaaattgtgtctgttgttagtcgaatccttttaatctgctgcttctctgactgtctactttctccagtccacataggcagtgcttctccactgtgtacaggctgagatccagcgttgcagaatggtcaccaccttctccactgtgtacaggctgagatccagcattgcagaatggtcaccacccatggattctgacccagggaccttgaaggcagctcccgtgcttctccagctctggcacc

SEQ ID NO: 701999 - DNA, 1256 bp, Homo sapiens
ttaactcatcatttacattaggtatttttcctaatgctctccctcccccctccccccaccccacaacaamccctggtgtgtgatgttccccaccctgtgtccatgtgttctcattgttcaattgccacctatgagtgagaacatgtggtgtttggttttctgtccttggcaatagtttgctcagaatgatggtttccagcttcatccatgtttctacaaaggaaatgaagtcatccttttttatggctattgttcttaagatttaatatcttagctctatggctattgttcatggctttattatttatagacaatcatttttatatttatgggaaatatttttatgtcaaaaatcttgtgattggatgaattcagggtgacatttttgttattacataatgaggatgtttaaaatgataacctagttaccccattcaggaagtatctgaacacagaaatttagtattttctttgaaggtcagttgtgagattaagttgtaatctggttacactacatctgttgtgagaggattttctgttttgttttgtttaaccagacgttattttcaaaagttcaattttcatgggcaaaaggcattccattaaaagctgatcactttcaaagtgctggattaaaagatgttttcaaaattaaataacattctattagaaatgtaagacatagtacttgttttccaaaacttataaagtcattagctgtctctgtgaccttggtaaggataccttcaactttccttatcttcagattcctacagtgaaaaatcgagagggttggatcaaatgactactaaggcttgctccagttctaattcagagttcagaatgatctcagtgcaatttggataaaataattgtaaagaacatgatgtacttatacgctaagatgtgttgcatacaaacattcaacgtgtatgcataaaaattgtgttgatctaagtttgaagaaggaagaatatctgtgatattcttgctgggacaaccaaagcagccttctaaattgtgtctgttgttagtcgaatccttttaatctgctgcttctctgactgtctactttctccagtccacataggcagtgcttctccactgtgtacaggctgagatccagcgttgcagaatggtcaccaccttctccactgtgtacaggctgagatccagcattgcagaatggtcaccacccatggattctgacccagggaccttgaaggcagctcccgtgcttctccagctctggcacc

SEQ ID NO: 702000 - DNA, 1256 bp, Homo sapiens
ttaactcatcatttacattaggtatttttcctaatgctctccctcccccctccccccaccccacaacaaaccctggtgtgtgatgttccccaccctgtgtccatgtgttctcattgttcaattgccacctatgagtgagaacatgtggtgtttggttttctgtccttggcaatagtttgctcagaatgatggtttccagcttcatccatgtttctacaaaggamatgaagtcatccttttttatggctattgttcttaagatttaatatcttagctctatggctattgttcatggctttattatttatagacaatcatttttatatttatgggaaatatttttatgtcaaaaatcttgtgattggatgaattcagggtgacatttttgttattacataatgaggatgtttaaaatgataacctagttaccccattcaggaagtatctgaacacagaaatttagtattttctttgaaggtcagttgtgagattaagttgtaatctggttacactacatctgttgtgagaggattttctgttttgttttgtttaaccagacgttattttcaaaagttcaattttcatgggcaaaaggcattccattaaaagctgatcactttcaaagtgctggattaaaagatgttttcaaaattaaataacattctattagaaatgtaagacatagtacttgttttccaaaacttataaagtcattagctgtctctgtgaccttggtaaggataccttcaactttccttatcttcagattcctacagtgaaaaatcgagagggttggatcaaatgactactaaggcttgctccagttctaattcagagttcagaatgatctcagtgcaatttggataaaataattgtaaagaacatgatgtacttatacgctaagatgtgttgcatacaaacattcaacgtgtatgcataaaaattgtgttgatctaagtttgaagaaggaagaatatctgtgatattcttgctgggacaaccaaagcagccttctaaattgtgtctgttgttagtcgaatccttttaatctgctgcttctctgactgtctactttctccagtccacataggcagtgcttctccactgtgtacaggctgagatccagcgttgcagaatggtcaccaccttctccactgtgtacaggctgagatccagcattgcagaatggtcaccacccatggattctgacccagggaccttgaaggcagctcccgtgcttctccagctctggcacc

SEQ ID NO: 702001 - DNA, 1256 bp, Homo sapiens
ttaactcatcatttacattaggtatttttcctaatgctctccctcccccctccccccaccccacaacaaaccctggtgtgtgatgttccccaccctgtgtccatgtgttctcattgttcaattgccacctatgagtgagaacatgtggtgtttggttttctgtccttggcaatagtttgctcagaatgatggtttccagcttcatccatgtttctacaaaggaaatgaastcatccttttttatggctattgttcttaagatttaatatcttagctctatggctattgttcatggctttattatttatagacaatcatttttatatttatgggaaatatttttatgtcaaaaatcttgtgattggatgaattcagggtgacatttttgttattacataatgaggatgtttaaaatgataacctagttaccccattcaggaagtatctgaacacagaaatttagtattttctttgaaggtcagttgtgagattaagttgtaatctggttacactacatctgttgtgagaggattttctgttttgttttgtttaaccagacgttattttcaaaagttcaattttcatgggcaaaaggcattccattaaaagctgatcactttcaaagtgctggattaaaagatgttttcaaaattaaataacattctattagaaatgtaagacatagtacttgttttccaaaacttataaagtcattagctgtctctgtgaccttggtaaggataccttcaactttccttatcttcagattcctacagtgaaaaatcgagagggttggatcaaatgactactaaggcttgctccagttctaattcagagttcagaatgatctcagtgcaatttggataaaataattgtaaagaacatgatgtacttatacgctaagatgtgttgcatacaaacattcaacgtgtatgcataaaaattgtgttgatctaagtttgaagaaggaagaatatctgtgatattcttgctgggacaaccaaagcagccttctaaattgtgtctgttgttagtcgaatccttttaatctgctgcttctctgactgtctactttctccagtccacataggcagtgcttctccactgtgtacaggctgagatccagcgttgcagaatggtcaccaccttctccactgtgtacaggctgagatccagcattgcagaatggtcaccacccatggattctgacccagggaccttgaaggcagctcccgtgcttctccagctctggcacc

SEQ ID NO: 702002 - DNA, 1256 bp, Homo sapiens
ttaactcatcatttacattaggtatttttcctaatgctctccctcccccctccccccaccccacaacaaaccctggtgtgtgatgttccccaccctgtgtccatgtgttctcattgttcaattgccacctatgagtgagaacatgtggtgtttggttttctgtccttggcaatagtttgctcagaatgatggtttccagcttcatccatgtttctacaaaggaaatgaagtcatccttttttatggctattgttcttaagatttaatatcttagctctatggctattgttcatggctttattatttatagacaatcatttttatatttatgggaaatatttttatgtcaaaaatcttgtgattggatgaattcagggtgacatttttgttattacataatgaggatgtttaaaatgataacctagttaccccattcaggaagtatctgaacacagaaatttagtattttctttgaaggtcagttgtgagattaagttgtaatctggttacactacatctgttgtgagaggattttctgttttgttttgtttaaccagacgttattttcaaaagttcaattttcatgggcaaaaggcattccattaaaagctgatcactttcaaagtgctggattaaaagatgttttcaaaattaaataacattctattagaaatgtaagacatagtacttgttttccaaaacttataaagtcattagctgtctctgtgaccttggtaaggataccttcaactttccttatcttcagattcctacagtgaaaaatcgagagggttggatcaaatgactactaaggcttgctccagttctaattcagagttcagaatgatctcagtgcaatttggataaaataattgtaaagaacatgatgtacttatacgctaagatgtgttgcatacaaacattcaacgtgtatgcataaaaattgtgttgatctaagtttgaagaaggaagaatatctgtgatattcttgctgggacaaccaaagcagccttctaaattgtgtctgttgttagtcgaatccttttaatctgytgcttctctgactgtctactttctccagtccacataggcagtgcttctccactgtgtacaggctgagatccagcgttgcagaatggtcaccaccttctccactgtgtacaggctgagatccagcattgcagaatggtcaccacccatggattctgacccagggaccttgaaggcagctcccgtgcttctccagctctggcacc

SEQ ID NO: 702003 - DNA, 1404 bp, Homo sapiens
atatatatatatattaaatctaggtcctgctgggttggacatggaaaagttatagcacaaatatgaatcccccctagggacagtatgagactagttccaacaccatatgttcttcaacagctatttttattcttgcctctttccctttcatctatggaataccaaggagttaaacctttggaaccagccatttctgaccttgaatactgtagagattatttttctgtgcagcccaggtccaaatagtgttgttattctccacctcatttgtctctggactaggaaagatccagaaaggtatgagagctaaaaggaacattagagataattagtagtttagtctgaggttttacagctgtttggagaagtcttaatgatctgcctaagtatctcatgaactgttaaccaggggaccaggatatgtcctggaggggatggggaaaggtaaggtgtgattgtgtgggtgggctttcaggccatgtctctttcaacctgagcaactaaattattttatatatatattatatatatatatttttatatatattttaaatatttaaatattttatatattttaaatattatatatatatttgtgttcacacatactttgtgtgtatatttgtatatatacatacatattttgtgtacatatatacattcctcataagctctcatttgttaaaaagtttcyacaatggggaaaaaagcctttgaaactgttgttctaataaaactcaataattttctacatgagaagctgagaaattgaaaatgatttgttcaatgtcacaaaaggagtatgtggtagaatgtaaactcagaaccagaaagttttgagcttctatttgaactcattatattctgtcttctctcagttgtgttagaacattaattcaaccagttatgttgaattacattgattgatgttgatgaacaatcatcaaacaagtgtcaggtaccagggatatcaaaataagtaagacatagccgctatttttcagcgtctataaatggaatgaggcacagaaataataatgctggatgctgtgtgctgtacaaaaagggcaagcaataataacagttaacatgtattgggtacttcctgtctgctaggtgctatactagatattttataagtattaattcacttaaattttacaatatgcctctgtgttaggtatggttgttattctgattttataaaagaagaaactgaggtttagatgggaagtgagggattaggtctcttggcccaaggtcacacaataagttaattatgggggtacaaggtacaggcgcttggaaaacatagaggaaagaacaattgtctaatgaaatcaaagaaaactttgcagagacatgtaaaatttaaggtagggctagaaagataaggagtaaagt

SEQ ID NO: 702004 - DNA, 1404 bp, Homo sapiens
atatatatatatattaaatctaggtcctgctgggttggacatggaaaagttatagcacaaatatgaatcccccctagggacagtatgagactagttccaacaccatatgttcttcaacagctatttttattcttgcctctttccctttcatctatggaataccaaggagttaaacctttggaaccagccatttctgaccttgaatactgtagagattatttttctgtgcagcccaggtccaaatagtgttgttattctccacctcatttgtctctggactaggaaagatccagaaaggtatgagagctaaaaggaacattagagataattagtagtttagtctgaggttttacagctgtttggagaagtcttaatgatctgcctaagtatctcatgaactgttaaccaggggaccaggatatgtcctggaggggatggggaaaggtaaggtgtgattgtgtgggtgggctttcaggccatgtctctttcaacctgagcaactaaattattttatatatatattatatatatatatttttatatatattttaaatatttaaatattttatatattttaaatattatatatatatttgtgttcacacatactttgtgtgtatatttgtatatatacatacatattttgtgtacatatatacattcctcataagctctcatttgttaaaaagtttctacaatggggaaaaaagcctttgaaactgttgttctaataaaactcaataattttctacatgagaagctgagaaattgaaaatgatttgttcaatgtcacaaaaggagtatgtggtagaatgtaaactcagaaccagaaagttttgagcttctatttgaactcattatattctgtcttctctcagttgtgttagaacattaattcaaccagttatgttgaattacattgattgatgttgatgaacaatcatcaaacaagtgtcaggtaccagggatatcaaaataagtaagacatagcygctatttttcagcgtctataaatggaatgaggcacagaaataataatgctggatgctgtgtgctgtacaaaaagggcaagcaataataacagttaacatgtattgggtacttcctgtctgctaggtgctatactagatattttataagtattaattcacttaaattttacaatatgcctctgtgttaggtatggttgttattctgattttataaaagaagaaactgaggtttagatgggaagtgagggattaggtctcttggcccaaggtcacacaataagttaattatgggggtacaaggtacaggcgcttggaaaacatagaggaaagaacaattgtctaatgaaatcaaagaaaactttgcagagacatgtaaaatttaaggtagggctagaaagataaggagtaaagt

SEQ ID NO: 702005 - DNA, 633 bp, Homo sapiens
ggcctcagtgattctcaaggacccttatagctgttacatcatgttttcttgattctctaacctctaaatctgtcttcatcagctagttttgtgaaggataaggacaggyctcctgtcctatttggattgacttgtttttttcaggtgatgactatagatagttaccttttagagtactccccatcccaggatgcccattttttttttctccatttcagcagtgccccccagagacattgaagaaggcaatgtgaagatgctgggcatgcagatccccataaagaatgttgagatgctggcctctgttttggttgccattagtgtcacccttctgctcgttgttctggctcttggtggagtggtttggtaccaacatcgacagagaaagctacgacgcaataggaggtccatcctggatgacagcttcaagcttctgtctttcaaacagtaacatctggagcctggagatatcctcaggaagcacatctgtagtgcactcccagcaggccatggactagtcactaaccccacactcaaaggggcatgggtggtggagaagcagaaggagcaatcaagcttatctggatatttctttctttatttattttacatggaaataatatgatttcactt

SEQ ID NO: 702006 - DNA, 605 bp, Homo sapiens
atatcctgcatttttttaaaaaaggatttagtatacattatagagtgaacaggaaaaataatcaagttccaaagacaaaccttgccattcacagagaacccagtgaagacaaagttgatgtccccaccctttgtgcagatgtcactgactccatccacatggagctccacggtcgtcggctctgaggaacgaagcaggggaggaaaccggggcacaagacacaaaggcaagcttagttttggggtacagtgaacctaagtagaacgtatttttattattcaggtttcattttacttttgaacacttaatacactcgtgtgtttccaaatccaaaggtacaaaaaagtattctgggaaaagtctccctctcacccctatccccctagcctcctggtttcctgccccagagggaattcgtgtttagagtataaaataattttacaacgcctttcagctaagttatatctcagagttccagkgaaaattcagtgagcaccaaataattttatttcctgaatgctcatcaacgaccaggcactgagctgagtgcctttaatcctcacaattatcttaagagacaggcagtaatagctgcaatttactga

SEQ ID NO: 702007 - DNA, 605 bp, Homo sapiens
atatcctgcatttttttaaaaaaggatttagtatacattatagagtgaacaggaaaaataatcaagttccaaagacaaaccttgccattcacagagaacccagtgaagacaaagttgatgtccccaccctttgtgcagatgtcactgactccatccacatggagctccacggtcgtcggctctgaggaacgaagcaggggaggaaaccggggcacaagacacaaaggcaagcttagttttggggtacagtgaacctaagtagaacgtatttttattattcaggtttcattttacttttgaacacttaatacactcgtgtgtttccaaatccaaaggtacaaaaaagtattctgggaaaagtctccctctcacccctatccccctagcctcctggtttcctgccccagagggaattcgtgtttagagtataaaataattttacaacgcctttcagctaagttatatctcagagttccagtgaaaattcagtgagcaccaaataattttatttcctgaatgctcatcamcgaccaggcactgagctgagtgcctttaatcctcacaattatcttaagagacaggcagtaatagctgcaatttactga

SEQ ID NO: 702008 - DNA, 672 bp, Homo sapiens
aacgtccaaaaaaagccaatccatggggacagaaaatagatcagtggctggccatggctagaaacagggattaactgtcaaygggcacagaggatcttacattgtgggtgatgaacaaatctaaaactggattctggccatggttgtgcaacttgataaatttactacaaatcattttattgtacatcttaaataggtgagttttatgatatgcaaattctgcctccaaaaaaagccattataaaagagagagaaggttgggtgcagcagctcacacctgtaatcccagcactttgggaggctgaggcgggcggatcactttaggtcaggagtttgagaccagcctggacaatgtggtgaaacccatccctactaaaaatacaaaaattagccggatgtggtggtgggcacctgtaatcccagctactcgagaggctgaggcaggggaatcgcttgaacccaggaggcggaggctgcagtgagccaagatcaagccactacactccagcctgggtgacagagcaagactccatctcaaaaaaaaaaaagagaaaaaaaaatgagaaagagcgagaagccactgaaagattttaagcaaagtgggaaatgattcaaattttaaaacagctctataaagagaggccattggccaatggtatatttttggaggtg

SEQ ID NO: 702009 - DNA, 672 bp, Homo sapiens
aacgtccaaaaaaagccaatccatggggacagaaaatagatcagtggctggccatggctagaaacagggattaactgtcaacgggcacagaggatcttacattgtgggtgatgaacaaatctaaaactggattctggccatggttgtgcaacttgataaatttactacaaatcattttattgtacatcttaaataggtgagttttaygatatgcaaattctgcctccaaaaaaagccattataaaagagagagaaggttgggtgcagcagctcacacctgtaatcccagcactttgggaggctgaggcgggcggatcactttaggtcaggagtttgagaccagcctggacaatgtggtgaaacccatccctactaaaaatacaaaaattagccggatgtggtggtgggcacctgtaatcccagctactcgagaggctgaggcaggggaatcgcttgaacccaggaggcggaggctgcagtgagccaagatcaagccactacactccagcctgggtgacagagcaagactccatctcaaaaaaaaaaaagagaaaaaaaaatgagaaagagcgagaagccactgaaagattttaagcaaagtgggaaatgattcaaattttaaaacagctctataaagagaggccattggccaatggtatatttttggaggtg

SEQ ID NO: 702010 - DNA, 672 bp, Homo sapiens
aacgtccaaaaaaagccaatccatggggacagaaaatagatcagtggctggccatggctagaaacagggattaactgtcaacgggcacagaggatcttacattgtgggtgatgaacaaatctaaaactggattctggccatggttgtgcaacttgataaatttactacaaatcattttattgtacatcttaaataggtgagttttatgatatgcaaattctgcctccaaaaaaakccattataaaagagagagaaggttgggtgcagcagctcacacctgtaatcccagcactttgggaggctgaggcgggcggatcactttaggtcaggagtttgagaccagcctggacaatgtggtgaaacccatccctactaaaaatacaaaaattagccggatgtggtggtgggcacctgtaatcccagctactcgagaggctgaggcaggggaatcgcttgaacccaggaggcggaggctgcagtgagccaagatcaagccactacactccagcctgggtgacagagcaagactccatctcaaaaaaaaaaaagagaaaaaaaaatgagaaagagcgagaagccactgaaagattttaagcaaagtgggaaatgattcaaattttaaaacagctctataaagagaggccattggccaatggtatatttttggaggtg

SEQ ID NO: 702011 - DNA, 673 bp, Homo sapiens
ttttggtcactggtaaatattaaggtactttgttttctgttttgtgaactctctctctctctcacgatatgtcttctgaccatttgtttctatttctgcatttactgggtctaaacattgtacaaaggttaaaaacaacactccaatgggcgtttcccaagagggtggggttcagtttctgaactcacatgtaggtgtgtatttctttcatatccaatttcccattttcctctgcctctgacacctgcctctcctyttctccgtgctcacgttctttcatgcttagtttcctcagactagaagggagagaaatgcacacacatgatccaccagcccgtgtgggattccctctgcccttctggcatctgaaggctgtgattcaaagatcccccctgcaaccttcccacaaatgaaccaactgattctcacaaccgaagggagaatggacacctcccattgagggacaaaaaaaaatcacactctggcctgctggcaagtcacctgtcatttccagctcatcttcatagttccatagttagtcctattctttagtaaatataaagactattaaaagcttctatgaggtgcactatgtgcgtctctggggtcagtcttgtgcttgacacagcaaaagctcattttagttcagtgtgaaaaaccagacctcaccaat

SEQ ID NO: 702012 - DNA, 673 bp, Homo sapiens
ttttggtcactggtaaatattaaggtactttgttttctgttttgtgaactctctctctctctcacgatatgtcttctgaccatttgtttctatttctgcatttactgggtctaaacattgtacaaaggttaaaaacaacactccaatgggcgtttcccaagagggtggggttcagtttctgaactcacatgtaggtgtgtatttctttcatatccaatttcccattttcctctgcctctgacacctgcctctccttttctcygtgctcacgttctttcatgcttagtttcctcagactagaagggagagaaatgcacacacatgatccaccagcccgtgtgggattccctctgcccttctggcatctgaaggctgtgattcaaagatcccccctgcaaccttcccacaaatgaaccaactgattctcacaaccgaagggagaatggacacctcccattgagggacaaaaaaaaatcacactctggcctgctggcaagtcacctgtcatttccagctcatcttcatagttccatagttagtcctattctttagtaaatataaagactattaaaagcttctatgaggtgcactatgtgcgtctctggggtcagtcttgtgcttgacacagcaaaagctcattttagttcagtgtgaaaaaccagacctcaccaat

SEQ ID NO: 702013 - DNA, 673 bp, Homo sapiens
ttttggtcactggtaaatattaaggtactttgttttctgttttgtgaactctctctctctctcacgatatgtcttctgaccatttgtttctatttctgcatttactgggtctaaacattgtacaaaggttaaaaacaacactccaatgggcgtttcccaagagggtggggttcagtttctgaactcacatgtaggtgtgtatttctttcatatccaatttcccattttcctctgcctctgacacctgcctctccttttctccgtgctcacgttctttcatgcttagtttcctcagactagaagggagagaaatgcacacacatgatccaccagcmcgtgtgggattccctctgcccttctggcatctgaaggctgtgattcaaagatcccccctgcaaccttcccacaaatgaaccaactgattctcacaaccgaagggagaatggacacctcccattgagggacaaaaaaaaatcacactctggcctgctggcaagtcacctgtcatttccagctcatcttcatagttccatagttagtcctattctttagtaaatataaagactattaaaagcttctatgaggtgcactatgtgcgtctctggggtcagtcttgtgcttgacacagcaaaagctcattttagttcagtgtgaaaaaccagacctcaccaat

SEQ ID NO: 702014 - DNA, 673 bp, Homo sapiens
ttttggtcactggtaaatattaaggtactttgttttctgttttgtgaactctctctctctctcacgatatgtcttctgaccatttgtttctatttctgcatttactgggtctaaacattgtacaaaggttaaaaacaacactccaatgggcgtttcccaagagggtggggttcagtttctgaactcacatgtaggtgtgtatttctttcatatccaatttcccattttcctctgcctctgacacctgcctctccttttctccgtgctcacgttctttcatgcttagtttcctcagactagaagggagagaaatgcacacacatgatccaccagcccgtgtgggattccctctgcccttctggcatctgaaggctgtgattcaaagatcccccctgcaaccttcccacaaatgaaccaactgattctcacaacygaagggagaatggacacctcccattgagggacaaaaaaaaatcacactctggcctgctggcaagtcacctgtcatttccagctcatcttcatagttccatagttagtcctattctttagtaaatataaagactattaaaagcttctatgaggtgcactatgtgcgtctctggggtcagtcttgtgcttgacacagcaaaagctcattttagttcagtgtgaaaaaccagacctcaccaat

SEQ ID NO: 702015 - DNA, 1552 bp, Homo sapiens
ggaggaggaaaggggaaaagaaaggaaagaaaaggaaaagggaaatacaagaaaaggagacaaataaatamataaacaaataagtgactgaaagtctgagagttggcaaatactattcagataacactgacaaaataggcctcttgctaaaaatagcagaatgcacaaagtacaggagcagcctgtctgtcctgagaggctggggaggtttaggaaaagaggctggagagatttgagacaggtctgaagtatgtagtcagtttttgcttggtggaaaaagtaatcatgggtgattcagaaaaagcaagatacttacataataactgttttgtacctttttttagtcttctattactttcataaaattatctttgcatcaaaagttattaacactttcaggactccttgtatgcaaaattctttgaattgcatttcttaatttgtgatcgcactggtaatttatctagcacaatgaactgaatgtgtgtctttatgtttaaagggaaaaataaaattcaaaacagcatatttgatataatttatgattagataatagagaattatcaactttaatataatttttagaaagtaaagcttaggctagtcacgatggctcatgcctgtaatcccagcactttgggaggctgaggcgggtggatcacctgaggtcaggagttcaagaccagcctgaccaacatggagaaaccctgtctctactaaaaataccaaattaaccggcactaacgattcatgagaaatctgccccatgatccattcacctcccagcaggacctatctccaactttggggattaaaattcaacatgagatttgggcagggacacatatccaaactatatcaacagagtttcattgtgttgatcgggctagtctcaaactcctagcctcaagcaatacttctatctcagcctcccaagtacctttggggattataataatcaatcatcttcactttttacaatctactttggtttaataatttttacttaattccagtgttatatagcaactttgatccaatgtatctcttatatgctatgaactcagcagtattgttgtagttattgcctataataatcagatgcttttttaaaaaaagagatgaaatcagaatacacacacacacacacacacatacacacacacacacacatacacacatacaatcttttatacttacaaatttatttaccatttcccatgctgtttattccttataggttcaagttgccatctggtgtcatatccttttatcttaaaagcattttctttagtgtttctttagcaaggataagttctttttatttttatttatctggaaatgtctttatttcagctccatttttgaaggatcatttaactggatacagaattcttaattgacagttatttttccctccacttttgaaatgtcgcttcataagacctccatttttttcagataaaaatgccagtattgataatattactgttcccctgtatgtgataagtcgtctcttgctactttcatgattttcttattatccttggtt

SEQ ID NO: 702016 - DNA, 1552 bp, Homo sapiens
ggaggaggaaaggggaaaagaaaggaaagaaaaggaaaagggaaatacaagaaaaggagacaaataaatacataaacaaataagtgactgaaagtctgagagttggcaaatactattcagataacactgacaaaataggcctcttgctaaaaatagcagaatgcacaaagtacaggagcagcctgtctgtcctgagaggctggggaggtttaggaaaagaggctggagagatttgagacaggtctgaagtatgtagtcagtttttgcttggtggaaaaagtaatcatgggtgattcagaaaaagsaagatacttacataataactgttttgtacctttttttagtcttctattactttcataaaattatctttgcatcaaaagttattaacactttcaggactccttgtatgcaaaattctttgaattgcatttcttaatttgtgatcgcactggtaatttatctagcacaatgaactgaatgtgtgtctttatgtttaaagggaaaaataaaattcaaaacagcatatttgatataatttatgattagataatagagaattatcaactttaatataatttttagaaagtaaagcttaggctagtcacgatggctcatgcctgtaatcccagcactttgggaggctgaggcgggtggatcacctgaggtcaggagttcaagaccagcctgaccaacatggagaaaccctgtctctactaaaaataccaaattaaccggcactaacgattcatgagaaatctgccccatgatccattcacctcccagcaggacctatctccaactttggggattaaaattcaacatgagatttgggcagggacacatatccaaactatatcaacagagtttcattgtgttgatcgggctagtctcaaactcctagcctcaagcaatacttctatctcagcctcccaagtacctttggggattataataatcaatcatcttcactttttacaatctactttggtttaataatttttacttaattccagtgttatatagcaactttgatccaatgtatctcttatatgctatgaactcagcagtattgttgtagttattgcctataataatcagatgcttttttaaaaaaagagatgaaatcagaatacacacacacacacacacacatacacacacacacacacatacacacatacaatcttttatacttacaaatttatttaccatttcccatgctgtttattccttataggttcaagttgccatctggtgtcatatccttttatcttaaaagcattttctttagtgtttctttagcaaggataagttctttttatttttatttatctggaaatgtctttatttcagctccatttttgaaggatcatttaactggatacagaattcttaattgacagttatttttccctccacttttgaaatgtcgcttcataagacctccatttttttcagataaaaatgccagtattgataatattactgttcccctgtatgtgataagtcgtctcttgctactttcatgattttcttattatccttggtt

SEQ ID NO: 702017 - DNA, 1552 bp, Homo sapiens
ggaggaggaaaggggaaaagaaaggaaagaaaaggaaaagggaaatacaagaaaaggagacaaataaatacataaacaaataagtgactgaaagtctgagagttggcaaatactattcagataacactgacaaaataggcctcttgctaaaaatagcagaatgcacaaagtacaggagcagcctgtctgtcctgagaggctggggaggtttaggaaaagaggctggagagatttgagacaggtctgaagtatgtagtcagtttttgcttggtggaaaaagtaatcatgggtgattcagaaaaagcaagatacttacataataactgttttgtacctttttttagtcttctattactttcataaaattatctttgcatcaaaagttattaacactttcaggactccttgtatgcaaaattctttgaattgcatttcttaatttgtgatcgcactggtaatttatctagcacaatgaactgaatgtgtgtctttatgtttaaagggaaaaataaaattcaaaacagcatatttgatataatttatgattagataayagagaattatcaactttaatataatttttagaaagtaaagcttaggctagtcacgatggctcatgcctgtaatcccagcactttgggaggctgaggcgggtggatcacctgaggtcaggagttcaagaccagcctgaccaacatggagaaaccctgtctctactaaaaataccaaattaaccggcactaacgattcatgagaaatctgccccatgatccattcacctcccagcaggacctatctccaactttggggattaaaattcaacatgagatttgggcagggacacatatccaaactatatcaacagagtttcattgtgttgatcgggctagtctcaaactcctagcctcaagcaatacttctatctcagcctcccaagtacctttggggattataataatcaatcatcttcactttttacaatctactttggtttaataatttttacttaattccagtgttatatagcaactttgatccaatgtatctcttatatgctatgaactcagcagtattgttgtagttattgcctataataatcagatgcttttttaaaaaaagagatgaaatcagaatacacacacacacacacacacatacacacacacacacacatacacacatacaatcttttatacttacaaatttatttaccatttcccatgctgtttattccttataggttcaagttgccatctggtgtcatatccttttatcttaaaagcattttctttagtgtttctttagcaaggataagttctttttatttttatttatctggaaatgtctttatttcagctccatttttgaaggatcatttaactggatacagaattcttaattgacagttatttttccctccacttttgaaatgtcgcttcataagacctccatttttttcagataaaaatgccagtattgataatattactgttcccctgtatgtgataagtcgtctcttgctactttcatgattttcttattatccttggtt

SEQ ID NO: 702018 - DNA, 1368 bp, Homo sapiens
tgttttttctgacaattttgttccacagttgtttgaatcggtggatgcagaacccatgaatatggagagtcaatttcatttcataatgcccaaaggtaaatgcgtaactttttccgcacagctaatcttctagcaaccccattgctgtccatggcaagcaggcttagttaatctcgccctttccagtttcaggttcattaaaaaactcttgtcaaactctctttcatcccaycttattcttcattctcacttccatcagcatatcagtccaggccctagtaacattaatgttactaatggcactgttagtaatattacttaccagcattcaagtgggtctccctgatgccattgtctcccatcctgaaatcactgctctttatatagaacttgtatgatgtcattcattggctcaaaaacttttaaagccttcctttttctactaccccaatctaaatttctatgcctggcttttattaaaacccgtaatttggccccaccctagctatttaactttattttccactattcgccagtctcctccctcatcaacgagaagacataccataatcaacctcaccactaacccttggaatatctaaacttaaaaatggtccttcttttcccctttacttgtatttaaagaacctgacgaattattcctcctctgctaaacttttcacaatttcttcaacctcatttacttttcaagttttcagaacatatcttgccgtttattaggaatctcacaattaggcactctactgtagatagatttacaatcatgtatgttgtcatcttctattaaattccatactccttgaaggcaggagtcatgccttattctgtccctcagagtactcagaatgatgcagagcacacagaaagtactcaaatcttgttgactgatccagtgagaaattaccaacttcagttccagcctctctttaacatgtacatagtaatttgggtaagtcaagctccatcctgaaggacataataagggactctttaagcacattattatgaaggcccttcagggataacaccagagtgatgaggtgccctataccagggacaatggagacagagtacttgggattcatcactggagtcctcaaagcatcttccaagggcataataaggaaggactcaaacacctttgaatctccgtgagaccaggcatgaggtcttttgaaagagttctttaactggagtgaatgtcaaagagaagtataataaaataaaagacgtgagtagggtcccccttgttcataaaatgacactacctaaatcaccaaatctcactgagccttggtttaactcaagaggttccatgccactataagaggtggtaactgccaactg

SEQ ID NO: 702019 - DNA, 635 bp, Homo sapiens
gcttcagcatcctccaccgaaaggtgggcctgtcgctgcatgtgaatggcaaggaggtcactgtggggaagcggctgcctcctttctctttcctgggcccctggtgcytctctcctgggggtaaggcagttgagcctacccacaagtccaggcaggaaggcagccccaccccagcacccagaaattagaaaaactagctgaggtgtgagagggggaatggtgacagccctggaagtcaggataaaaaagagacgaagcctccaggccgccatcctcaccagtgcccaccgggccctgaagctctgcagggggtggcttatgggctcagaggcttgtggaccaaggcttctcagctgcttctgaggctcccagctctgcaaggggctgggtttcttctcctggtaaactgctcccaatgcctgtcctgactcactcacttagctgggctacctgctgggcctccttcctggtgggccctccccatgtgcctccctgtgcaggtggggtatcccctcgagactccattattctttgaggctttcaggccaggatgaagaaccccagcctctcagcaggagcagccacttgggggaagcagagggaatagaaaggcacacattgccagctctgagcat

SEQ ID NO: 702020 - DNA, 591 bp, Homo sapiens
tgaaccaaatcaaatatcatataaaaattatacataagatatgaatctgawtcatatataatgtagcttatccaaacatattttagatgaaactgtcagtattttttatattatcaacatagaactgttttaagataaatcatttattcatttttcatctcaatcaatatttttataagagatgacataagttagatgattcagctaatctacactgaaagcagtggataagtcaattacaatttttgctcaaatatggaaaaaatctgactgattataatcaaaatcattaactgtcatttacttttcctgaaagctctttatttaatataaaatctagacataaagaaactaatttatcctcttaagtgctataaacattttctctcatttcattttttttttagttgtcaattttgatagtgttcaactagaagtcacgaataggcaatccactaacataggttcacagttctcatatatttttgaaacattgaaatcaacctgtccccaactccactccagaggctaatgtcaaaatacctgctgaaagcaatgccaagccaatatctctgaaatataaagttggct

SEQ ID NO: 702021 - DNA, 591 bp, Homo sapiens
tgaaccaaatcaaatatcatataaaaattatacataagatatgaatctgaaycatatataatgtagcttatccaaacatattttagatgaaactgtcagtattttttatattatcaacatagaactgttttaagataaatcatttattcatttttcatctcaatcaatatttttataagagatgacataagttagatgattcagctaatctacactgaaagcagtggataagtcaattacaatttttgctcaaatatggaaaaaatctgactgattataatcaaaatcattaactgtcatttacttttcctgaaagctctttatttaatataaaatctagacataaagaaactaatttatcctcttaagtgctataaacattttctctcatttcattttttttttagttgtcaattttgatagtgttcaactagaagtcacgaataggcaatccactaacataggttcacagttctcatatatttttgaaacattgaaatcaacctgtccccaactccactccagaggctaatgtcaaaatacctgctgaaagcaatgccaagccaatatctctgaaatataaagttggct

SEQ ID NO: 702022 - DNA, 591 bp, Homo sapiens
tgaaccaaatcaaatatcatataaaaattatacataagatatgaatctgaatcrtatataatgtagcttatccaaacatattttagatgaaactgtcagtattttttatattatcaacatagaactgttttaagataaatcatttattcatttttcatctcaatcaatatttttataagagatgacataagttagatgattcagctaatctacactgaaagcagtggataagtcaattacaatttttgctcaaatatggaaaaaatctgactgattataatcaaaatcattaactgtcatttacttttcctgaaagctctttatttaatataaaatctagacataaagaaactaatttatcctcttaagtgctataaacattttctctcatttcattttttttttagttgtcaattttgatagtgttcaactagaagtcacgaataggcaatccactaacataggttcacagttctcatatatttttgaaacattgaaatcaacctgtccccaactccactccagaggctaatgtcaaaatacctgctgaaagcaatgccaagccaatatctctgaaatataaagttggct

SEQ ID NO: 702023 - DNA, 591 bp, Homo sapiens
tgaaccaaatcaaatatcatataaaaattatacataagatatgaatctgaatcatatataatgtagcttatccaaacatattttagatgaaactgtcagtattttttatattatcaacatagaactgttttaagataaatcatttattcatttttcatctcaatcaatatttttataagagatgacataagttagatgattcagctaatctacactgaaagcagtggataagtcaattacaatttttgctcaaatatggaaaaaatctgactgattataatcaaaatcattaactgtcatttacttttcctgaaagctctttatttaatataaaatctagacataaagaaactaatttatcctcttaagtgctataaacattttctctcatttcattttttttttagttgtcaattttgatagtgttcaactagaagtcacgaataggcaatccactaacataggttcacagttctcatatatttttgaaacattgaaatcaacctgtccccaactccactccagaggctaatgtcraaatacctgctgaaagcaatgccaagccaatatctctgaaatataaagttggct

SEQ ID NO: 702024 - DNA, 896 bp, Homo sapiens
ggtagacacaggcccatgaaatcctgagcatgtgtgacsggcagggttccctggggcagacgccagcttcagcacagcagtggggacgtggatcacggtgaggtgttggcctgggaatgagccaagttaagccagggcagcccccttcctccagctctctgaatcattctggatttagatccccagatttcctgcagattcgaatgaaccaagatcaccaaaataaaaggaaaccaggcaccacctgtgaggatttggaggaaataacaaatgcagacttttggcaatatgacggttaaagtaaaaaaactcaatggaaaaagtatttggaaaactcagtgaaaaagttcaacacttgctcatgaaaaacaatacaaagacacaagctgctagaaaggaagctaatctgataaagaatatctacaaatgcattgatacttttccctctgaggttgggagaaagacaaggatgcccactgtcatcactcctattcagcactggaaatcttagccagtgcaataaagcaaggaaaagaaataaaaaacaaatggattggaaagaaaagaaagaaggccaagtgtggtggctcacacctgtaatcccagcactttgggaggctgatgcataaggatcacttgagcccaggagttcaagaccagcctaacatagtgagacccctgactctacaaaaaattaaagttagccaggtgtggtggcacatgcctgtggtcccagctacacaggaagctgaggcaggaggatatcttgagcctaggaattcaaggctgcagtgagctgtgatcacaccactgaactcctgaactccagtgtgcgtgacagagcaagactctgtctcaaaaaaaaaaaaaaaaaaaaaatcactatttacaagtaa

SEQ ID NO: 702025 - DNA, 390 bp, Homo sapiens
gaggtcatatgtaggtgttccagctgacagcatcagagaatgtctcaactgacagccggcatcaaccaccagacaagtccctgagtcagagccttcagataattccagccactagatttcagtggctggaattatcttcagccactgaagataattcagtcaccccagctgacattaastgatgcaggcaacctgtccctacagagccctgagcaatttgtagatctgtgagcaaaacataggtcatcattagttcaaatcactaagtttagggggcagtttgtgatacagccatagtaactgaaacagcatgcaaatgcttactgcttctttcttagcaataaccacagaaacatggtaacagttaagttttatgtcctgctttagagt

SEQ ID NO: 702026 - DNA, 390 bp, Homo sapiens
gaggtcatatgtaggtgttccagctgacagcatcagagaatgtctcaactgacagccggcatcaaccaccagacaagtccctgagtcagagccttcagataattccagccactagatttcagtggctggaattatcttcagccactgaagataattcagtcaccccagctgacattaagtgatgcaggcaacctgtccctacagagccctgagcaatttgtagatctgtgagcaaaacataggtcatcattagttcaartcactaagtttagggggcagtttgtgatacagccatagtaactgaaacagcatgcaaatgcttactgcttctttcttagcaataaccacagaaacatggtaacagttaagttttatgtcctgctttagagt

SEQ ID NO: 702027 - DNA, 644 bp, Homo sapiens
cccccactcagatagtattgtatgtatctgtcttgaatatttaaaattaagggctgcttgcttacctgtcagggtgccatgctttcctatctcagatgagaaaacaaactaaggacaaagtaccagggattccatgttctcttttggagaaatgatttctttagcacagagacacgtgttaccctaagaaagcagatcttgactgctgctgatagatactttattaaaaattcaccgcctatctcatttgctgtgctgggttctaatgaaaccttctataaagcgatatctagttatttctcttggattatttattcattcaacaaacatcaattgagcttctactatggtatgttaggttgcataatgggagtacaacagtatatggatcccagttcctgtccttggaaagcttacagtgaggctcaagacaaacattaattttaaaaaaagaaakaaatagcctggagccaagaaggccgaatgggaacagctccggtctacagctcccagcgtgagcgacacagaagatgggtgatttctgcatttcaaactgaggtactggtttcatctcactggggagtgccagacagtaggtgcaggacagtgggtgcagtacaccgtgtgcgagccgaagcagggca

SEQ ID NO: 702028 - DNA, 659 bp, Homo sapiens
tctctcctccctggtaatgcaattatatattgtttagacattttgaatatatcccttatttctcttaatttcttaaaatcatttttttctttttagtttctttccttcagtttgggtatttttctattgcattgctttccagttcaccagttttatgtccaatctactgttaaaactattcattgcattcttaattttggatattatgattttagttctatagtttatttaaaaaataattctaattcttaattgcaaattgccattattctatttatattgcctctcatttcctctattttcttgaatatattaatcataattattttaaaataattgtctattgtatctagaatttgggtcacttgtgaayctaattctgttgtttgcttttaaaaacattaaagcacattgagcctatggtcttatcttttcacagatctaataatttcttgtaagctgaatattttgtataaaagactgtagaggttccaatgatgttcttttccacatgaaagtgttttgtgtctcctctctaaggcagaggaggttgattcccaagggccaaccattagggattggtgtagttttgatcagactcaacctacctctgttctcagggctttatctgagagcttggaaagtctttgcatcctgag

SEQ ID NO: 702029 - DNA, 659 bp, Homo sapiens
tctctcctccctggtaatgcaattatatattgtttagacattttgaatatatcccttatttctcttaatttcttaaaatcatttttttctttttagtttctttccttcagtttgggtatttttctattgcattgctttccagttcaccagttttatgtccaatctactgttaaaactattcattgcattcttaattttggatattatgattttagttctatagtttatttaaaaaataattctaattcttaattgcaaattgccattattctatttatattgcctctcatttcctctattttcttgaatatattaatcataattattttaaaataattgtctattgtatctagaatttgggtcacttgtgaacctaattctgttgtttgcttttaaaaacattaaagcacattgagcctatggtcttatcttttcacagatctaataatttcttgtaagctgaatattttgtataaaagactgtagaggttccaatgatgttcttttccacatgamagtgttttgtgtctcctctctaaggcagaggaggttgattcccaagggccaaccattagggattggtgtagttttgatcagactcaacctacctctgttctcagggctttatctgagagcttggaaagtctttgcatcctgag

SEQ ID NO: 702030 - DNA, 637 bp, Homo sapiens
gcaaggggatcggccactcttggcctgcagttccccaactgtaaagtaaggaggactatttagaatgcccccctccccccaactcttctacctggctctgtgtcccctggggctgacccacataggctgcatcaacagactccgacctgccggcctctggctgaggttgaccaatgggaatcaccggcagcagatggagggcagacaggaggaagtaggggcagtcatcccccggctcttgcccaccagggctgaggtttgggagtggctgtgtccctctcctgacatcacagctcctttgggcagcgcttttttatttttctttttgaggcagggtgtcactctgtagcccaggctggagagcagtggtgccatcatagctcactgcagcctcaacctcccaggttcaagcagccttctcacctcagcctccccagtagctgggaccacaggtgcacgccaccacacttggctaattttttgatttttttgtagaaacggtatcttgatatgttycccaggcttgtctcgaactcctgggctcaagcgatcctcccaccttggcctcccaaaagtgctgggattacaggcgtgagccactgtgcctggcctagcctgttcttgcaactgcctgtat

SEQ ID NO: 702031 - DNA, 2308 bp, Homo sapiens
tcacttttgccaatatgtactcttgggcaataacgttttatcctctaggcctcaatttcctcctctgccaaatgagatgatgaagctagattagaagttctcaaactttgttttaaggagctgtcatatcctacaaaaatgcctctaatggtatgacttgggtctccttttaaaaatatattttaaaaactttaatagaataacatgcatctatatgtgggctatacatccatatgtatatggatccatatggacatatgacatccatatgccaactaagttgacagaacctaataacctaataatctgtaaatattgtacttggaacttgtaaaatggatttatctagtgtccatattaactactggggatttttcatcaggttgcctttgaaataaaggatttgattgctaaaatattttcaagccatggagctaatgatctctgmggatccatccagtctaaaattctaaataattgatttcattaaattcatgtgaataaagacaaatacaaatgttccttggcattcccttgatgcactagatgtcttggagtactgaaggcatttgaaagtcaacatcctccacatctctcccagatgtaaaacaaatgttcttgcagatttctttggatggtcgtttagctatttagtcagagagaatatatgtggaatggcaattaatgcagcaacaccttcacaattagaatatgagataaatgcggatggcaacacttttgcctacattttaaaaaacaaaaatctgatgatgtcaccattcttatggaaacctcaccctgagctttggagccagattgatttttaagaacgctctggcccaggctttgtggatgagagggattgttgtccttttccatgctgaaatgagggacaaacagtaaagatcagtatcaactctatttcagcaaggtttacatgtacccagccagttgcttaactagtacaaaaggaaaaagaattgtcattgttttttagtggaaattctttaagaatgaagttagtctttctcttagggactatttttgtaaatcaatctgtagttgagtccctatggaaaacatatttcatttataaacttttttctgtgtctttctgttgggagacaaatgtgattgattttacaagactgacggtttgatcagattagtttattgcattagccctttaagatcactatgatttatttgttttccatgaagtatttatttaagtattttattgttgcttatccttgtataatttttgaagattgaagaaagaactgtgagtatacaaatcaacatttaattatgatattgggtgaaggctatataaattgtatgagaaagactccattaatatttacacttaaccgggcacactatggtcattttaaggtagtgaagacttaggggaaaacaagatgaattgtattgtgtactaacctatatttaacaaagtaaaattcatggtgggagggtattgagtcccccaatttaaaagcaatatgcaatttttttcctactgcttaggtttgcagttaagtcagcaaagtcctccattcacctaaaagggaataattctataaaatattctggttcaaaggtcaaggaaatcaaatttactttcaatcagatactcattaagattaagctaattacagcatatattgtgaagggcttttccatattgtcttcagaagaaaagattaaactgtttaatatttttatttctctgggaagaaagctcccttccaaaatttgggtctgacttttaaaaacattttaaggatgcatcacatacaaacgtagaaactacatgtactaagcttaagcattaaaaaggcagaaagcaagtctgtcttgttccttgctactttttctctgctttgcatagacctcacacttaggatccataaatccttgttgaatgaatggtaggcattagctgagaagggtagcattgcagtagagcagctaagggcatgcaattgggaaacagaggctctgtagaaattctcactttacgagtaaagcacatggcttaacttttctgagttcagtttcctcatttgtaaaatgagggtgatagtgcttgtttcagaaggttgctatgaggattaaatgagataaccccagtaaagatgttagcccatgtctggcaagtggcaaatgttcaacaaatgctagctctgagtattctcagcaaagcacagaaagttttctaggtaatggatttatctttattttttatgttttctagtttcatagtgtattttgtattataaaattataaaatatattagtc

SEQ ID NO: 702032 - DNA, 665 bp, Homo sapiens
ccagtccccactccacggtgcagctgcggcttatctctcagcccagcgagatgccagccttcctgtcccgggtgagctgcgcaccctgcctggggagcaggggaggagggttggggagccacaggcacagggccagcctcccggtggctctgctaaggccagacctcccgccacccctctaggccagcgctctgacatgcagaaggtgaccctgggcctgcttgtgttcctggcaggtgagtacccatcccccgtctgccttttcctctggatcccctggatgcggggatccaacctctgtctctctcctgtgcttttctacctccccgggaaggtggtaaatgttagaacagcatctccctgagggtaagaaaagtcagactagtgatagccrgggatacacgagaagagctggctcacacagctggaaagtcaccgtcttccccattctctcgatctcttctttttttttggctttttttgtttttgtttttgtttttgtttttgtttttgaaagggagtctctgttgctcaggctggagtgcaatggcgcaatcacagttcactacagccttgaactcctggggtcaagcgatcctactctcttagcctcctacacagctagaatgccaggcacacgccaccatgcccagtgcatttttgat

SEQ ID NO: 702033 - DNA, 665 bp, Homo sapiens
ccagtccccactccacggtgcagctgcggcttatctctcagcccagcgagatgccagccttcctgtcccgggtgagctgcgcaccctgcctggggagcaggggaggagggttggggagccacaggcacagggccagcctcccggtggctctgctaaggccagacctcccgccacccctctaggccagcgctctgacatgcagaaggtgaccctgggcctgcttgtgttcctggcaggtgagtacccatcccccgtctgccttttcctctggatcccctggatgcggggatccaacctctgtctctctcctgtgcttttctacctccccgggaaggtggtaaatgttagaacagcatctccctgagggtaagaaaagtcagactagtgatagccggggatacacgagaagagctggctcacacagctggaaagtcaccgtcttccccattctctcgatctcttctttttttttggctttttttgtttttgtttttktttttgtttttgtttttgaaagggagtctctgttgctcaggctggagtgcaatggcgcaatcacagttcactacagccttgaactcctggggtcaagcgatcctactctcttagcctcctacacagctagaatgccaggcacacgccaccatgcccagtgcatttttgat

SEQ ID NO: 702034 - DNA, 467 bp, Homo sapiens
gaccttccagaaacttcttttgttcaatcacttgtgacagcagttggtcctaaggtcacttgggtccaagagtgtagttacttttggatattccttgcccctgaccctggcaatactgagaacagagatatacccccgccccatgccctgtttgtaaacttcatcctgcttccccaccaggcacacgcagccttgtggacctggccctcaacacatcccctgtaaaatcccatgggacccactccgccctgggctgggtcctcgcctcttttttttttttttttttttgagawgggatcttactctcttgcccaggctggagtgcagtggcacaagatcacggctcactgcaacctctgcctcctgggttcaagcaattcttctgcctcagccacccaagcagctgggattacaggtgtgtgccactacacccagctaatttttgtatttttagtagagactgggtt

SEQ ID NO: 702035 - DNA, 890 bp, Homo sapiens
acctgggagacggaggttgcagtgagctgagatcacaccacctgtctgggcaacagagcaagactctgtctcaaaaataaaaacaaaaaagaaaaaagaaatgagatctcgctcggtcacccaggctgaagtgcagtggtgcaatcagggctcactgcagtctcaaactcctgcctcagcctgccaagcagttgagaccacaggtgcatgccaccacgcttggctaatttttaaatattgtatagagatggggtctcgctatgtttcccaggctggtctcaaactcctgggctcaagggatcctcccacctcagcctttcaagtagctgggactctgcgtgcatgccacctcgcttggctggaagggaattttttacaccaggtgaggccttcagggggactgaccttggcgcttgttaaacaagggtggctgagtaatgctcccatagcaagaggcaaacacatgcccagagatgggagacagtctctgaaagggaggacaagtgcaggccacctcctgcctcataccgtaaaggggactgaccatctcctaaatcctgccagttagcacgatcgtccctttcctacctgtgaggcagcaataaacaggtgacgcggagggagtcgctgagccctgctgaagaacagcaggtggggctcagccagggcggcccctatcccttaggtgcagtgctctgctgggtcccgagaaatgcatttcctagacagagccctgtatgtttcagagagtggccctgggggcctggggagacacggtgtgcggtggaaggcagggtgtgggtttgyagtgccccgaggggcaggagcgctgaccttggtcttcccgatctggtagttcctcttgtctatcttcattttctccaggaggg

SEQ ID NO: 702036 - DNA, 863 bp, Homo sapiens
ctcttgcatccttgtctcagatcctggcagtgcttgcttcacagccacagctgaccaaaccttgctcactttctagccccacctgcaggagcactcctggtttcgatctcctgtcccagcagcaatagcttgagtttctgtaatgccccagtttcagtgtctctgggtcttgaacagcatacaatttccagaggacaagcttgaaaatgcttaagtgtcagaaaggtgtggaacccagcaggagttcccttcccggagtagttctgtccaatggtgtcctgactctctatgttagtttcatagggttgagtgcttctcccttggccaggattgctgaattccgccatggagatgtggaygactggaaatccctaactcagtcctttgtgcatgggaagtcactcccagctcccagccaatcccagccagggaggctgcctcttttccttctccttccctgtttttgatgtcctctgccacttctctggtggattccaggattttcccttggataatgtaattcgactgtgactgtctatacattactctggttcttctaagtggaggaggcaggcatgaaatgcttctagttagtcgtcttgaactacactacccttatttgaacaatttttaaacacagtagtatctagataaatattcattcatccttactaaaataagagagctagttttacctttatttgatatataagtaattgagccaccaataagtataatacctgtcctagattatcttttaagtaaaaatgtggcacataatagaaaattcaacgaaatttgttttaatagtaaataaagttatatcatgctcatagactggaaggttaaatatgaagttgtga

SEQ ID NO: 702037 - DNA, 638 bp, Homo sapiens
tagcaattgctccgcttcttctaacaaggcaccagccaggactgcaaataagccagcagacaatcagttcaggcaaacaacaaaacttcacttttagtataatcagcacaagttagatgctatcatggaaagaagcagcttctagaattaagctgcaagtcatcttagaggcagaagccctctatttttaaaagaaagcctcgttttagttctagcgaaggtcgaataggacatgtgtccccttacagatgaacattcaaccctcagtgatgtgaagaacgtaactraagaatataatgtaaaaagaacatttttctaagaggtaaaaagctattatgtttcctgggccagggtctactcagtgaaattcagcctggtgatgagactaaaacatgtgtttattatttattccccccacccccatcctcctttctcctcattttagggtcgcaaagatgaattttgtttaaatctacagctctccaagcgcaccgagaacagtgcttggcatacaatagtatccaataaatatttgttgaatgaattcaaatttcatctgcagaaaaggtaaccttactgatattttgtcttcaatctccccaactttttaaagatttcaaatcttcagaaaaaaaagg

SEQ ID NO: 702038 - DNA, 593 bp, Homo sapiens
gattttttttttttagctcatcagctatcattagtgttagtgtattttatgtatggcccaagacaattcttctttttccaktgtggccaagggaatccaaaagattggacacccccaattcagatcattctttacgaactcattagctaaaatatactgttctttttaataagcattttaattttttaagacatttaatagactagaggccatgctaaatctaaagctttcagttatctatgagtgacaaaagcctaaaatttcagcctgtaaaacataaattgatgatccatccagtcaatagagtttcagaaattgcaaatgctgtttcatgaaatggtaactatgttccataagacaagccttatagaatctatctttaccccaccgctctagctctcaacatatctaaagctcttggaaatttttttaaaaaattaatcctaaatgttctaaacatctaaaacacagcatagatgacatgagttaatatttattattactttggtctagcttacaaatttctgtatctatgctgtgctacaacacagtgagatttcagggttcatagcccctatgccctcaagtgccct

SEQ ID NO: 702039 - DNA, 663 bp, Homo sapiens
ataaaccttgtgtttccagaatgcttataggacatttgtaggctgtgttgccatcttttttcttcttggccacaatacgtacaagcccgattatccactgctttctagctcccagcagactcgagttagttgttaagaaggaaccatgctgctggaggcagaggcactacccacatccacatataaaagagagagagacagaagaacaatgaaargcagagacgagcactcagaaatgtacaagaaaatacaaatacatcgatcaaatagaatgaggttgaaaagtagatccactttcatgagtgtactttttgataaagaaggcattccatattaattgtgaaaggatacaaataaatagcattggctgggtggggtggctcactcttgtaatctcagccctttgggaggcccaggcgggtggatcacttgaggtcaggagttcgagaccagcttggccatcatggtgaaactccatctctagtaaaaatacaaaaaattaggcgggcgcggtggcaggcgcctgtaatcccagttactcgggaggctaaggcagaagaaccacttgaacccaggaggcagaggttgcagtgagccaagatcgtgccactgcactcaagcctgggcaacaaaagcaaaactctgtctcaataaataaataaa

SEQ ID NO: 702040 - DNA, 624 bp, Homo sapiens
attgacctgattttcatatccaccatcacaggcaacttttctagaagagagaaccctggtctcattattgcttgcttcctccccacttttccccatctgccccaggtaagagactttttacaacaagttccctttcaattaaaattcctggctgggtgcaatgattcacgcctgtaatcccagcactttgggaggcwgaggcaggcgaatcacctgaggccaggagttccagaccagcctagtcaacatggtaaaaccctgtctctactaaaaatacaaaaattagccaggtatggtggcacgttcctgtaatcccagctactcaggaggctgagggaggagaattgcttgaacccgggaggcgaagggtgcagtgagccgagatcgcaccactgcactccagcctgggcaacagagcgagactccatctcaaaataaataaataataaataaataaataaataaaattcctatatgggcagtgattgtatttagcaaactggtttctgatctcacctcttattccacaccaagctcctggagacatatcaggtgtgcagccagcagtcaagagggaggaggtcagacattataagtgttctgtgtgagtgacgtataagccaa

SEQ ID NO: 702041 - DNA, 624 bp, Homo sapiens
attgacctgattttcatatccaccatcacaggcaacttttctagaagagagaaccctggtctcattattgcttgcttcctccccacttttccccatctgccccaggtaagagactttttacaacaagttccctttcaattaaaattcctggctgggtgcaatgattcacgcctgtaatcccagcactttgggaggcagaggcaggcgaatcacctgaggccaggagttccagaccagcctagtcaacatggtaaaaccctgtctctactaaaaatacaaaaattagccaggtatggtggcacgttcctgtaatcccagctactcaggaggctgagggaggagaattgcttgaacccgggaggcgaagggtgcagtgagccgagatcgcaccactgcactccagcctgggcaacagagygagactccatctcaaaataaataaataataaataaataaataaataaaattcctatatgggcagtgattgtatttagcaaactggtttctgatctcacctcttattccacaccaagctcctggagacatatcaggtgtgcagccagcagtcaagagggaggaggtcagacattataagtgttctgtgtgagtgacgtataagccaa

SEQ ID NO: 702042 - DNA, 1359 bp, Homo sapiens
caactatttttttttccaatagattccagatccttcccattgagcaacagaatacaggggctccctcttctatgctgtagtagctatccattctctttcttttcctcagaacccagcacccaagtttttctctggaatattacccctcatcaaattgtagtacatttgggtctggtattgttgattgctactatctccaggggtgggcctatgattcaaacatgaacacatagcactcccaagaccgtagttattatttcaggaaagagcacaaagcctaattcaggccagcaattttactttgaattgttgagcaagagaaacactcattgtttcagtgatcttggaggtagagatcctctgaccaccatcttgcccatgggaagcaagagtctctctggaaatggagccaacatacactaaggaagaagagaaagaaagagtgactgggtcctgaaatatacagccaaatatgaaagcagattacttcctgcacttttcagttgtataagtaatgcattcttttattttccaccttaattttgcttgggctgcatttactgtcacttgcagccaaaacaatctcgactgaaagcacatatcaacgttctatatatatttgaagatggatgctacttcctctccagaattttatattattttagacaaacattctcagttcttttcatttctgcttatattaaataagtttacaaaatctctttcagatttggtttctgtgttcttcaatgtctgctaaattaaaaataaaaatttaaaaaaattgttgacataaaaagcatataaaatatacaaagaaacttttattcaatttcataagaataattttaaacactttagaaatgctgcttcatgtcatttaagatagcaactttaatctttgttagttcatcaataaatcaggtttccaaatgacctctatgtggtcatactttctttatttctttctttattttttaacttttaggttcaagggcacakgtgtaggtttgttatatgggtaaacttgtgtcacaggggcttgtcgtacacattattttgtcatcctaggtactaggtactaagcctagtgctcaacagatattttttctgatcctctccctcctcccagcctccagcctccagtaggccccagtgtctattgtttccttctttatgtccttgtgttctcatcatttacctcccatttataactgagaacatgcggtatttggttttctattcctgcattagtttgctaaggatagagggtaatactttattagcaactcaagttatcacatatttttaaataatccaattacatctttttttttaatatttcatggttgtaattat

SEQ ID NO: 702043 - DNA, 943 bp, Homo sapiens
ctgttcccagcacttagaacagtacctggcatgtaataggtgatatttgttgaataaatgaataaatgtagatttaataagaaggatgaacctctcttttttgctggccaagggaaggagagagtaccagaagacttttttgaccaagactcaaggaaatatgaaataacttgacttttggggtaactcaaaggaggaagaataaccatagcttaaagctgattaattatccatacctttcctccaacgttgaaagccatttgtctgatttaaatgacagttctcactggcagttacctccacctttaggcatctgtggtttggatacctattcagtaacttccctaattgtctccataccacactcatgggaagtactcaattgtaacccagagraaggaaggcagaaaggaagtgtcatgaccgatttcctggggtccttcttgagttgtcctaagaactaatggggattattataaaggttctacaaacttgacattgatgctggtttatagagaagcatcagaagacaactccccattggccaaagagaaaactgctgaaggaacctccttgccaatttgtttcagggtctgctttccgggatccccagggcggggaaaaactggttgacatcatctctctgttctaggcattgcccctgttcctccacctagggacctaagctgggaagcaggacatggaggaaatgtggctttgccacttaaggagacatccgtggaaaactttctgggagctaccacacctgccctggctaagctgcaggtgccgcgggagcaactctctgaagttctggagcagatttgcagtggtagctgtgggcccatctttcgagccaatatgaacactggggacccttctaagcccaagagtgttattctcaaggctttaaaaggtaaaacaagaagtgtttgactccccc

SEQ ID NO: 702044 - DNA, 943 bp, Homo sapiens
ctgttcccagcacttagaacagtacctggcatgtaataggtgatatttgttgaataaatgaataaatgtagatttaataagaaggatgaacctctcttttttgctggccaagggaaggagagagtaccagaagacttttttgaccaagactcaaggaaatatgaaataacttgacttttggggtaactcaaaggaggaagaataaccatagcttaaagctgattaattatccatacctttcctccaacgttgaaagccatttgtctgatttaaatgacagttctcactggcagttacctccacctttaggcatctgtggtttggatacctattcagtaacttccctaattgtctccataccacactcatgggaagtactcaattgtaacccagaggaaggaargcagaaaggaagtgtcatgaccgatttcctggggtccttcttgagttgtcctaagaactaatggggattattataaaggttctacaaacttgacattgatgctggtttatagagaagcatcagaagacaactccccattggccaaagagaaaactgctgaaggaacctccttgccaatttgtttcagggtctgctttccgggatccccagggcggggaaaaactggttgacatcatctctctgttctaggcattgcccctgttcctccacctagggacctaagctgggaagcaggacatggaggaaatgtggctttgccacttaaggagacatccgtggaaaactttctgggagctaccacacctgccctggctaagctgcaggtgccgcgggagcaactctctgaagttctggagcagatttgcagtggtagctgtgggcccatctttcgagccaatatgaacactggggacccttctaagcccaagagtgttattctcaaggctttaaaaggtaaaacaagaagtgtttgactccccc

SEQ ID NO: 702045 - DNA, 625 bp, Homo sapiens
caaaaactacagacaggcaaaatgctcaacacaagtaaatgacagcttgtctatatgatgaagaatcacattttgaaacatttcatgatctaagaaaattcttgtaaaatattaagtgaaaaaaggttataaaacgttttataaaatatcatctcaattttctttcaaaaacttgtatgggtgtattatttagatgttttttggtagcttgtattcaactactctggacttcatacaaccatctgctttttactcttagaaatttaaaatatacaagtattgcggatgtttcctatttactattgtttttgagattataaagttgatagttatttttgagtgtttggatataagatgatttctgctttctatttttattgtttctgtaatccaccaataactgtaattttgtatattcacttattcaytccctcaaatatttttatgtctattatagtaaagttcttaaagcttgctataaatggaatcttaatgctggctacaaatggaactaaacagagccattagataagtgctagcagagtccctgagcatatctgaaccagctcctattaaggaaacagaagcccagtggatctaaaagactttctctatctgatagaac

SEQ ID NO: 702046 - DNA, 655 bp, Homo sapiens
ttccctcggaatgacaatgaagcagccccaaaattgtacaccccaattctctgccctcaacatctccaacaatagttaaaccatctgcacttacactttaaatgccgggaggtaggagtatatagagatgctgcttaggttataaataaacggcaggtgttttctgatatctgttgttgcccagctgctaaaaaatgtgttcagtatgccttggtccccacctaaaagaaaaaaatatataaattagttaacagatctctagacagtttaataattttataggagcacataactggacctttaaaaatagacactaattccattttttttttttttttgagacggagtctcgctctgtcacccaagctggagtgcagtggcacgatctcagctcactgcaacctctgcctcctgggttcaagcaattctcctgtctaagcctcccgagtagctgggactacaggtgcatgccaccacgtcaggcaattttttgttatttttagtagagatggggtttcaccgtgttggccaggctggactcgaacccctgatctcaagtgatacacctgccttggcctcccaaagtgcaaggactaccaaygtgagccatcacgcccggccctcatttttgagttaagttccttgacacaccaat

SEQ ID NO: 702047 - DNA, 3072 bp, Homo sapiens
cctacctcactgaagtttttatgttttgaagattcccctttcacagtcctattctgctttcacttgtctcttattcattctgttccctgtgggctcacattaaacctgatcttgcttggaccaraatttcataccttctaccaatccttaatcttcttgttaaacctatttcatcagttcctatttccagatttccatacgattttggaaatagaagcaagcaaaatcttctggctagcaattgagaacttgtcatttaaagtaagctttaaattatttcctaacttaaaaaattacttacctggtgaattatactattatttcattcactttattgatttgtaaaaaacactgtaattcatagaagcaaattatctttcagtatacttcaaactattgctaacacatctaaataatgtcattcagtgaatgggaaacaaagtaaacaaaaactaatttttaacatggttttctttctccataccttccaatagtggctctgccttcatttttcacagactgataaatctttctctcttcatctgaaagtgtaatgtgctgaataaatactttacgttctggtaactccaaaacaggttttcctttaattttgcttgtctttgttcttctaagtgtaatatttttaattagggactgtaaacgcctaatcagaataaaacaaataattatgtaacttttaatttctacataaattgatccaagaagaacgaaacagaacattttaatttgttactgttttatagcttctgtaaaagtgtttttaaaatcccttatttgggattttaaccaatctgataatcacagaagtattctacaaaaataaaattattaaaacaaatgtatggaaatttcccctcaatacctaacatagtttaatctttttatatcctgtccttattttcgtaagttctgttccccatttttgttccaatcactaactcttttacttctcaactgtcctgtcaactccatcaccgaatagtcaacactcaaattctaagtatctattaagtgccaggcactgaattaaatgttgtaagaatacaaatatgggtaagatactacattctgtaatattaaaatcaaaagtatataaataagtaattgtataaagtaatgagtgcccccaaaataaaaagataatatggtaattcagaacacagaaaaatgctttacaggttccacaatctttacatttctttctcagtactggaaaaaaagagatgtatcaattcttgttttttcccaacattgaaatataaatacaatttcctggagtttaaatagttggttttgaggaatcaagtggatagtactgccaactaggttagtggctcttgaagctttctcactataactcacagtaagaaacacattctatccagcaaaaatatacaaacacatacaaaagaaacaaatatttcacaaaataatacttactatgtatcatgcactccgatatttactaatctcttctctatttcattgtctttttaaatgctggctaccacctttataatgattttatatcccactaatagctctcaaatcttcagtctataaaccggtgctttagccaaaaagttgaaccacattacatcttgcaaaatggctatcactgagttttaatttatgttctcaacttttatctatctccaccagaaacaaccacataaaactttcctatacaacttttgctaaggtcatggtacctcacatcattcactatataaagctatgtaaggccaggtgtggtagctcatgcctgtaatcccagcactttgggaggtcgaggcaagaggataacctgaggtcagaagtttgagactagcctggccaacatggcgaaaccccatctctactaaaaatacaaaaattagcggggcatgctggcgcagacctgtaatctcagctacttgggaggctgagacaggagaatcgcttgaacccaggaggcggaggttgcagtgagccaagatcgcgccactgccctccagcatggacgacagagcaagactccatctcaaataaataaatacataaataaataaataaagctatataagatatgaaaacttaatgcatattagatcctcaaaggatatacgatgtttcctgctaaatctgttaatgctggttttggggctttggggcttagcaacacacaaaaaacagttatgtctttcctttcagtttagccacaacaggggaagggtagttatcgacaattagaaatctttgtctttccaaacaagcatcactaggttctgaaagacaaaggtactgagccataaacactttttagaaggaaaagttaagagtcaagttaaaatagtaaagaaagtgccaactggttcaagctactaacagttatttgtaactaatattaatcactgtctgaaagtacttacctaagtcctccttcatctcccattgtgacaggacgctgtattgttctatgccaccattctctatcaataaatggtttaagttttaaaaaggaaagaagagaccacaagtcctttaaagaattctggattggagtacctagaaataacaggaaactgttataactctttaaccagagtatccagtaagagtatctatttggcccaatcagagaagacaacaattgaaaatgggcactctgtaccaggctcatcattatcaattaaattaaactatcaagtgttgactataatcatttattaaaaatatacacatctcaagatacagttttgctctaatttttagctctcacatgacacactagccaagaaaaagactggaaaattcaactttctccttatcaagtacatctgcttatttagtttttaaagcagcagcactagcagaaggaaaaagcaactagtttaagtttacattcttttccttaccttctagtaaaggtactgtgaatggcaaacaggtttgaggatgggaaacagaaatcaagattatgactggatgactagagtgtctactccatttccactagagtgtctactccatttccaaggttcaagaataagtctagtgactgttccataa

SEQ ID NO: 702048 - DNA, 642 bp, Homo sapiens
ttgtactccctccaatctctgcctctaggcccaagaaccagcccccctggggccctcgcctgtgctcctgagtttgggtaaggccacttcttttagctctaggggaggtattgtctgccgctgactaacttccacaacactgcagctttcctgctttgtccttgaagctttcaatagccactctatcatttcctcacattgaatcccctgtgtttgaaatagctagcttggcttctcttttcctgactggaccccagttgattcactagagaagaaagcatcaactaaagagaaagcagattgtgctgtgtgaagagcacagcacaataataataagtaaaaatgaagagtaggccgggcgcggtggcttatgcctgtaatcccagcactttgggaggccgaggcggacggatcacgaggtcaggagatcgagaccatcctggctaacatggtgaaaccctgtctctactaaaaaatagaaaaaattagccgggcrtagtggcgggcgcctgtagtcccagctactcaggaggctgaggcaggagaatggcgtgaacccggggggcagagcttgcagtgagccgagatcgtgccactgcactccagcctgggcaaaagagcaagactctgtctcaaaaaaaa

SEQ ID NO: 702049 - DNA, 594 bp, Homo sapiens
tgaatacagaaggtctgactcccccttaacaatatgaaatgaagagtctgaaataaagtcccggctttagccgggagcggtggtgtacacctatagtcccagctacttggaaggctgaggtaggaggatctctgaagyctaggagttcaaggctgcagtgagctatgatcacgccattgtactccagcctgggtgacagagcaagatcctctctttaaaaaaaaaaaaaaaaaaaaattgttccagcttcttaatgcatattctgcccagttatggggccacagcctcctcctttccttctgtctgctatgggcatgttccatttttcaccaactgatggaacacagcatctgtgttgtggtttctttttaaccagaatataagaaagtatttgctgactgaagccagagaaaaaaatagacctgaatttcttcagggttggcagactgctgttacgaaggtaagtatgtgataacaatgaaacccaggcatgtccaggggatggaattatctaagggtgggtgcctttaagagcatttgaagactagtgacagagataccaaggagagcctggaggctccagggaggcagctg

SEQ ID NO: 702050 - DNA, 594 bp, Homo sapiens
tgaatacagaaggtctgactcccccttaacaatatgaaatgaagagtctgaaataaagtcccggctttagccgggagcggtggtgtacacctatagtcccagctacttggaaggctgaggtaggaggatctctgaagcctaggagttcaaggctgcagtgagctatgatcacgccattgtactccagcctgggtgacagagcaagatcctctctttaaaaaaaaaaaaaaaaaaaaattgttccarcttcttaatgcatattctgcccagttatggggccacagcctcctcctttccttctgtctgctatgggcatgttccatttttcaccaactgatggaacacagcatctgtgttgtggtttctttttaaccagaatataagaaagtatttgctgactgaagccagagaaaaaaatagacctgaatttcttcagggttggcagactgctgttacgaaggtaagtatgtgataacaatgaaacccaggcatgtccaggggatggaattatctaagggtgggtgcctttaagagcatttgaagactagtgacagagataccaaggagagcctggaggctccagggaggcagctg

SEQ ID NO: 702051 - DNA, 587 bp, Homo sapiens
gtggtgaggagcacaggggaagccgaagtcgaagtgggagatactctgtagaggttcactgagtgaatacaatgcacttctgttcctcactcctctaatattccatggctctgggacttggtttctccttagaaactctgaggtaaaggctgcattctaggaccctgaccctgaacttactattcatcatatgcaactgggtcttgaggatgagccaggaagaatagaatatgttttctcctgggaagccagagagagagagagagagggaaaagaagggggagaaggaggaggaggaggaggaggaggagggaggcaaagaagaaagaactgagagaaaaacaaaccaaaccacattgtcactaatctgccacagccataaagaaaagaatggggtgacataggaagttagagaggccttgggggccattttgcaattttcctgtctgccctccagaaagaaagaggttgtttattcagtcacttatttwaaaaaaaaattctaattaagcacctactctaagttggatgctaggctaggccagagggaaacgtcagtgaagcaaatatcaaatatttattgactg

SEQ ID NO: 702052 - DNA, 972 bp, Homo sapiens
gggaaacaataaatttgctgccatcatgtatgtcaaatttcaactagaaaggaaatttgggttagctatttgacacttaggggtcagcagaaacagctaagtttttattgtatacagaattggaggcataaaagttcaccttttcctagtctgaatttgaaaagttagtttttggtttcttctatgaagcagaaaatcctaagttcatgacatacatacagtaaactacaatttggtgctgtggatactgcaccaagccartgctttttaaacttcaattagtatttaagtacatagtctttcaaagttgtatcttgcttaaaaacattatatatgacagcaacatgccctttggcactaatgtgaattcactttgaaaagtttacatattgcatatgttcaacatcagtgtcaattaattgaactgcttaggttgaaacttttgacaagaagaggcaaagtgatacaaaatatattttcaagacaatacttcagctttgattacaaaagttagacaaatttaaatagaatgagtttttttaaaaactcacagcttataatgaaagcaaaaacacagcaatggttttaataaaggttcattaaaaactgtgattcttggcaagcatgtctattactacgttaaactataaaatctatatgttcagagggcgaacagtattctctttgttgagccagagaatggagggtggggggaaattatttcaagctacagtaataaatttttagtgagtcctttcaagcatcttgccaaaacatcagacaggtttaggagaatgcttggctgcaaattgatccataataaattgattgatgtcatcacgtgaatgtatgccttctatcatcagtgaagtgatttaggatgtattacagtttgatatatattcgtcccatcagtaatttctcttgtgaattttctttaattataaaaattaaatggaaaaaaggtaaatg

SEQ ID NO: 702053 - DNA, 972 bp, Homo sapiens
gggaaacaataaatttgctgccatcatgtatgtcaaatttcaactagaaaggaaatttgggttagctatttgacacttaggggtcagcagaaacagctaagtttttattgtatacagaattggaggcataaaagttcaccttttcctagtctgaatttgaaaagttagtttttggtttcttctatgaagcagaaaatcctaagttcatgacatacatacagtaaactacaatttggtgctgtggatactgcaccaagccaatgctttttaaacttcaattagtatttaagtacatagtctttcaaagttgtatcttgcttaaaaacattatatatgacagcaacatgccctttggcactaatgtgaattcactttgaaaagtttacatattgcatatgttcaacatcagtgtcaattaattgaactgcttaggttgaaacttttgacaagaagaggcaaagtgatacaaaatatattttcaagacaatacttcagctttgattacaaaagttagacaaatttaaatagaatgagtttttttaaaaactcacagcttatawtgaaagcaaaaacacagcaatggttttaataaaggttcattaaaaactgtgattcttggcaagcatgtctattactacgttaaactataaaatctatatgttcagagggcgaacagtattctctttgttgagccagagaatggagggtggggggaaattatttcaagctacagtaataaatttttagtgagtcctttcaagcatcttgccaaaacatcagacaggtttaggagaatgcttggctgcaaattgatccataataaattgattgatgtcatcacgtgaatgtatgccttctatcatcagtgaagtgatttaggatgtattacagtttgatatatattcgtcccatcagtaatttctcttgtgaattttctttaattataaaaattaaatggaaaaaaggtaaatg

SEQ ID NO: 702054 - DNA, 607 bp, Homo sapiens
ggtgaatgattttcgaggcaaattgttaatcctcatcctgtttctaatgtccagtgtgctgtcagcctagcttccttctatagtgagatagatatgttcagagccttcaagctggtgtggacactgacccgctgacccggtcctgcagagttaggaagacgagcattttttttttgagacagtctcgttctgttgccaggcgggagtgcagtggcacaatctcgcctcactgcaagctctgcctcccgggttcgagtagtttgcctgcctcagcctcccgagtagctgggactacaggtgcctgccaccatgcctggctaatttttgtatgtttagtagagacagggtttcaccatgttggccaggatggcctcaaacttctgatctcaggtgatccacctgcctcagcctcccaaagtgctgggattaggggcgtgagccaccgtgcctggccggaagatgctctttccacrgggttgatattagttcgtgtttgtgtggcgtggctgccttccatcagcaagtttgagtgttgatgtgaggccaccctcttttgaaatggattgtggtcggtttggaatagttacacggtgctgtgccatttggt

SEQ ID NO: 702055 - DNA, 607 bp, Homo sapiens
ggtgaatgattttcgaggcaaattgttaatcctcatcctgtttctaatgtccagtgtgctgtcagcctagcttccttctatagtgagatagatatgttcagagccttcaagctggtgtggacactgacccgctgacccggtcctgcagagttaggaagacgagcattttttttttgagacagtctcgttctgttgccaggcgggagtgcagtggcacaatctcgcctcactgcaagctctgcctcccgggttcgagtagtttgcctgcctcagcctcccgagtagctgggactacaggtgcctgccaccatgcctggctaatttttgtatgtttagtagagacagggtttcaccatgttggccaggatggcctcaaacttctgatctcaggtgatccacctgcctcagcctcccaaagtgctgggattaggggcgtgagccaccgtgcctggccggaagatgctctttccacagggttgatattagttcgtgtttgtgtggcrtggctgccttccatcagcaagtttgagtgttgatgtgaggccaccctcttttgaaatggattgtggtcggtttggaatagttacacggtgctgtgccatttggt

SEQ ID NO: 702056 - DNA, 607 bp, Homo sapiens
ggtgaatgattttcgaggcaaattgttaatcctcatcctgtttctaatgtccagtgtgctgtcagcctagcttccttctatagtgagatagatatgttcagagccttcaagctggtgtggacactgacccgctgacccggtcctgcagagttaggaagacgagcattttttttttgagacagtctcgttctgttgccaggcgggagtgcagtggcacaatctcgcctcactgcaagctctgcctcccgggttcgagtagtttgcctgcctcagcctcccgagtagctgggactacaggtgcctgccaccatgcctggctaatttttgtatgtttagtagagacagggtttcaccatgttggccaggatggcctcaaacttctgatctcaggtgatccacctgcctcagcctcccaaagtgctgggattaggggcgtgagccaccgtgcctggccggaagatgctctttccacagggttgatattagttcgtgtttgtgtggcgtggctgccttccatcagcaagtttgagtgttgatgtgaggccaccctcttttgaaatggattgtggtcggtttggaatagttacacrgtgctgtgccatttggt

SEQ ID NO: 702057 - DNA, 1178 bp, Homo sapiens
ctacaggtgcccgccaccacgcccagctaattttttgtattttcagtagagacggggtttcactgcgttagccaggatggtctcgatctcctgacctcgtgatccgcctgccttggcctcccaaagtgctgggattacaggggtaaaccactgcgcctggctgaataatcccttttcttaagagcatgacttcaattgcagcctgaaatctggccagggtacatgagcatagccccccttatgattgtaccctgcatctgatacagaagattctcaagtgtcatcaatcttctaaaatacaaaaagattttacgtattaaaaagatgaattacttttatgtctttaaaagcaacaatgctgtttggaggcatctgtttttagaaattctgaaatcaatctttaagctagaggtagaagcaacattaacaaatttacgattagggagtgagacaagaattaggtttagataggataatctaaatttcttaatatgggttaaaaaagactagtcacaagaaaaacagggttaaacatattcctttataacttttaaaattattttaagtattagcaagcaaaaggaaaagcaatttatgataaaatcatcagattagcagtaaaacttacttttcaagtttgcgttattcatgggggcatattcgcatcacattcctttcattatgctcaggatagctgggcatggtggttcatgtctgtaatcccagcactttgggagaccaaagcagtgggatcacttgaagtcaggattgattggcacccagcctggacatcaaagcgggaccttgcctttgcaaaataaaaataagaaaattagcytggtgtagtggcatgtgcctatagtctcagctactcaggaggctgaggtgggaagattatttgagcctaggagtttgaggcttcagtgagctgtggtcacaacactgcactccagcctgggtgacagtgtgaaaccccaactcaaaaaaacaatattaagatatagatattgcttaatgtcttttcatttcaactttgataaaacaacaaagcaaataattccaaaatatatttctcatattaaaagtgacctgcccccattgaaagaaatgtatcatgttttgttttgctacatgcatgcatttgttgcatcagtgaaacacgtgaagttactgcagtg

SEQ ID NO: 702058 - DNA, 1189 bp, Homo sapiens
ttattttgatttttttttagctcatcgtgtggcccaagacaattcctcttccaatgtgtcccagggaagtcaaaagactggacacccctgctaaaccattctgctgctcattttatcactggcactaggaatggaggttttattatgcaaaggaatttccgatacatgcctttgaagttggatttaattaattcaagacacataattatataaagtgagcatctgcagtacccgtagtattcatcctgaaaatagtttccaaaactcaatgcattcagaacttcaaaaaaattaatgtagcaaaatctgcattaactctaaaattcagctttaatgcaggtatcaaaaacttcaaaaaaacaaattccctatgtggaatcaaaaagatctttcaggttcattcgatgatttttyactttgctttgtttctgtttccatttagccctattttaatgcttattttactaaactcaaacatagggagtactttattttctaacatgtttgtctccgtatgtttttttcaataatttaacgtccatttctaacttgcctatcagtcccaggtctttttagatctttctcaattatggttgttattttcataatatctaaatcatatcatatgtaattgttctattaaaatgtattctgtctttacatttcaatgagctaaacatgctttatcttgagtgataaatgttttttcccctaaataataccaacataagcctatacttgatacagccagttaaagttagaacaaaaactttagagaaaatttctggtcaattagtgtgtcactgagttaatgaatcatttaattaccacttgcttgggttatttgtcccctcactttatcaataaagaacacagtatgacataagaaacttccaagtttgaactaagtcacagccaggacctctgatttctaatgtacctgaaactaacatactctacagaaaagatgaggggtctcataacctctgcatattcaatgctttcatattcaattgtttgtttttaaagaaattagtttattagagacagagagagaacgaatctttcccttgataatctccactaaactttataaatatgcttagaatggaaatgaatgagaagaaacagaggatgaaggagacatcagaaattttcagccctgtgttttacctctggagaattctta

SEQ ID NO: 702059 - DNA, 647 bp, Homo sapiens
atttcaggagaaatatgaataataatarcgtttaaatttctttagtgctttatagttaccaaaacatttcacatatatttcaaaatttgatcttcatggcaaccctggaactgatctacaaatattttttagtcttaaaattaataaataatacattaaatagcatattaacatgttcatttcttccatcttaaggtttaaacatttattagaacttctttggaaattataccttagtttcccctctaaaagcctctaacggggaatatcaaaccttcatggtaaagaaataaaatagtcattttggagtcattacagccagttgagttggtagctgactgcagctagtcacaatctataatcacaactaactttaaaataaatgattctttattacaatatatttttaatttgccctgtgttctatactaggttaatgtagagcataggaaaaaaggaggctgagtaattaggtccagttcttttgtagaggcctctggtgctaagcagacttagcattttgatgttataaaacacaaaaccaaaaatatcacaaaaccaaacccaagccccacttttttttttttttttttttttttttttttgagacaggctggagtgcagtggcatgatcgtggctcactgca

SEQ ID NO: 702060 - DNA, 615 bp, Homo sapiens
gttctatgttcacatttccttgccttacccttttttacaccaaaatctgctcttactcttccactataacatcctttgccagagttattaaaaagacaagatgctaacattttaatccgcaattttatcaaacaaattccacttggcacaattagcattaagtatataaaactgcactctctttgttttattttaatgtgccatmgaagacacacctctgttaatttcagggcatagttaacacaattataaatatatacaatctggccttggactaacttggaaacttgggtccaatcttggttctaccacatagtgcctgagtgctgagtggcttggctaagttacctaaacttcattcatttaaaattccctcacttgtaaaagggacttgagtaatagtatctactctacagtgctatggtgaagattacataggataaaatactaaagtcactggcatttaataaattatcaaaaaattaaaaaccacatgctgctaacattttaattcacaattttatcaaacaaataccacttgggacaattagtattaactaatgccctgaaattaacagaggtgtgtctttgatgacacattaaaatgaaaaagaa

SEQ ID NO: 702061 - DNA, 615 bp, Homo sapiens
gttctatgttcacatttccttgccttacccttttttacaccaaaatctgctcttactcttccactataacatcctttgccagagttattaaaaagacaagatgctaacattttaatccgcaattttatcaaacaaattccacttggcacaattagcattaagtatataaaactgcactctctttgttttattttaatgtgccatagaagacacacctctgttaatttcagggcatagttaacacaattataaatatatacaatctggccttggactaacttggaaacttgggtccaatcttggttctaccacatagtgcctgagtgctgagtggcttggctaagttayctaaacttcattcatttaaaattccctcacttgtaaaagggacttgagtaatagtatctactctacagtgctatggtgaagattacataggataaaatactaaagtcactggcatttaataaattatcaaaaaattaaaaaccacatgctgctaacattttaattcacaattttatcaaacaaataccacttgggacaattagtattaactaatgccctgaaattaacagaggtgtgtctttgatgacacattaaaatgaaaaagaa

SEQ ID NO: 702062 - DNA, 1595 bp, Homo sapiens
tagagaaataataatagaattgatttaaaagatttctgcatagtttatttaaaaagatatttgatcgctaggcttttctactattagtgttaggtttctgccatattaaaaattgttatttttttaattttccaaaagtctgttgaatatttgtacatacacccccaaaattaatgtatattagaaataactattatgctttggtgagtttattggctaatttaatcagtattctcataagtatgtgattccttatactccagaaccaaaaattgaatatgaaaatatttcagctgggcatagtggctcacatctgtaatctcagcactttgggaggctgaagcaggaggattgtttgagcccaggagtttaagacyagcctggggaatatagcaagaccttgtctaaaaattagtgaagcacagcagtgcatgtctgtagtcccagcctctcagaagagtgaagatggagaatctcttgaacctaagaattcgaggctgcagtgagttatgatcattataatcacatcattgcactccatcctgggtgacagggcaagaccctctctctaaaaaacaaacaaaaaccaagaaggaaggaagaaggaaggaaagaaggaaggaaggaaggaaggagaaaaactatttcactcatagacacaacagctctatgatttttcccggagaccctcttcctttaggtctcagtgttccttttctgaactggactgctcttctcttgccagccacacagctgacaccttgtaaattctgtccatccctcacttgtgttggatgcactattatttcctgattatttccatttttctcttaattttctccttaattttgatggaacacatcttctaacaactctccctctattctcttcattgtaaagttattttatttctttagttagtagagaaaaaaatggacacacttcatccactcctatttttaacttttttcctctcataagtactatttttcaaatgaatgtgaaaaccaaccccaaagattaagacgaatactgtggcttatgaggattaccttcatctcagcttgaaaatatagaaaatcctacacatttaaaactatagttaatttcatttattaagcattgtctttacattccaagaataaaaatcacttaaggggccaatatgtgatgtaacaaagggaagggaatttaggactttccacaagaagaatgaatgaaataagctctattaatcatttccaaaggaaaggacattttaattccaactactataaacctgctttctgtttacatggtaaggcaagaactgtggataaatatgagctttagaaaactgaagaatgttatatctgtatcagtttgcatcccagctttgaccttctcctggttaattttcttaccttgataagtaagagtatcttttttactgttcccatctatccttaatagatatggccacatcaatgcagaatacttcctagatgactaaatagagattgacaaaatgggcctatatgactgagaaaactagcattttaaagtagttcttagttgactttactgaataaccaagaatagataaagtaataaca

SEQ ID NO: 702063 - DNA, 525 bp, Homo sapiens
acccttaatcattggaggcagcactttggagattgcagactcacaccactgagtctcacatctcatctgtaaaagggtacaacggtagtactggctcagcatctctatagatgtgttctggttcaacgaatgaactaggagaaaagctaattcagtctgtaggagagactttattttttttttcattaggaataatttatgtttaacacacagatctacctttttctcacacaaagcagaccagctrctgcataaaatgataaagggattgtttctagattgggaagctgatgaatctgagttctagtcatgacttactgtataacttggacttgtgctagacagcctctatcccttttctgtttccttttctctttgatgaacatatatcattaagggggaaaaattaataggaaacatgccagctctctgtattaattttctgtagctgtgtgagccagtgttttcagattttagggacagatttgtattcagcagaaaagaatatcaagatttctctttaat

SEQ ID NO: 702064 - DNA, 1293 bp, Homo sapiens
tgaaaccatgaaaagtatcccttctagaagcttgtgatgtaaggatggttcctgacatgtttaatcccaactaatgtccaacagccaacctccccacttgctatgctagaccacaaagctgccatgcttaagaatagaaacaatttgtctcagcctcaaccagacaaagcaactccaaaatttgcctcaggtcacagcacaaacctgtgtgttttgagctttcattttccatcaaaagactgttcaaacacaatttccattgctctatttaacttgttgacacttacgttacttatctttcrtctcactccgcctgccagtataacattattcctctgcctccaactttccacttctgttttccctcataatctttgtgtctgtttcttttaccatgttgctaattattcaatgctcatactaaccataaatataactggattctcctccaacttccacaattcctatagcctaattaaagtccaattaataagagacttctttctctcaccatctaggttgaacctcgtttccattattttactagttacatagctttggagagactgcttaactttatgggcttacagatccccttctgttaagtatgtatgaaagtagtgtttataatgttgttatgagaattaagtatgttaatatttctcaagtgcttagaacagtttgtgagacacagtgttgtgttaactaaatgaaaatcaagtaacagcctagctacctctgtgtaggcagtacaagttggtgtttttctcagtaaagtcaagtcttttattatctaagaaggtcacttctgcttctctttgtctctgcattacagaaaatcactgattcactcatcattactcactgattctttggtatctgcattgaagactttctttgactttcaagtacttccattattctggattacagaatccacagaggatcaattcctcacgctggtttctcaattcccctcaactacaataatcttcccatttcacctccactagctatacaccaagaatgactgttgtaaaagactttgtagtttgcgaactacatacaaacaccagacaagagggtgatcaaggactgaaatccacaagggctgcattgatgaggaaaaacttctctccttaactgggtctctgacccatgactatactcagtattgttctgacattcaaatgtattagtcgtctcagaccaatagctttgaaatcccattatcttactgcaatatactgtgctcctagattattctcaacccttgttcttcttccttattca

SEQ ID NO: 702065 - DNA, 452 bp, Homo sapiens
cagggggaaaaaggaaattaggttgtcacatcgctttctcttaaaaattctgtggctgcagactcatttttctagaaattaaatgcatagtagttcaagaaacatgtctatattcgctaatgattgcacaaggtatgagatgaacattttctaasggagggacttttacctttgaagagaataaaaagatagatttagtaagacacaaacttgcctgtgctgaaagctattgccctgactattgaggaacaagaatgagagacttgagtctttgataagatgtgagtctttgtgcctggaaactagatataaagaatgcttcactttatttctaagaaaattggcaaaaagaagataaagtcaaaataaaatttctttcagaagaaagtcaccttttaacataaaatgtgtagggtcattttccaatagcattcataaaagccagcaactgg

SEQ ID NO: 702066 - DNA, 1290 bp, Homo sapiens
ctattacattttttggaagatttaaaaattattggtcaaatttctttaataggtaaggagctatttcttttatataagttttggaactttgtgtctttcaaaggatttggccttttcatctaagttatcaaatttatggatatgcaggtgttcattgtattttgttattttctttttaatgcccatgggatcagcgaggatgctctccctttcatttcggacactggtaatttgtatcttctcttttctttcatgttagcctgggtagaagtttgccaattttactgatctttttaaagaatcagcttttgattttgtcatttaatctatttcttttctgttttcagcttgattctactcaactttcttttaccttcttccaatttaggctaaaattgctcttctttctctaatatcctggggtgggaactcagattttttattttagatctttcttatcttctaatatgtgcatttatatactataaattttcaagtacagctttcactgcatctcacacattttgctaagttgtatttccatttagttaaaaatgtttttaaaatttctcttgggaaactgatttatttttattttcttcaagctttttttttttccccataaagaagtgagtgctgacctctaagctgtttatatatcagaactgaaaacagaaattccttttcctccttttttctttccagcactattctcctcattcattcatgtattagccaatcccatttaatgtttggctaatatctttaggaggaatattgcaatctataatcccatttaaagaatatcttagcaaatttctgttgagcaaaaagaattcaaaggtattaacatgtcctaagaagcccttgtgattttattcatggctggctttggtagactcatcatgtattattctgtcccttaaatttttgattcagtaaaactaaactatttctatttgtagtttgatcyacaaattacaccactttttttttgtttgttggtttgttttttactcaatactttggttcatgtttccctttctcttgaatgtcttcctctttgtccgcaatttttttttgattcctctttttcattccttatattgcagctcaggtttctttttctccatgaaacctatgtgtaatctctctaagtctggttcagtggctcttatccatgtcaccatgttatgatgttcatgatgaacacataaattatgtgtgcttgtagagttttgtcctctctactcactaagttgaaactgcttgtcctttagctttctctaa

SEQ ID NO: 702067 - DNA, 1264 bp, Homo sapiens
tataggcgtgagaaatggaaaaaggcttttaaaagtctcttctctcacccaggtcaaatctgaaaatgtgatgagaacaccccagattcttggaaatgtgataaagaacagtggtgatttcccctttccttcttcctaatttccttttttttttttttttttttttgagatggagtcttgctctgtctcccaggctggagtgcagtggcacgatctcagctcactgcaacctctgcctcccgggttcaagcaactctcctacctcagcctcccgagtagctgggattacaggcgtgcrccactatacccggctaatttttgtatttttattagagatggggtttcgccatgttggccaggctggtctcgaactcctcacctccggtgatccgcccacctcggcctcctacagtgctgggattacaggtgtgagccactgcacccagttccctcttcttaatttcaaacttgattctatcctctgccattcataagctatgttaaaattggacagtatgtagaacatgtcctattttctacatttctttatgtcttgcatttgagggtggattatctcttcaaaaactgttttgactaaggggatccaatttactggaagcagaattgatgccgtctacatttcaagcatttcaatgggaaaagttagaaaattatattcatttatgagctcaacgaaattagtgtacaaaataaacttacattttacattattatttgtttaattcatgtctccctccatgaaagcagggactttttctgctaccagtcactgaccatagatgtgttggtcttacactgggttaggtaaggggatcgaagatcttaagaagggaatctctttactgcctgcattagttatctgttgttgtgtaactaattactctcaaacttagtagatgaaaacaacagttattatctcagcaatgaacaatattggaagtaaaaagataggaaagtcttggagcaggcttatgaatgagcctctgggagaaagcataaaagtgtgcaggtttcacattaatgcccaccagaaagcatccactgcagaagggaaaaatcagcaaccaaaatgtcaccagcctgtcttttgtaccctctggtgcttgcactatgggattatgaatgtagtggccacagtggtcactgaaaggctttgctcctctcaaaagtctgatgtaacttctgcctcagctgagtgcctgatctgccaatagcagagcccaacccggacaccttcaatgtg

SEQ ID NO: 702068 - DNA, 1264 bp, Homo sapiens
tataggcgtgagaaatggaaaaaggcttttaaaagtctcttctctcacccaggtcaaatctgaaaatgtgatgagaacaccccagattcttggaaatgtgataaagaacagtggtgatttcccctttccttcttcctaatttccttttttttttttttttttttttgagatggagtcttgctctgtctcccaggctggagtgcagtggcacgatctcagctcactgcaacctctgcctcccgggttcaagcaactctcctacctcagcctcccgagtagctgggattacaggcgtgcgccactatacccggctaatttttgtatttttattagagatggggtttcgccatgttggccaggctggtctcgaactcctcacctccggtgatccgcccacctcggcctcctacagtgctgggattacaggtgtgagccactgcacccagtyccctcttcttaatttcaaacttgattctatcctctgccattcataagctatgttaaaattggacagtatgtagaacatgtcctattttctacatttctttatgtcttgcatttgagggtggattatctcttcaaaaactgttttgactaaggggatccaatttactggaagcagaattgatgccgtctacatttcaagcatttcaatgggaaaagttagaaaattatattcatttatgagctcaacgaaattagtgtacaaaataaacttacattttacattattatttgtttaattcatgtctccctccatgaaagcagggactttttctgctaccagtcactgaccatagatgtgttggtcttacactgggttaggtaaggggatcgaagatcttaagaagggaatctctttactgcctgcattagttatctgttgttgtgtaactaattactctcaaacttagtagatgaaaacaacagttattatctcagcaatgaacaatattggaagtaaaaagataggaaagtcttggagcaggcttatgaatgagcctctgggagaaagcataaaagtgtgcaggtttcacattaatgcccaccagaaagcatccactgcagaagggaaaaatcagcaaccaaaatgtcaccagcctgtcttttgtaccctctggtgcttgcactatgggattatgaatgtagtggccacagtggtcactgaaaggctttgctcctctcaaaagtctgatgtaacttctgcctcagctgagtgcctgatctgccaatagcagagcccaacccggacaccttcaatgtg

SEQ ID NO: 702069 - DNA, 718 bp, Homo sapiens
tgaagatatgtctggcacagaaatcaagtcacataattgctatatagcactgccttttattcaattatttcaaggttgtagatacttaatgtatacatttgtggctggggatcatttcttataaagaaaacctttaaaatctacttaaaacaataatgggctatagtatgtctataaagtttaatttagtttcaagccaccactatgcatatacaagtgtaggttaaattcctatttcaggaaataaataggaatttaatttaattcaattcctatttcaggaaagaaatgagttmaacaattagagtgtttaagctgatgtcataatccagcctaatcccagaagtgacagatatctcctacatgtgatctgtttacttcacgggctttgtgattacttatgctctctatattttgaatttaaacttatcctattttattctaattaagacctccacatcatgactgtgaaatcaacaaattcccctaactcacccctttgttcttgcttcaagaattccaacagattcagacgtcatcatgacactaattcatatcttatagctctttttaagcgggaaagagttgctattatgtcttccagaatatgtatgccagaaattttaggttggaaaatgcttttccagaaaggtagggagcaaactaatgacataataaatgatttgtcctgaaccaagtcctaaaaaacaaaaaatgc

SEQ ID NO: 702070 - DNA, 2375 bp, Homo sapiens
  misc_feature 467: n = A,T,C or G
gccgcagcctcccgagtagcgggattacaascaccagccaccacacccagctaatttttgtaagtttagtagagatggggtttcgccatgtcggccaggctggtctggaactccccccctcaggtgatccacccacctcagcctcccaaagtgctgggattacacgcacgagccaccgcccccgaccccatcattgtttttttctacatttctttttcttctcttctctaaatactgtaaaaattcctgaaccccagcatctctccctctccttctattccactctgccacgatcaatcactgagctcctgagatacctccatgtttcccattatttcccgcatcaaacacataccctccaaccctgcagccgggtcatgatgttggcatgtaaatcacgtgatgccatgtcgctcctgaacacccatcctcaacactcctaagcactcagaaccgactgcgacggntttggtctgcgaggttctgcgtggcctggctccgtcaccctctcctcacacgggccccatcatctcctgactctctctgctactgtccttcaccccatagtgcccggtccatccccactccagcccatatccttggcctcaccgcaacctggaactccccctctgcctctgcgcaggcagcatctgctttttccttcaagccctgcccaagggtacctccacagaaggctctgcccaaccagcagcagctcctggggctccctctgctgctgttgcccacaggcctgtggactgcttccttaccactagcccaacactgtatgtttcatttgctcattgtgcacgtactgtctgaccgccccatgaggatgtgagctccagaagggcagggaacgttgctctctgggctgtttactgctgatccccagctaccggcacactgcctgccacagacgatgaataaatgagaggtgtcagacctggagtgaaaagaaagtcacttttgtgagacagaaaggaaggatgaggaaaatcatacactaaaagggattttttgttgatggagtacatatagaactttcagcagtaatggccacctctattttctcagaatatgtttgatgtagagaggaggctggttgaggtgtgtccaagttgtctggcttccagcttagtaaaacatggcagtttgtaagtgaatttgagaaatcatgatatcaagtgagacttgctgctttcaacttgtaaagcataacaagctgaaactgtcccatgagtaccagggatctgtgaatgttgctttagagttgtactgccttacttggtttccatgtctattcatagggccagaaaataagaggtggttttattgtattatgtgtcctggcctccgtttgtcaggcctgggatttctccctggtgtatcctcccatttatgaaataaataattccctagaaactgaggagcacatagatgtacccagaggggtgatgaaacacacatatctcacagctcaacttctcagtttgatttccagagctgtcattcatgaggtctatgtggaggggaaagaaagtggtcaaacaccaactgatggcttttactcaaaatctgtttcaccagagcttatgacaggacatgctattccacccagccaattggattctcagattgatgacttcactggtttcagcaaagataggatgatgcagaaacctggtagcaatgcacctgtgggaggaaacgttaccagcagtttctctggagatgacctagaatgcagagaaacagccttctctcccaaaagccaacaagaaattaatgctgatataaaacgtcaattagtgaaggaactccgatgcgttggacaaagtaagtagtataagaatgtctgttttataaaactataggaagtctctctttctatgattcagaagatattcatgttgcctgttgagtttcattctttgccagagttgagattgcacataatttatggtggttcctcttttctttgactaaagcatgtacattttttctttttcttttcttacttggttatggttaaaggagttacattcgtatgtatgtgcaggtgtcttttttattatttaggttttgtatgtgcaggtatcttgatttaagcatttaaaacatttcagcctctgaagcatgattgctgaggtgtagattcacttctattcttctttatatttgataatactgaagtttttttttttcaacatcttcagaatatgaaaaaatcttcgaaatgcttgaaggagtgcaaggacctactgcagtcaggaaacgattttttgaatccatcatcaaggaagcagcaaggtgggtagaaataggaactgtccaatttctttaagcacttgggctcaatagagcactggggg

SEQ ID NO: 702071 - DNA, 2375 bp, Homo sapiens
  misc_feature 467: n = A,T,C or G
gccgcagcctcccgagtagcgggattacaagcaccagccaccacacccagctaatttttgtaagtttagtagagatggggtttcgccatgtcggccaggctggtctggaactccccccctcaggtgatccacccacctcagcctcccaaagtgctgggattacacgcacgagccaccgcccccgaccccatcattgtttttttctacatttctttttcttctcttctctaaatactgtaaaaattcctgaaccccagcatctctcyctctccttctattccactctgccacgatcaatcactgagctcctgagatacctccatgtttcccattatttcccgcatcaaacacataccctccaaccctgcagccgggtcatgatgttggcatgtaaatcacgtgatgccatgtcgctcctgaacacccatcctcaacactcctaagcactcagaaccgactgcgacggntttggtctgcgaggttctgcgtggcctggctccgtcaccctctcctcacacgggccccatcatctcctgactctctctgctactgtccttcaccccatagtgcccggtccatccccactccagcccatatccttggcctcaccgcaacctggaactccccctctgcctctgcgcaggcagcatctgctttttccttcaagccctgcccaagggtacctccacagaaggctctgcccaaccagcagcagctcctggggctccctctgctgctgttgcccacaggcctgtggactgcttccttaccactagcccaacactgtatgtttcatttgctcattgtgcacgtactgtctgaccgccccatgaggatgtgagctccagaagggcagggaacgttgctctctgggctgtttactgctgatccccagctaccggcacactgcctgccacagacgatgaataaatgagaggtgtcagacctggagtgaaaagaaagtcacttttgtgagacagaaaggaaggatgaggaaaatcatacactaaaagggattttttgttgatggagtacatatagaactttcagcagtaatggccacctctattttctcagaatatgtttgatgtagagaggaggctggttgaggtgtgtccaagttgtctggcttccagcttagtaaaacatggcagtttgtaagtgaatttgagaaatcatgatatcaagtgagacttgctgctttcaacttgtaaagcataacaagctgaaactgtcccatgagtaccagggatctgtgaatgttgctttagagttgtactgccttacttggtttccatgtctattcatagggccagaaaataagaggtggttttattgtattatgtgtcctggcctccgtttgtcaggcctgggatttctccctggtgtatcctcccatttatgaaataaataattccctagaaactgaggagcacatagatgtacccagaggggtgatgaaacacacatatctcacagctcaacttctcagtttgatttccagagctgtcattcatgaggtctatgtggaggggaaagaaagtggtcaaacaccaactgatggcttttactcaaaatctgtttcaccagagcttatgacaggacatgctattccacccagccaattggattctcagattgatgacttcactggtttcagcaaagataggatgatgcagaaacctggtagcaatgcacctgtgggaggaaacgttaccagcagtttctctggagatgacctagaatgcagagaaacagccttctctcccaaaagccaacaagaaattaatgctgatataaaacgtcaattagtgaaggaactccgatgcgttggacaaagtaagtagtataagaatgtctgttttataaaactataggaagtctctctttctatgattcagaagatattcatgttgcctgttgagtttcattctttgccagagttgagattgcacataatttatggtggttcctcttttctttgactaaagcatgtacattttttctttttcttttcttacttggttatggttaaaggagttacattcgtatgtatgtgcaggtgtcttttttattatttaggttttgtatgtgcaggtatcttgatttaagcatttaaaacatttcagcctctgaagcatgattgctgaggtgtagattcacttctattcttctttatatttgataatactgaagtttttttttttcaacatcttcagaatatgaaaaaatcttcgaaatgcttgaaggagtgcaaggacctactgcagtcaggaaacgattttttgaatccatcatcaaggaagcagcaaggtgggtagaaataggaactgtccaatttctttaagcacttgggctcaatagagcactggggg

SEQ ID NO: 702072 - DNA, 2375 bp, Homo sapiens
  misc_feature 467: n = A,T,C or G
gccgcagcctcccgagtagcgggattacaagcaccagccaccacacccagctaatttttgtaagtttagtagagatggggtttcgccatgtcggccaggctggtctggaactccccccctcaggtgatccacccacctcagcctcccaaagtgctgggattacacgcacgagccaccgcccccgaccccatcattgtttttttctacatttctttttcttctcttctctaaatactgtaaaaattcctgaaccccagcatctctccctctccttctattccactctgccacgatcaatcactgagctcctgagawacctccatgtttcccattatttcccgcatcaaacacataccctccaaccctgcagccgggtcatgatgttggcatgtaaatcacgtgatgccatgtcgctcctgaacacccatcctcaacactcctaagcactcagaaccgactgcgacggntttggtctgcgaggttctgcgtggcctggctccgtcaccctctcctcacacgggccccatcatctcctgactctctctgctactgtccttcaccccatagtgcccggtccatccccactccagcccatatccttggcctcaccgcaacctggaactccccctctgcctctgcgcaggcagcatctgctttttccttcaagccctgcccaagggtacctccacagaaggctctgcccaaccagcagcagctcctggggctccctctgctgctgttgcccacaggcctgtggactgcttccttaccactagcccaacactgtatgtttcatttgctcattgtgcacgtactgtctgaccgccccatgaggatgtgagctccagaagggcagggaacgttgctctctgggctgtttactgctgatccccagctaccggcacactgcctgccacagacgatgaataaatgagaggtgtcagacctggagtgaaaagaaagtcacttttgtgagacagaaaggaaggatgaggaaaatcatacactaaaagggattttttgttgatggagtacatatagaactttcagcagtaatggccacctctattttctcagaatatgtttgatgtagagaggaggctggttgaggtgtgtccaagttgtctggcttccagcttagtaaaacatggcagtttgtaagtgaatttgagaaatcatgatatcaagtgagacttgctgctttcaacttgtaaagcataacaagctgaaactgtcccatgagtaccagggatctgtgaatgttgctttagagttgtactgccttacttggtttccatgtctattcatagggccagaaaataagaggtggttttattgtattatgtgtcctggcctccgtttgtcaggcctgggatttctccctggtgtatcctcccatttatgaaataaataattccctagaaactgaggagcacatagatgtacccagaggggtgatgaaacacacatatctcacagctcaacttctcagtttgatttccagagctgtcattcatgaggtctatgtggaggggaaagaaagtggtcaaacaccaactgatggcttttactcaaaatctgtttcaccagagcttatgacaggacatgctattccacccagccaattggattctcagattgatgacttcactggtttcagcaaagataggatgatgcagaaacctggtagcaatgcacctgtgggaggaaacgttaccagcagtttctctggagatgacctagaatgcagagaaacagccttctctcccaaaagccaacaagaaattaatgctgatataaaacgtcaattagtgaaggaactccgatgcgttggacaaagtaagtagtataagaatgtctgttttataaaactataggaagtctctctttctatgattcagaagatattcatgttgcctgttgagtttcattctttgccagagttgagattgcacataatttatggtggttcctcttttctttgactaaagcatgtacattttttctttttcttttcttacttggttatggttaaaggagttacattcgtatgtatgtgcaggtgtcttttttattatttaggttttgtatgtgcaggtatcttgatttaagcatttaaaacatttcagcctctgaagcatgattgctgaggtgtagattcacttctattcttctttatatttgataatactgaagtttttttttttcaacatcttcagaatatgaaaaaatcttcgaaatgcttgaaggagtgcaaggacctactgcagtcaggaaacgattttttgaatccatcatcaaggaagcagcaaggtgggtagaaataggaactgtccaatttctttaagcacttgggctcaatagagcactggggg

SEQ ID NO: 702073 - DNA, 1056 bp, Homo sapiens
atgctaatttatgtagttaaagaatgacgggggttctggtctgttagggtacctatacatcctggtttgccctaaacagtcttgatgtatggctcattatgaatagcagctttttttttttttactttcgaaagtatcctagacaatacattgtgtggttgtcctgcttttatacttattgaactttagttgagacagatacttcataatcacatgttgtataatcctaacattccaagcagaatttcttaaattgaatacttaagtttattaaattgcatgatttccctaaattgagattcctttttattttcttgtaagtcttgcattgtgactagaaagaaaaatgccacaaagttggcaacagttaccacagtattataattctttccgatttcttactgaacgaaacaagattagtattgctattaatttgttcatgtaatttcataaaacaaataagaagcaaatctgtcttttgcctcactgattgtgacaacactaaaccttatttcctaagaaaacaatgaaaagtaaattgaaccttccaagttggttattaaaccaggtaagcawgggcacatttattttaccagggatctagatataaaataaagattccttatactacatatatgacttttatcaaaatgccgacattcaatttttgtttgaagatacttatgatacacattcagaggatttccttgcattactgaaaggtgtctgtgaaaggttgtgtttaaggtgcatatttgcatatcaaatcatattttccagtgacttctattctgctttcaaaaactgttttcatagtggcagaaaaaggagagctgtcttttacaatataaagcaaaattcatattaaagattctaatattcttttcagaggcaataaaatagagtggaaggaaacagactaggagtgtggccccagttctagatctgtctcttgaatgaatcatattccacctgtgtgctccacagaacaaccagtgttggctgtggagtgattggtctgcatctatttctagaatgtaactcatataagcaaag

SEQ ID NO: 702074 - DNA, 943 bp, Homo sapiens
taaacattgcagacgttgttattggtaaaattctccaagctttacccagcagccatgtcctgtctttggtgaaggtagttttatggaaatgagatttggagctaggagggtagatgagccaggatggagctgctcttcatgggattgagctctttctgcaaatcttcgtgtaatgccggggaggaaggcctcagacagatccaaaaggggacatgtcagctgctaaatgagcttagcctcaaagaccagaatagacctgtagagccaggaacctcaggattatgttgcattgaaagtttcagcaaagagcattgaaattcaggtatagcagaagtcytcacccttaggggaaagcatggttaagctccagccttttctcttttattagaatcgacatcttatgtggcacaaacaaatatatgctgaaggctctagggctcggccctgcgctttctgggccctggtggataaagcttgcattttctgggccactgatttatttgtgcagaaaatgaaataatgtgtggacaattaatgagatggaaatagaaagcacctagatatatattctaggagtcttttatttttgtctggagttgttttgcaattaacccacgagttttatcaacaatagcttcggaagggaggaaaagatggaaagttcaggcggcgtccttggaacacaggtatccatgccatcatcacttgccctgtggcttgctggtttggcatcctcgttcttagagactgagggttgttgtagttcagaaggaagaaggtacccggacaacagaacgggacctgatgccacacgtagggtccatgatgagacctttcctcctcttttcactggatctaaaaagtaattactgtattttaattatgcaaacatttcatgaagataccttttgtaaatttttaaaagcattccatataaaagtaa

SEQ ID NO: 702075 - DNA, 943 bp, Homo sapiens
taaacattgcagacgttgttattggtaaaattctccaagctttacccagcagccatgtcctgtctttggtgaaggtagttttatggaaatgagatttggagctaggagggtagatgagccaggatggagctgctcttcatgggattgagctctttctgcaaatcttcgtgtaatgccggggaggaaggcctcagacagatccaaaaggggacatgtcagctgctaaatgagcttagcctcaaagaccagaatagacctgtagagccaggaacctcaggattatgttgcattgaaagtttcagcaaagagcattgaaattcaggtatagcagaagtcttcacccttaggggaaagcatggttaagctccagccttttctcttttattagaatcgacatcttatgtggcacaaacaaatatatgctgaaggctctagggctcggccctgcgctttctgggccctggtggataaagcttgcattttctgggccactgatttatttgtgcagaaaatgaaataatgtgtggacaattaatgagatggaaatagaaagcacctagatatatattctaggagtcttttatttttgtctggagttgttttgcaattaacccacgagttttatcaacaatagcttcggaagggaggaaaagatggaaagttcaggcggcgtccttggaacacaggtatccatgccatcatcacttgccctgtggcttgctggtttggcatcctcgttcttagagactgagggttgttgtagttcagaaggaagaaggtaccyggacaacagaacgggacctgatgccacacgtagggtccatgatgagacctttcctcctcttttcactggatctaaaaagtaattactgtattttaattatgcaaacatttcatgaagataccttttgtaaatttttaaaagcattccatataaaagtaa

SEQ ID NO: 702076 - DNA, 1069 bp, Homo sapiens
cacatgtagctaaatacatgaggtctttgttcagtgattccctggtcggagctgagctgtgtgttgctgctaccgtaaggactgtattttccagacctaaacttgggacaccacgccttgacacacggccagaaaacagaggagaaattccgaaccccatgctatctcaagaacgctggggtgtatgttccctgtagctattttggacgtacccttgtaacatcttgtcataacaattagccgcgcacacatcaagcaggaagctgctgctgcactcaggtgctaccctcagaggcctgtgggtatttgaggagccacacgattccattttcatacatgcagttggtgtctagagttactcatggcagaatcagactcaggcacagcctcctccatcaaaggctttccagattgctagcccggcactctgccttctctgcagttgtccctagactgtacattttctatcagtctcttcttggcattgcttggttgtgttattttattttcattttccattggagctcagattcagaaggtggttatgttcaatccctagccaaccttcatcattggttagtgaatgctttgttttcccacatttacrtggcgatatcttgtttttaattaatttggcagacagagcaatcaaaagagtttctgaagttttagaagtgcccctccatttaagaaatattgaatgaggtttgatttgtttcatgtctatccaaaatgattactgagatgtggccacaagcaagctgggccaagtctttgtttgagaatattctattattattattagcattgatgccgaaggtgtccttggtattaaataggctactcttggttgcaggcagcagaaccctaacccagactgttaaagaaaaaacaaaaggaaattgaatgatccatcagtttcacttctgggtatatacacagaagaattgaaagcagaactcaaagagatagttacacaaccatgtttatagcagcagtgtttacaacagtcagacggtaaaagcaagccaagtgcctataaacagatgaatggataagcggaatgggg

SEQ ID NO: 702077 - DNA, 1711 bp, Homo sapiens
cagcagtttcagatcatgaccctgggcgcctgcctgaccctgacaggcatttgcatgtacaacctccgctggaggccaagcctgagtggcaggcagaggagtcctcacctttgatgtcaagctgggcatggatgatgttgcccatgacggaggtaaggtggaggtttttgaccgtttccttggcgccccgagtgctggtgaagagcacacgggccaggcccaggtgcttgcgcgtacgggggtgaaggaggatctctacctcttccacctcaccgtacttacggcacatatccttcaggaaggtctcccgcacgttgtcattcagccttgcaaaagtcacttccttcagtggaatctgtccaatatagaactcgtccagctggggaaagaacaggagttggtatggggtctcaacactgaccactgttcctttgtccttcgggaaactttagcaagctccatgaagtcaagagagagatccgggaaagtgaggggcaagggaaggggcccaaaataagggatccatcagacctgaccccttttccctgaattcttctcaccacagaataacagcaagaattaagaacagaaatgtgcaaactaggccgggtgtggcagctcacacttataatcccaacactttgggaggatgaggtggacggatcaccagaagtcaggagttcaagaccagcctgtccaacatgataaaaccctgtctctactaaaaatacaaaaaaaaaaatttagctggatgtgatggtgggcacctgtaatcccagctactcaggagggtgaggcaggagaatcacttgaacctggcaggcagaggttgcactaagccgagatcacaccactgcactccagcctgggcaacacagcgagactccgtctcaaaaaaaaaaaaaaaaaaaaaaagaaagaaagaaagaaatgtacacactgaggaataaatatacgtggagagaacgagctacagggcgatgatttcctagctcagcctttactaggtaactaccatgaacgaggcactggaaatacagagatagaaaggaagagattcccatacagaaaagcagcatgacatgcacatacaaacacaacacgacccagtggcagctgacgcatacatggtgttctggagcccagggaaggaaacytttgtacagagtatgatcagggaagaattcataaagatggtgtcattcttactgagatttggggattaacaattcatcaaatgacaaggacccctggaacatggaaatataaaacaacttggtgtttttgaaaaaccgcaaagcgttatggtgtggatgtaacacaggggtgtggtgtcaaggcggaggataaggcttggccaggtcaataaccatacatgtcagtgtcccaaaacatggacttggcaacaaaaggaaaacagcagcgtagtgaagccaaagagacaaatgacagcaaggcagaggagaaactgaggcaagaacgaaggcaaggagaccaggtgaaatgaataccaaggtctacattaagtggcaatgagaatagaaagatgaagaataaaaaagaaaagagccaggaggattcggtgaccaactgagagagaaaaggagagaatcacaggctgccaggctgtacagctgagtcgatggtactgccacatatgagtagagggaaaatgaaaaaggtaggttaaggaggtagataatttgtttta

SEQ ID NO: 702078 - DNA, 1711 bp, Homo sapiens
cagcagtttcagatcatgaccctgggcgcctgcctgaccctgacaggcatttgcatgtacaacctccgctggaggccaagcctgagtggcaggcagaggagtcctcacctttgatgtcaagctgggcatggatgatgttgcccatgacggaggtaaggtggaggtttttgaccgtttccttggcgccccgagtgctggtgaagagcacacgggccaggcccaggtgcttgcgcgtacgggggtgaaggaggatctctacctcttccacctcaccgtacttacggcacatatccttcaggaaggtctcccgcacgttgtcattcagccttgcaaaagtcacttccttcagtggaatctgtccaatatagaactcgtccagctggggaaagaacaggagttggtatggggtctcaacactgaccactgttcctttgtccttcgggaaactttagcaagctccatgaagtcaagagagagatccgggaaagtgaggggcaagggaaggggcccaaaataagggatccatcagacctgaccccttttccctgaattcttctcaccacagaataacagcaagaattaagaacagaaatgtgcaaactaggccgggtgtggcagctcacacttataatcccaacactttgggaggatgaggtggacggatcaccagaagtcaggagttcaagaccagcctgtccaacatgataaaaccctgtctctactaaaaatacaaaaaaaaaaatttagctggatgtgatggtgggcacctgtaatcccagctactcaggagggtgaggcaggagaatcacttgaacctggcaggcagaggttgcactaagccgagatcacaccactgcactccagcctgggcaacacagcgagactccgtctcaaaaaaaaaaaaaaaaaaaaaaagaaagaaagaaagaaatgtacacactgaggaataaatatacgtggagagaacgagctacagggcgatgatttcctagctcagcctttactaggtaactaccatgaacgaggcactggaaatacagagatagaaaggaagagattcccatacagaaaagcagcatgacatgcacatacaaacacaacacgacccagtggcagctgacgcatacatggtgttctggagcccagggaaggaaacttttgtacagagtatgatcagggaagaattcataaagatggtgtcattcttactgagatttggggattaacaattcatcaaatgacaaggacccctggaacatggaaatataaaacaacttggtgtttttgaaaaaccgcaaagcgttatggtgtggatgtaacacaggggtgtggtgtcaaggcggaggataaggcttggccaggtcaataaccatacatgtcagtgtcccaaaacatggacttggcaacaaaaggaaaacagcagcgtagtgaagccaaagagacaaatgacagcaaggcagaggagaaactgaggcaagaacgaaggcaaggagaccaggtgaaatgaataccaaggtctacattmagtggcaatgagaatagaaagatgaagaataaaaaagaaaagagccaggaggattcggtgaccaactgagagagaaaaggagagaatcacaggctgccaggctgtacagctgagtcgatggtactgccacatatgagtagagggaaaatgaaaaaggtaggttaaggaggtagataatttgtttta

SEQ ID NO: 702079 - DNA, 1374 bp, Homo sapiens
tggtgtgagatgatgctcatcatcactggtcattagagaaatgcaaatcaaaaccacaatgtgatatacaatttttaagccccaccgtaagcctactaaatcagaaattatgagactaggtataggaatctatgttttaacaaatgcttcaagtgattctgatgctcattaaagtttgagaattactggtctatacaatcaccctggacaatccccaggactttaggtaccaccgatgcatgcactggtgactcctgattaaagctctactgtgcttgctgtaaattagtatttccaactaccagatatttctacctgcaagctcttttagtcattcagcaaaacctttctcaataccttttatagggtaagctgtgatctgtgcaagagccaagttgccagataaaatatgtctcgtgcaacatttgggacatacttgtgctaaagaattagttgttgtttttcaaatttaactgggagtccggatttttatgtactcaatctagcaatcccataaaagggttataaaaggaggactgaaagggtttctgcccaaaagaagcacaaagttcagccagggaaccaatgacataaacacagtaaaagaaaatatgataatctcaaaatctcacctttcaaaaatttacctccctgttctgatgttatttaacagctgcacggtctttgtgagttaagctacttcaaagttctcttctaaatacccacacaaaaaagagattctgactctggagttgaggaaagagtggtaaggcagagagtaacattctaatcaggcgtgcatataagaaatggactagaatatgaatcataatgaataataagaaagacattaaatttatttggatgttcttttccttaaattttgatctttatcaattgttatatgcaaagagtaataacatagttgaagctttctattttaaaatattttaataaagattggttccattgtttaaaaatgatacccaaatcaaaatttcatggtttggaatctggatctaaaactaaagtccttggcttatggttcaaactccagaccacaaaccaaagtactgtggctcatctggtagcattttatcctattatcaggacaaggatccagggagaactctaacattacatttgcaaacactgatgacaagagtcagtgtgaagcattctattaaccagtatgctttgtaacaagaaagcagattgctaaaacaataaatttgkcaggatgcaaaatatttaacctattaatttttttaaagttttctgaaagttttctatttaggaaaaagacaagtttctaaaacataaagcaagtcttttttttttaaatcaaggctttcaacaaaaaacatttccatc

SEQ ID NO: 702080 - DNA, 643 bp, Homo sapiens
aagtctaaggcaagacattgtcacattgttttcttatgattaaaaaaactttggctttcttttgcatgtgacactttcaattgtgttggagagaataagagctctaaatgtggtacttggttgtctaaggaattcttgatggagacagatttcatgtgaaatctaaattgtgtcactcactgtctgagctttagcattaagatctttagaagataatttgtttattcttaatgtaaccccaggctgaattctcttagattatcgtagaagaaatgttacctgaaagtagaaaatattcttgagattgcttcagacttgagcataatttttcttgtcaatcttgaaggttattactatttgcatatatatcacttttctttcaagtccccagaaactaaaaggtggcctgattagaagtaggagaagaagagattatttttatactgaaaacayactaaaaatggtcaacagtatttttcaagactgagtacactgataatgtctatgtgcctacttggtatatccctgagtttctgcaaagaaatttcttaagcttttagctatatgaacagaataccaaaaaaaaaatgctcttgcttaaatctttttaccatgttttttcaaaatttcaacttattttgag

SEQ ID NO: 702081 - DNA, 2375 bp, Homo sapiens
taggcaattttttcctgcctaaaattttgaaagatggaaaatccattaggtaattatgtccgacccaagagaccaattcaagattgttccctatagttcactctccagcaattttccagtctacttccctggggaaatgttaaagtcatctcccccacagctactttcaaatttaccctaaacctggtaccactgcaaagctttaaatgtaaactttataacaagacccaagctgaaattacaaacagccgttaaaaccaggatctctgttttttgcaaggagacaagacaatcctaggtacaaatggaaaagatcacatcaggcttttatgcatttatgagcctcagcatacctgttctcccacaagtcttagcacatgggaatttattttttggttctgtcattcttaaaagaagtgacaacctctgaggtagggacaagagtttatttggatatttttttttaagctgacaccagaaaggtcaagagcaggttacagagttctaaaaccctcaaaaattcagtaaggaagaggagcaaagtttgttcatcaacataggacatgttgctactattacaaggaatccaagcttcccaacagctgagattatacgatttacagcctaattgtggtcaagagtacacagcactgggattagggaagatctggattcatatcctggctgcacaacttattcgctatataatctcagacaaattcagtcaggtctctaaacttattttctcaatttaaaaatgaacctaacaatacctacctcatagaattgtgatgagcttaacataacatatgcatgatgcttttcacaaaacatcctacggcccagagtaaatccataataaatattaatgtgatacaaacctttaaattatgattaagcttcaaagaatctcagcaccttgcatttagaaagggcttggtttacacatgccaaatgatacatggattttcttttggtttcacactttggttttctaattccctatctcttttttatttatctccttatttgttcataatattaataactcgaattttatcttatgacccacagtgttttatcaactctataaatgagtcacattttttcatatatttttcatatatatatatataaacaattgtgatcactggaaattcctaaactttaaattccaaatatttaaagyattccctctgttgctgagggaaatcaggagcatttaataatgtgtgtagattaaatagtgtatactcgtttaagggcgatcttctctggacacccatttgcctcctggaactccatgtcctattccataaaggacctatttactgtgccaaaagatagatcctaaatcaaagagaaacaataaaaggagagctgaaaaaaacagccaaagatattcagtgttatttagactcagcaacaagttttctctattatcagacttcaatatcttgaaaagaatgatagatttttgtgctttttaggacagtttttcacaaaaagctaaggatatttacagcagagtgcaacactctagttttacttaattttctgtgtcatggggtagatgtcacctccacatttcgactctttgggcaatgaatgctgtttctggtttcagccactcctgacatctttgtcataacaaaggccctgttacctattcgcaacagtgtgaaatatgaatgacatggaatttttcctttacttagttttagagcaggttcattcatatagaccctttccttcaaatgttgagcacttgcgccagactctgtttcattgccataaaattctatagggcaggtgttactcttatcccctctttgcagaggacaccgaggcacagaaaggttaggaaaattccaacatcacagcagctgaagactggcacaggaggacccagttcagagcaatatgttcttaagtactctattagaatgcctccttaatattcagagtgcccataatggctcctctccactggtgaaaatgtagaaatctgcttgtttcctcagtgattcaatcagtcattcatatatttaatatgcttttatgtagtgagtccatactctgtggcaaggactgtgctagggagtgagtatccaatgaggtagacaaatgttgtatctgcccacgaggtatttgtaagctactgagagtttttcctttttttttttttaaaaaaaaaaccctaaaataaaaaattatctaattaattaaaacatttttaaactaaagttaaaagtatgcaaataattattaaataaagttaggatcactgctacaaacccagggaggggcctgtgaggggacacagcacaggtagccacttgggtctgaagggtcagggtacagatctctcatgc

SEQ ID NO: 702082 - DNA, 2375 bp, Homo sapiens
taggcaattttttcctgcctaaaattttgaaagatggaaaatccattaggtaattatgtccgacccaagagaccaattcaagattgttccctatagttcactctccagcaattttccagtctacttccctggggaaatgttaaagtcatctcccccacagctactttcaaatttaccctaaacctggtaccactgcaaagctttaaatgtaaactttataacaagacccaagctgaaattacaaacagccgttaaaaccaggatctctgttttttgcaaggagacaagacaatcctaggtacaaatggaaaagatcacatcaggcttttatgcatttatgagcctcagcatacctgttctcccacaagtcttagcacatgggaatttattttttggttctgtcattcttaaaagaagtgacaacctctgaggtagggacaagagtttatttggatatttttttttaagctgacaccagaaaggtcaagagcaggttacagagttctaaaaccctcaaaaattcagtaaggaagaggagcaaagtttgttcatcaacataggacatgttgctactattacaaggaatccaagcttcccaacagctgagattatacgatttacagcctaattgtggtcaagagtacacagcactgggattagggaagatctggattcatatcctggctgcacaacttattcgctatataatctcagacaaattcagtcaggtctctaaacttattttctcaatttaaaaatgaacctaacaatacctacctcatagaattgtgatgagcttaacataacatatgcatgatgcttttcacaaaacatcctacggcccagagtaaatccataataaatattaatgtgatacaaacctttaaattatgattaagcttcaaagaatctcagcaccttgcatttagaaagggcttggtttacacatgccaaatgatacatggattttcttttggtttcacactttggttttctaattccctatctcttttttatttatctccttatttgttcataatattaataactcgaattttatcttatgacccacagtgttttatcaactctataaatgagtcacattttttcatatatttttcatatatatatatataaacaattgtgatcactggaaattcctaaactttaaattccaaatatttaaagtattccctctgttgctgagggaaatcaggagcatttaataatgtgtgtagattaaatagtgtatactcgtttaagggcgatcttctctggacacccatttgcctcctggaactccatgtcctattccataaaggacctatttactgtgccaaaagatagatcctaaatcaaagaraaacaataaaaggagagctgaaaaaaacagccaaagatattcagtgttatttagactcagcaacaagttttctctattatcagacttcaatatcttgaaaagaatgatagatttttgtgctttttaggacagtttttcacaaaaagctaaggatatttacagcagagtgcaacactctagttttacttaattttctgtgtcatggggtagatgtcacctccacatttcgactctttgggcaatgaatgctgtttctggtttcagccactcctgacatctttgtcataacaaaggccctgttacctattcgcaacagtgtgaaatatgaatgacatggaatttttcctttacttagttttagagcaggttcattcatatagaccctttccttcaaatgttgagcacttgcgccagactctgtttcattgccataaaattctatagggcaggtgttactcttatcccctctttgcagaggacaccgaggcacagaaaggttaggaaaattccaacatcacagcagctgaagactggcacaggaggacccagttcagagcaatatgttcttaagtactctattagaatgcctccttaatattcagagtgcccataatggctcctctccactggtgaaaatgtagaaatctgcttgtttcctcagtgattcaatcagtcattcatatatttaatatgcttttatgtagtgagtccatactctgtggcaaggactgtgctagggagtgagtatccaatgaggtagacaaatgttgtatctgcccacgaggtatttgtaagctactgagagtttttcctttttttttttttaaaaaaaaaaccctaaaataaaaaattatctaattaattaaaacatttttaaactaaagttaaaagtatgcaaataattattaaataaagttaggatcactgctacaaacccagggaggggcctgtgaggggacacagcacaggtagccacttgggtctgaagggtcagggtacagatctctcatgc

SEQ ID NO: 702083 - DNA, 2101 bp, Homo sapiens
tagctgggcatggtggcaggtgcctgtagcmccagctactcgggaggctgaggcaggagaaactcttcaacctgggagggggaggttgcagtgagccgagatcatgccattgcactccaacctgggtgacaagagtgaaactccacctcaaaaaataataataataataacaatgaaagatggctaccaaccctcccctgacctcaccatggctctgtgtgactcctaggagtaaaatttccatagggtaacatgccataagtagttttctacttcctagcctaacatcaaaaattagtttggaatttatccaagtctccccactacctaatgatttgaaagttttaatatataaaaatgtcctaattttctcaaatgttcagtggagagggttaatatttccagccagcaggatcttaaactgtttgaaacttctttacgcacattgccccttaaaatctttctaaaatgcattaatacagctttttatctttgtaacagtctggtgaataaaataaaacttatctctgattaattcagaatcttggctccttctgcgagatttctcaggatatcaacatttcttaaatcttgtctcattgtccatatttgggtgtggagaacacagcccctggtgtgaaagagggtgtacaatttcaatagatgacagaaggcagcgttgctgggcttctatgtggcctctgtcttctagggagcacagtatactggggagaaagaacgagaggatgatgcaagaactcttaacccagagcccatcagagtgtggtgattcctttccttgcaaccagagaagttctgcttttatctgctttgaatttggagcttctgtgaaggatttcaatgcaaataaacgatgccatttctttacaagtttagaaaactactgataactgatttgaattagtaagtatccacatccaagtgaatcaaatctccaagtgatctaggaatttgcaatgtgatcttttccaactgaatattctataactctgaatctgctttcatcccggaccatttaccttggatgtttctgcagtaaacaaattcctcacaaaatctgactttcttaaaactcacctcttaaaaaagtactagggagaaaaaatatgactaaaccacagtcacaattttgactaaaaatagtattgcttcatattaaaagaaacctgagttactgtgaagaaatgctctctataaatcccacatacttaagcttcccagttggtttcctttccaaagagccaataaatatgtcctaggtgttcttggcaagtgagagcaccaaggcccattccacagaggaacagctcagagcagaaacccaggaaatatgcaaatcatattaagaacaaagggcaatgctgatcactaggaagttagtgttttacatgactaattatgccaagttgacgatagatcaactgaagagaacctccaaaaagaagagggctcaaatctatagtacattggtaagagcaaggggagcagaaggcatcccagagatggaagagtggaaggttgtgtacatggtgtgatgaacttgtttgctgcctctgagtagatgcatttcttagctccactcagaaacagggaacagggagaaccagcttcagcattacagcaagaaacttggccagacttgtgagggtcctgcctagggcctcccagcactgcccaaaggaaagaaaaggcatactgcaaggcaccctgggcaatgggagagaggcaagtgagcctgcaaaacagtgcctgattcaagcaaaaggcagcagtaaaaggaaggggtggcaataattgtaacaggagcaggaggtacccaagctttactagtggtctcagtgtgatagtcaagctgcctaggaaaagccaaatggaatatctgcaatgtattcctccctacccaaagttctagagggcaggaggggaggatgggggcctgatgaagagatgccttttcagcagttttgctggtggggcttcatagagaaataattaatcatattgctactggaggaaggtttagctgcagttacttgcttattctttgccaagtaagtggcctaagtcagtgggatttgtg

SEQ ID NO: 702084 - DNA, 2101 bp, Homo sapiens
tagctgggcatggtggcaggtgcctgtagccccagctactcgggaggctgaggcaggagaaactcttcaacctgggagggggaggttgcagtgagcygagatcatgccattgcactccaacctgggtgacaagagtgaaactccacctcaaaaaataataataataataacaatgaaagatggctaccaaccctcccctgacctcaccatggctctgtgtgactcctaggagtaaaatttccatagggtaacatgccataagtagttttctacttcctagcctaacatcaaaaattagtttggaatttatccaagtctccccactacctaatgatttgaaagttttaatatataaaaatgtcctaattttctcaaatgttcagtggagagggttaatatttccagccagcaggatcttaaactgtttgaaacttctttacgcacattgccccttaaaatctttctaaaatgcattaatacagctttttatctttgtaacagtctggtgaataaaataaaacttatctctgattaattcagaatcttggctccttctgcgagatttctcaggatatcaacatttcttaaatcttgtctcattgtccatatttgggtgtggagaacacagcccctggtgtgaaagagggtgtacaatttcaatagatgacagaaggcagcgttgctgggcttctatgtggcctctgtcttctagggagcacagtatactggggagaaagaacgagaggatgatgcaagaactcttaacccagagcccatcagagtgtggtgattcctttccttgcaaccagagaagttctgcttttatctgctttgaatttggagcttctgtgaaggatttcaatgcaaataaacgatgccatttctttacaagtttagaaaactactgataactgatttgaattagtaagtatccacatccaagtgaatcaaatctccaagtgatctaggaatttgcaatgtgatcttttccaactgaatattctataactctgaatctgctttcatcccggaccatttaccttggatgtttctgcagtaaacaaattcctcacaaaatctgactttcttaaaactcacctcttaaaaaagtactagggagaaaaaatatgactaaaccacagtcacaattttgactaaaaatagtattgcttcatattaaaagaaacctgagttactgtgaagaaatgctctctataaatcccacatacttaagcttcccagttggtttcctttccaaagagccaataaatatgtcctaggtgttcttggcaagtgagagcaccaaggcccattccacagaggaacagctcagagcagaaacccaggaaatatgcaaatcatattaagaacaaagggcaatgctgatcactaggaagttagtgttttacatgactaattatgccaagttgacgatagatcaactgaagagaacctccaaaaagaagagggctcaaatctatagtacattggtaagagcaaggggagcagaaggcatcccagagatggaagagtggaaggttgtgtacatggtgtgatgaacttgtttgctgcctctgagtagatgcatttcttagctccactcagaaacagggaacagggagaaccagcttcagcattacagcaagaaacttggccagacttgtgagggtcctgcctagggcctcccagcactgcccaaaggaaagaaaaggcatactgcaaggcaccctgggcaatgggagagaggcaagtgagcctgcaaaacagtgcctgattcaagcaaaaggcagcagtaaaaggaaggggtggcaataattgtaacaggagcaggaggtacccaagctttactagtggtctcagtgtgatagtcaagctgcctaggaaaagccaaatggaatatctgcaatgtattcctccctacccaaagttctagagggcaggaggggaggatgggggcctgatgaagagatgccttttcagcagttttgctggtggggcttcatagagaaataattaatcatattgctactggaggaaggtttagctgcagttacttgcttattctttgccaagtaagtggcctaagtcagtgggatttgtg

SEQ ID NO: 702085 - DNA, 2101 bp, Homo sapiens
tagctgggcatggtggcaggtgcctgtagccccagctactcgggaggctgaggcaggagaaactcttcaacctgggagggggaggttgcagtgagccgagatcatgccattgcactccaacctgggtgacaagagtgaaactccacctcaaaaaataataataataataacaatgaaagatggctaccaaccctcccctgacctcaccatggctctgtgtgactcctaggagtaaaatttccatagggtaacatgccataagtagttttctacttyctagcctaacatcaaaaattagtttggaatttatccaagtctccccactacctaatgatttgaaagttttaatatataaaaatgtcctaattttctcaaatgttcagtggagagggttaatatttccagccagcaggatcttaaactgtttgaaacttctttacgcacattgccccttaaaatctttctaaaatgcattaatacagctttttatctttgtaacagtctggtgaataaaataaaacttatctctgattaattcagaatcttggctccttctgcgagatttctcaggatatcaacatttcttaaatcttgtctcattgtccatatttgggtgtggagaacacagcccctggtgtgaaagagggtgtacaatttcaatagatgacagaaggcagcgttgctgggcttctatgtggcctctgtcttctagggagcacagtatactggggagaaagaacgagaggatgatgcaagaactcttaacccagagcccatcagagtgtggtgattcctttccttgcaaccagagaagttctgcttttatctgctttgaatttggagcttctgtgaaggatttcaatgcaaataaacgatgccatttctttacaagtttagaaaactactgataactgatttgaattagtaagtatccacatccaagtgaatcaaatctccaagtgatctaggaatttgcaatgtgatcttttccaactgaatattctataactctgaatctgctttcatcccggaccatttaccttggatgtttctgcagtaaacaaattcctcacaaaatctgactttcttaaaactcacctcttaaaaaagtactagggagaaaaaatatgactaaaccacagtcacaattttgactaaaaatagtattgcttcatattaaaagaaacctgagttactgtgaagaaatgctctctataaatcccacatacttaagcttcccagttggtttcctttccaaagagccaataaatatgtcctaggtgttcttggcaagtgagagcaccaaggcccattccacagaggaacagctcagagcagaaacccaggaaatatgcaaatcatattaagaacaaagggcaatgctgatcactaggaagttagtgttttacatgactaattatgccaagttgacgatagatcaactgaagagaacctccaaaaagaagagggctcaaatctatagtacattggtaagagcaaggggagcagaaggcatcccagagatggaagagtggaaggttgtgtacatggtgtgatgaacttgtttgctgcctctgagtagatgcatttcttagctccactcagaaacagggaacagggagaaccagcttcagcattacagcaagaaacttggccagacttgtgagggtcctgcctagggcctcccagcactgcccaaaggaaagaaaaggcatactgcaaggcaccctgggcaatgggagagaggcaagtgagcctgcaaaacagtgcctgattcaagcaaaaggcagcagtaaaaggaaggggtggcaataattgtaacaggagcaggaggtacccaagctttactagtggtctcagtgtgatagtcaagctgcctaggaaaagccaaatggaatatctgcaatgtattcctccctacccaaagttctagagggcaggaggggaggatgggggcctgatgaagagatgccttttcagcagttttgctggtggggcttcatagagaaataattaatcatattgctactggaggaaggtttagctgcagttacttgcttattctttgccaagtaagtggcctaagtcagtgggatttgtg

SEQ ID NO: 702086 - DNA, 2101 bp, Homo sapiens
tagctgggcatggtggcaggtgcctgtagccccagctactcgggaggctgaggcaggagaaactcttcaacctgggagggggaggttgcagtgagccgagatcatgccattgcactccaacctgggtgacaagagtgaaactccacctcaaaaaataataataataataacaatgaaagatggctaccaaccctcccctgacctcaccatggctctgtgtgactcctaggagtaaaatttccatagggtaacatgccataagtagttttctacttcctagcctaacatcaaaaattagtttggaatttatccaagtctccccactacctaatgatttgaaagttttaatatataaaaatgtcctaattttctcaaatgttcagtggagagggttaatatttccagccagcaggatcttaaactgtttgaaacttctttacgcacattgccccttaaaatctttctaaaatgcattaatacagctttttatctttgtaacagtctggtgaataaaataaaacttatctctgattaattcagaatcttggctccttctgcgagatttctcaggatatcaacatttcttaaatcttgtctcattgtccatatttgggtgtggagaacacagcccctggtgtgaaagagggtgtacaatttcaatagatgacagaaggcagcgttgctgggcttctatgtggcctctgtcttctagggagcacagtatactggggagaaagaacgagaggatgatgcaagaactcttaacccagagcccatcagagtgtggtgattcctttccttgcaaccagagaagttctgcttttatctgctttgaatttggagcttctgtgaaggatttcaatgcaaataaacgatgccatttctttacaagtttagaaaactactgataactgatttgaattagtaagtatccacatccaagtgaatcaaatctccaagtgatctaggaatttgcaatgtgatcttttccaactgaatattctataactctgaatctgctttcatcccggaccatttaccttggatgtttctgcagtaaacaaattcctcacaaaatctgactttcttaaaactcacctcttaaaaaagtactagggagaaaaaatatgactaaaccacagtcacaattttgactaaaaatagtattgcttcatattaaaagaaacctgagttactgtgaagaaatgctctctataaatcccacatacttaagcttcccagttggtttcctttccaaagagccaataaatatgtcctaggtgttcttggcaagtgagagcaccaaggcccattccacagaggaacagctcagagcagaaacccaggaaatatgcaaatcatattaagaacaaagggcaatgctgatcactaggaagttagtgttttacatgactaawtatgccaagttgacgatagatcaactgaagagaacctccaaaaagaagagggctcaaatctatagtacattggtaagagcaaggggagcagaaggcatcccagagatggaagagtggaaggttgtgtacatggtgtgatgaacttgtttgctgcctctgagtagatgcatttcttagctccactcagaaacagggaacagggagaaccagcttcagcattacagcaagaaacttggccagacttgtgagggtcctgcctagggcctcccagcactgcccaaaggaaagaaaaggcatactgcaaggcaccctgggcaatgggagagaggcaagtgagcctgcaaaacagtgcctgattcaagcaaaaggcagcagtaaaaggaaggggtggcaataattgtaacaggagcaggaggtacccaagctttactagtggtctcagtgtgatagtcaagctgcctaggaaaagccaaatggaatatctgcaatgtattcctccctacccaaagttctagagggcaggaggggaggatgggggcctgatgaagagatgccttttcagcagttttgctggtggggcttcatagagaaataattaatcatattgctactggaggaaggtttagctgcagttacttgcttattctttgccaagtaagtggcctaagtcagtgggatttgtg

SEQ ID NO: 702087 - DNA, 2325 bp, Homo sapiens
tgctgaatttaactcaatatatttcagttaagtgaaaatggtgcttaatgtagtctttagaatgactttcaggtgttttcaactaaaaatatatatccagaactgtgttcttgtagaaatacaagtaagatttatgataattttcttcaaaagagttttcctaatctcagcagtatccaatgggtgaagaacacttgactaactcttgggccacctctattacttattgtactctggaagcccttggtgaatgtttacaattaaggaatgtagtatttctgtttgtactttaagtcaaatgcttatatgaaatatgtggcaacaaatagagaagactggctctggtggtcattatgcagtatatactctatttaaggatcagtggtagtatagcatgattgaatgtcattaatataggaataataactggcatatgtggagagtaggggagtaaaaagaatgaattccagtcctgtgattaaaagtgtaaactataggatgggcatggtggttcgcgcctgtaatcccagcactttgggaggccaaggcgggcrgatcacgaggtcaggagatcgagatcaccctgaacgatatggtgaaaccctgtctctactaaagatacaaaaaattaggcaggagtggtggtgtgtgcctgtaaccccagctattcaggacactgaggcaggagaatcccttgaaccaaggaggcggaggttgcaatgaggcaagatcacaacattgcactccagcctgggctacagggccacactctgtctcaaaaaaagtaaactagtaaactagagactctactgtagtatatttcaggacctagaagttttacttttataaacatggtgcctggaagatgtcactaatgtattttacttcagcatagggaacaaactttttaagtatattaataaatattcctgtatggtaagtttttaaaattttttaaaataaactttatgaatatgacaaataaaaaagaaagttcgggcctaaaaattagagcttttgggaaagcactaattatctcagatattagttcaaaatcaaaaatatacatggatgatgctataataataggctgtttttcattgataataagtttggcattaataatatgaccaggaataaatttatttaagaaatgtagatgaagtatcgatattatcatgttatagggatcaggtaagagttatcaccaaattctgcccctgtcatttgacccttttgtttaagaattcctgagggcactgtacacactacagatgttatcagaaaaagttacgttttaatgggtgacttcagtagcacaataacaatagcaggtatttcaaaaagtctgacatgcatcatgcagtttaggtttgccatattatccagcctcagatacttcctctacattttggcataggcctatctgaatgatgttcaggctactattcagagaaagagtggcctaggccaacagacaactagtccaagtacccacacaaccaggtagatttagagaaagagaaaaagcagcttgccctgctggactgggcccagccaatatctgaagcaggcaggtgaaaaggaaaaggtgcagatggatcctgacctgaaggtggatcctgtccagtataaaatgtggccccacaaggactcagcactaattaccagattaacaacccctcccaatggacgcagcagaaggaaatataggaaggagacaaacagaaggaagccaggcaggggaacaggttcagatgccccctccatagaacatagtaggaatatattttcttctatatagaataaaccagtgacctttgtccatttgtcaattactttctaatttcctatctgataaagctttcttgtaatggcctctaaattttgcttaaacctgagttactttaacagtgatgtagcaaataaaattaaacactgtaaattattgttcagtttatgaggattgctttggagtttcaaaattagtaacaacataaaaatgtcttggctatagaagaacatattaatcactgttgtcaaagctttgtagcaccttgtctaagtgttaataatctgttgaccaaattcagcaaaatacaattttgaggttattcaaaagctttatttttattcatgataccaacatgttccttatttctatgccaaaaaaatccaaaattagcaatactggttggtaatactctgaatttgtgtcaaaaattgtcacttgaaatttttcttggaagtagtgcttgataatttgtaattccaatgaagttatacataaaacccttgcagcatttatttatttcttgtagtagc

SEQ ID NO: 702088 - DNA, 2639 bp, Homo sapiens
gccttggcctcccaaagtgctgaaattacaggcatgagccacgatgcctggcccctatctaaccctattcttgaaaggttttcccattctcattaaggaaaatgatagtgccattaggaaggcaaagatagtaggtggagaaggagaacaagaaaaagaatgactagtagtacactcatgataattactgataatagctgttattagcttgcagaaagaagatttgaatccaagtcaataagttgtgaacctgttctctaattctttattacataaatcaattgttactttacccctaattgcttgcttttcaattgaatatgagtttcttttaaaatttctgtatattttaaaagaataagatatttggcaaaaagtaccaagtgttttaaaaatgcattggagtcataatatgttatataaaagcatgcagagaaaacaataaatcaagatgtatatattcaatatttatggaggatattcataatataaacattggaagtaatccaaacatcttaaattaaggaatacttatactctgtgtatgtcataccatcacaatcattttatcaaacaaatattgttatttaattacactggcacccataatacaagtttagctggaaactgaggatctaaatgacaaatatagcaaaatgtcaacttatttwaagatgaaaaggtacatgcaataatattaaaattttcttaataaatgtcacatatgtacattatattatataaataaaataaaaaccataatgaacatataccatttttacattggtaatgcctctgggacagaaattataggagcattttattttctttttaaaacttttcatatgtttataaaatttcttgcattgatcttttttttttgaaatggggtcttgctctgtcacccatgtgggagtgccgtgcacgatcttggctcactgcaacttccacctcccacgttcaacagattctcctgtcttagcctcccgagtatctgggattacaggaactcaccaccacacgtggctatttttttttttttttgtattgttagtagagatgggttttcaccatattggctaggctggtcttgaaatcctgacctcaggtgatccacccacctcggcctcccaaagtgcaaggattataggtgttagccaccgtgctcggctcttgcattgatcttgtattacttttgtaaagttttcacagaatgggaaaaaaatagcccacatcagtgatgaatctgtaaacagaggatatattattttaacactgggtagatgaagaaggctctgggcatcaggccagtgagacaaaacactgaatacaagttacattaaatgtggctacaagttactgcaatcacatgcaatacctgaatataccatgtattacctggaatagtactacaatgactctcgtgttgacattgaggtcttaagattaaaaatcatattttaaaaaatactcagcaatttgtggtctgcacagtcaatattttctttcttcatttgtaaggaacacttaagaaaaagttttaccccaatcattacatttgaaaatatttaaatttaaaaattggcatagactgggaaccacaagtcagaataattgtcaatcaattccaggcaagcacatcttcaccaagagttgaatataatgtgagaaagctactcaagacagttaccataactcctctggagaaaggcctggaagcctctcccactaaggtgcaagcactccctgtgagacatagtaaagggatgatgagaattcctcacacccagttacaaatagcacatcaatttagctgtgtgatttcagggcaaaatgtgtcctacctaaaccttgacctgagaaatatgatcattcagctatgtaaccatttactgtataattctgtattacaaatgggagtctctggcccatttcacagaaattccaactacaataccaaacacctgaatgtcagtgattcttaatcaccagcttttaataacgattttttttggtaaaaatactggaaatttctgacaaactttaagtgaagtatgagggatatagtccaatatgaaatttgatggtgtgtgtaaacaggaaattcaatgaaaaatggataataattataaaaaatgacaaaagttattgatgtttaagaaaacaaaaatgaggtcaataaatcattatcctacaaaatatttgcaacctataaaaacctgagaaatctattcttgaagaagtataatgtaaattaatcttttcaaataaatttaaatatatcatttgaaactgaagttctacatctagaaatctgtcatgcagaaatccttgcacgtaagcacatgtatgaacaggatgtttcctccagcacttaaatggctataagtcaatatcttcaagatatttctgggatagtatttatttcctctatgtggggcccatttgtgaacatctattttatatttaaacatctataaataaatatatttaaaagttttaaaaaatattagcagttatagaaatctaaattcacaaaattttagtaatttttctgatttctatgtcaatatacaataaatattacagtaacttagtgactgctgctgcgtacttcaacaggttttatatatggtgat

SEQ ID NO: 702089 - DNA, 1958 bp, Homo sapiens
tactgccattcctatttacagtatatttgagtgaatgattatatttttaaaaagttacatggggcttttttggttgtcctaaacttacaaacattccactcattctgtttgtaactgtgattataatttttgtgataatttctggcctgattgaaggaaatttgagaggtctgcatttatatattttaaatagatttgataggtttttaaattgctttttttcataaggtatttataaagttatttggggttgtctgggattgtgtgaaagaaaattagaaccacgctgtatttacatttaccttggtagtttatttgtggatggcagttttctgtagttttggggactgtggtagctcttggattgttttgcaaattacagctgaaatctgtgtcatggattaaactggcttatgtggctagaataggaagagagaaaaaatgaaatggttgtttactaattttatactcccattaaaaatctctaatgttaagaaaaccttaaataaacatgattgatcaatatggcagatgatttacagtccattatatgacatttgtaagccactcaacactagccttacaaggttcatgaaaggaggaaaacattaattctttctgcctttgctgatataatccacatagtaataatttaagctataatttatttttaaaatgagtgcctcttgggaagcttcttttctrttctaacagttccctgttaaaatgaaaatcttaggccagtgcagtggctcacacctgtaatcccagcactttgggaggctgaggtgggtggatcacttgaggtcaggagttcgagaccagcctggccaacatggtgaaaccctgtctctactaaaaatacagaaaaattagccagggttggtgcatgtgcctgtaatcccagctactcaggaggccaaagcaggagaattgcttgaacccgggaggtggaggttgcagtgaaccaagatcgcaccactgcattccagcctaagcaatagagcgagactccctctcaaaaaaaaaaaaagaagaaaatcttaaagctgtattagggcctgttaggttactgatatttgaatgcctatttacttatttactacattgagtcttttgttatcctctgacctataaaatattttaataaattactggtttacttcaagggaaaagaaggaaaatgagaaacatacatctttttttcactccttatctcattcctgtttggtgatgggatggattggggtaggaaggaatgttaatatgagagaaattttaaaatgtataaaaaagtaaaaggttgtattgttttgctcagtttgaaataaagtgaataccaatagcacttaaaaatgtctgcatgggctgggcacggctcgtcacgcctgtaatcccagcactttgggaggccgaggcaggcgaatcacctgaggtcaggagttcgagaccagcctgaccaacatggtgaaaccttatctctactaaaaatgcaaaaattagccaggcatggtggtgtgtgcctataatcccagctactggggaagctgaggcaggaaattgcttgaacctgggagacggaggttgcagtaagctgagatcgtgccactgcactccaatcagggcgacagagcgagactctgtctcaaaataaataaataaataaaaatgtctgcatgacccatatggttatgaagtttttttcctagcaaatgattgcagattatttatgggggctagaagatattttgctatcaatgtaaggatttttttccccttaggtcagtctattcactgtttagatctggtaaattacttgtatgaattgaataaattctctgtatcattgtactgtttaatagtctctgatacaattgtgatactcataaggtattttcccccctttattatgattacattctagatcataaacattgtaagggcatcttttcattata

SEQ ID NO: 702090 - DNA, 1374 bp, Homo sapiens
gactctgtttcttgaattgtaccttggcagttatcaccaaaagttgagttaaggtcacacagccaccaagaggcagaggccattcagggaccggtctgtgagccactctggtcaccccataatgcctccacagcgctttgttcaaagggaacaaggggtgctttccaaccaaggtgccagtcagctttatacatttttcctttcttttttttttttttttgccttttttttaaacaaaaaattttattcattcatatatcttattttttaaattgtggtaaagtatacatgaaaatttactattttttcaagtgtacaattcagtggcattgagtacattyatgttgtcatacaaccattcactgctatccgtttctagaactttttctcatcctaaactgaatctgtactcattaagcactaactcttcattccccctcctccaggccctgcaaccacccttctactttctctccccgtaagtgacttctgggcatctcataagtggaatcatgcaatagtcttccttctgtgtgcatgcagcttatttcacttagcataacgtttgcaaggttcatccctgttgtagcacgtgtcagaatttcattcctttttaaggagctttgtacattttaaaaaacagtttttctatacaactaggctttttctttttgccacttgacatgcttattaagaattaaaggtactatgctaagtcctatgaggcatataaagtgaatttagcatcatctcatccttcaagcagcttatggtttggtagaataaacgagacggacacagatggtaataatacattgtagactgtgctaagtgctgtaagacatatacatggaggcctctgcgatttagtcaagcatgaaattgcctccagccatggggctggagatttcacaggggagaactggagccaggctttgagagagtgatagggtatgggtgggagagatagcgtcaaaggagactcccactagaaggaactgcatgagccaaggtgtggcgtgggggaagtaaaggccctgaataggggacatgttcaggcttaggggagtgtttgggacttttgtggtgatagtagtagctacagctgtgtaaaaagagattagggcctgatcaccaagggcttcgcataccaggctgaggattaaccttgctcacaggcattgtaaagctgttaatgattttttggcagtgggtagctgcaaatagagttgccacttaagaatattagtatgtgagctctgcatagactgggttggggacaggaagagacttgaaggaggccaaggtgggtggatcaccaggtcaggagttagagaccagcctggccaatatattgaaaccctgtctctattg

SEQ ID NO: 702091 - DNA, 647 bp, Homo sapiens
tattttgcattagtgattatgattcttatcccaaaattctagaaagtaataaattctgtatgaataagcataaaaaataaataaatatgcaataacattaaattaaatgtctttacaagaagcagtgaaggcactggtcttaagtgagaatatttgcctgggagtagagataaagacacaaaccgaatgtgaaataccaggtaataattattttgcattaaactctttttatcgggaatagtatgatattttcartgtcactccattcatgttgatttggagctgacagttattttgtgtaagcagagatttaattttatattgaaagtcagtgcaaaattatgaataggatatactaataaatacaaagtaataacaaaagtcaaagcagtgttctaaataaaaattctgggttccttaaaaattattttaaatttatctttgaaatagttttcttagattaatctcaggatatgagaaagtcaattaagtgtgagtaaagttagtatcattaaacaaattgtctattaaatgcaagacgtggtaatatacagaatttatcaggcattaccaagtctaggcacatataggaaatgcagcactcagaatggtttcaatgtagtagttgatgcttgtaaggtagggga

SEQ ID NO: 702092 - DNA, 660 bp, Homo sapiens
tgttttcaagatataatcctctgatacctttctcaaaaatcacctgccattgcttggcaaaaatgtagattcattagctcaccacagactactggatgaaagtttttgatgatgaggctctagaatccacatattactagctttccttggggactgtgatagatttaaattgaaaaaaaaaaaacactgcctaatcagtaatacagaatacctcatttatttttagaagggatgtctctgaggagcagaatggtaaagtgacctgccagagtagcacagtatgttaatcaatattaatatgtttactgatttgaaaacttgtgcttttcrcctacacaccattttttaaccttcatgcatcacctctaaataatgatagtcagttgtttgttatatactggtcacaataatgaataatgaaagaattgagcttaaatatgtttttttagtgggtactagagaaggcaataagaatagataaaaagggaataatggaagaatagccagcatatggtcaacatgtgataatataatctgtattccagtattgtgacacccctactgtagacgtaacctacattgtattccacagattccctgtctttatttgtcttcatgtttatcaaaatactgtgaaaattcaaacattgcagaaatata

SEQ ID NO: 702093 - DNA, 1339 bp, Homo sapiens
taagcttatttatttatttagtgtaagctaatttgaaatgtactttgcttcttgcaatcagaatagtcttatgataaaaaacttttaaaaagtaacatctacattaaaaattattaattttygtgggtacgtattaggtgtatatatttatgggttacagaagatattttgatataagcatgcagtgttttataattacatcaggtaaatggggtatccatcacttcctgcacttatcctttgttacaaacaacccagtaatactctttcagttatttttaaatgtacagttaaattatttttgaccatagttttttaagagcagaaataaattttatagtgggtctatctcatacagtccacttactttgtagacaatttctcttttgctcagatttatttgagttgctaaaaaaaatagccatgtaaattctaggtttattcacactaagtgctttcctttttctcttttaatgaaaacctgtgtttttttctttccttctcagcaagaacccgtattattcaatttgcaactttctagagagtcagcccagttcatataattctttatagttttagcagactatgggtcaaaaataggaatgtatctaccatacgtttgatggtaaattagccagtggtttcatttcctcattatatttataagccaggtcattaagtaaacaaattaattgaattatcaaatgcaacataatttcttctgacccaagcaatttggggatgattctaccattaaaggttatcattaggaagaaaattaagagcgtaggcaaatagtggttgaactgctctcaaaatgtggactataagcacatttggaaatgtttcagaaatttaatttccatcttccacttcgatgtgtatggcagcaaatattaatccaccctatactattccaaagcttatcaagaacaaaacaatagcacatgcagtatttctatagaattgtcatctactgggaaatatagagaatagtattttagatgtctacagcttctggaagatcacatttttgccttatatagtgtacattgcctttagttagtttctttggtcaaataaaagattctttgattttcctttatgaaagttgcaatgaaattttccaagtccaaaactgaaattttaaaaagttatttgtaattctctaattgttaggttttttttttctaataaaataaagccacctcagggtccaatattctttccttgtcagtttatatcagtggttatttagtataagtcaatgatttagttcagatcatttattttgcctctgtaacatggtgcttaatttctaatttaacttttccatata

SEQ ID NO: 702094 - DNA, 1339 bp, Homo sapiens
taagcttatttatttatttagtgtaagctaatttgaaatgtactttgcttcttgcaatcagaatagtcttatgataaaaaacttttaaaaagtaacatctacattaaaaattattaattttcgtgggtacgtattaggtgtatatatttatgggttacagaagatattttgatataagcatgcagtgttttataattacatcaggtaaatggggtatccatcacttcctgcacttatcctttgttacaaacaacccagtaatactctttcagttatttttaaatgtacagttaaattatttttgaccatagttttttaagagcagaaataaattttatagtgggtctatctcatacagtccacttactttgtagacaatttctcttttgctcagatttatttgagttgctaaaaaaaatagccatgtaaattctaggtttattcacactaagtgctttcctttttctcttttaatgaaaacctgtgtttttttctttccttctcagcaagaacccgtattattcaatttgcaactttctagagagtcagcccagttcatataattctttatagttttagcagactatgggtcaaaaataggaatgtatctaccatacgtttgatggtaaattagccagtggtttcatttcctcattatatttataagccaggtcattaagtaaacaaattaattgaattatcaaatgcaacataatttcttctgacccaagcaatttggggatgattctaccattaaaggttatcattaggaagaaaattaagagcgtaggcaaatagtggttgaactgctctcaaaatgtggactataagcacatttggaaatgtttcagaaatttaatttccatcttccacttcgatgtgtatggcagcaaatattaatccaccctatactattccaaagcttatcaagaacaaaacaatagcacatgcagtatttctatagaattgtcatctactgggaaatatagagaatagtattttagatgtctacagcttctggaagatcacatttttgccttatatagtrtacattgcctttagttagtttctttggtcaaataaaagattctttgattttcctttatgaaagttgcaatgaaattttccaagtccaaaactgaaattttaaaaagttatttgtaattctctaattgttaggttttttttttctaataaaataaagccacctcagggtccaatattctttccttgtcagtttatatcagtggttatttagtataagtcaatgatttagttcagatcatttattttgcctctgtaacatggtgcttaatttctaatttaacttttccatata

SEQ ID NO: 702095 - DNA, 634 bp, Homo sapiens
tttgtctaaatttttgtatatttaaaataatttatagggttttttattattatyacacttgaagttttagggtacatgtgcacaatgtgcaggttagttacatatgtatacatgtgccatgctggtgtgctgcacccattaactcatcatttagcattaggtatatctcctaatgctatcttttagcagtttcctcgtttcaggtcttagatttaagactttaattcattttgagttgatttttatacatagtgagagatagggtctagtaagctgattaggttactctagctttgtagtatattttgaagaagtcaggtagtgtgatgctgccagttttttttgttctgttttatttgttgttgttttctccagattactttgactatttatatgaaccacaacgaacaaacaaaaacacaaggtcttttgtggttccatataaattatttccatgaagaatgatattgatattttgatagagattgcaccaaatgtataattgctttggatggtatggacattttaacaacatcggggaaacactccaggacattagtttaggcaaaacctcttgtgtaagacctcaaaagcacaggcaacaaaaacaaaagtagacaaatccgattacata

SEQ ID NO: 702096 - DNA, 634 bp, Homo sapiens
tttgtctaaatttttgtatatttaaaataatttatagggttttttattattattacacttgaagttttagggtacatgtgcacaatgtgcaggttagttacatatgtatacatgtgccatgctggtgtgctgcacccattaactcatcatttagcattaggtatatctcctaatgctatcttttagcagtttcctcgtttcaggtcttagatttaagactttaattcattttgagttgatttttatacatagtgagagatagggtctagtaagctgattaggttactctagytttgtagtatattttgaagaagtcaggtagtgtgatgctgccagttttttttgttctgttttatttgttgttgttttctccagattactttgactatttatatgaaccacaacgaacaaacaaaaacacaaggtcttttgtggttccatataaattatttccatgaagaatgatattgatattttgatagagattgcaccaaatgtataattgctttggatggtatggacattttaacaacatcggggaaacactccaggacattagtttaggcaaaacctcttgtgtaagacctcaaaagcacaggcaacaaaaacaaaagtagacaaatccgattacata

SEQ ID NO: 702097 - DNA, 669 bp, Homo sapiens
tgcatagtattccatggtgtatatgtgccacattttctttctatccagtctatcattgatggacatttgggttggttccaagtctttgctattgtgaatagtgccacaataaacatacatgtgcatgtagaatgatttataatcctttgagtatatacgcagtaatgggattgctgggtcaaatggtatttctggttctagatccttgaggaatcaccacactgtcttccacaatggctgaactaatttacactcccaccaacagtgtaaaagtgttcctatttctccacatcctccccagcatctgttgtttcctgactttttaatgatcgccattctaactaacgtgagatggtatcgcattgcagttttgatttacatttctctaatgaccagtaataatgagctttttctcatatgtttgttggccgcataaatatcttcttttgagaagtgtgtgttcatataggataggaattctaatatattaaacaaataaaaacaaagcacatcaggttaaggagagcaagtcttagagccctgccagtgccaactcctgagatgcctccaaagagctccatgtaacactacctgaaaactagtggattttgtgttttgtttygttttgttttcctagcacttgggaacgaaatatctgtccagcaaaga

SEQ ID NO: 702098 - DNA, 667 bp, Homo sapiens
gcagccataaaaaatgatgagttcatgtcctttgtagggatatggatgaagctgtaaaccatcattctcagcaaactatcgcaaggacaaaaaaccaaacaccgcatattctcactcacaggtgggaattgaacaatgagaacacatggtcacaggaaggggaacatcacacactggggcctgctgtggggtggggggaggggggagggatagcattaggagatatacctaatgttcaatgacgagttaatgggtgcagcacaccaacatggcacatgtatatatatgtaacagacctgcacattgtgcacatgtaccctaaaacttaaagtataataaaaaaaagttaagcaaaaataaataaataaataaaacaaatwaaaaggtataaataaccttatatgtgaggatttgatattcaatttaaatagagacttcaaaaaattcaaatgaagataactaaatcactgcttgatacatggtgcactgattaatagcataagctctggaatcatagagacttatttttgaatacccactctgtcactgactagctctgtaaccttggacaaattatttaacctttctgacccttggttatctcatctataaaatgggaattgcaacataacttactcaaaaggtataactgtggcactaattctaa

SEQ ID NO: 702099 - DNA, 1055 bp, Homo sapiens
cgaaagaaaactattatttgttaacactaaccgagagatttttatgatattcaagtaaaatgatagaatgaattattttaaaaatgcatgaatcttcaccttctgtgaagtgtcatggaggattagttctaactaatatgcctgtaagtaactgacttaatgcgtctattggttctcttaatgctgtaagtgacagaaaactggtctcaaactgatttaaacaataaatatgatcaaggttccggttttttgtttcttgttttttttttttttttttcacatttctctgggttctatttttctgtgttgacctagcagcttcacctgacttccctcttggtgacaaaaatggcctgaagccgtttcaraacccacatctgcaaacttacttttgatgaaaatcatctctttagggaccttctttcccaaagcatccaggaaagactgctctgaaactgactggcctgaattaggtcacatgctcattcctgtactaaatcacacctcacttctacagctaaaagtcattaaatctcaaccaaactctacagctgcaccacaacaaaggtagagaagtaggtgcaaagttcctcaaaggaacgtaagggtgaaagatgattgactgataaacagacaggtagacagaatagatagatgaattaggaaaagataaccaaccaatatctgtcacattgctttgacttgattttttagtcaattaatgaaactgaatggtaattttgacattacaacaatactttccaaatgtaggcaggttgtggagatcatttaaggaaaaaatgtatgaggtgttgtagcagatactgtcggtgccccaccgatatccctttagcacttaccatttttatacgtgcttcttaatttccaacttcctgtacttgcatctctttgcttggggctatctctgctcattcttgggagagagcagaaatgtagcagttatgcccctgtagagcagcagttgatagatcaataccctgtcccccttgcccttcagatctaataactccaagcttaattccctacatctttca

SEQ ID NO: 702100 - DNA, 1055 bp, Homo sapiens
cgaaagaaaactattatttgttaacactaaccgagagatttttatgatattcaagtaaaatgatagaatgaattattttaaaaatgcatgaatcttcaccttctgtgaagtgtcatggaggattagttctaactaatatgcctgtaagtaactgacttaatgcgtctattggttctcttaatgctgtaagtgacagaaaactggtctcaaactgatttaaacaataaatatgatcaaggttccggttttttgtttcttgttttttttttttttttttcacatttctctgggttctatttttctgtgttgacctagcagcttcacctgacttccctcttggtgacaaaaatggcctgaagccgtttcagaacccacatctgcaaacttacttttgatgaaaatcatctctttagggaccttctttcccaaagcatccaggaaagactgctctgaaactgactggcctgaattaggtcacatgctcattcctgtactaaatcacacctcacttctacagctaaaagtcattaaatctcaaccaaactctacagctgcaccacaacaaaggtagagaagtaggtgcaaagttcctcaaaggaacgtaagggtgaaagatgattgactgataaacagacaggtagacagaatagatagatgaattaggaaaagataaccaaccaatatctgtcacattgctttgacttgattttttagtcaattaatgaaactgaatggtaatttkgacattacaacaatactttccaaatgtaggcaggttgtggagatcatttaaggaaaaaatgtatgaggtgttgtagcagatactgtcggtgccccaccgatatccctttagcacttaccatttttatacgtgcttcttaatttccaacttcctgtacttgcatctctttgcttggggctatctctgctcattcttgggagagagcagaaatgtagcagttatgcccctgtagagcagcagttgatagatcaataccctgtcccccttgcccttcagatctaataactccaagcttaattccctacatctttca

SEQ ID NO: 702101 - DNA, 585 bp, Homo sapiens
ttggaccggttataygcctgcaacgctacgtaaggctgaggatattacaatgaacaggaaacaaccctgaagtttaaggtatcaagcctttgagttactgtcttttatcatagctgatataaaattgaagccccactttttttgttttcaattactgaaaattcagtgctaaaaaaatgtggatttttattcaactagataaagtactacaattaggtttccactgaccttggctgtttttgttcccagttgccattacataaatctgtgccactcacaacttaggaagggtgtaacattctctgtaatagtttgcctttcgaatagtgtttggattcattactgtccctcgcagtttggaataatgaccactgaataatcagtgtttggagactaaattagtgctgcaaaattccctcaaattacctactgttcttttccctgtcgatgtatcctcatattcactatgattaccctgagaagaaagatattgttgagaaccactttacctactcgaagttttggtatttcaaagattcatacttatgtcatgttgattacattagcactaatactattggcaga

SEQ ID NO: 702102 - DNA, 1555 bp, Homo sapiens
  misc_feature 2, 3, 4, 5, 6, 7, 8, 9, 10, 11, 12, 13, 14, 15, 16, 17, 18,19, 20, 21, 22, 23, 24, 25, 26, 27, 28, 29, 30, 31, 32,33, 34, 35, 36, 37, 38, 39, 40, 41, 42, 43, 44, 45, 46,47, 48, 49, 50, 51, 52, 53, 54, 55, 56, 57, 58, 59, 60,61: n = A,T,C or G
  misc_feature 62, 63, 64, 65, 66, 67, 68, 69, 70, 71, 72, 73, 74, 75, 76,77, 78, 79, 80, 81, 82, 83, 84, 85, 86, 87, 88, 89, 90,91, 92, 93, 94, 95, 96, 97, 98, 99, 100, 101: n = A,T,C or G
annnnnnnnnnnnnnnnnnnnnnnnnnnnnnnnnnnnnnnnnnnnnnnnnnnnnnnnnnnnnnnnnnnnnnnnnnnnnnnnnnnnnnnnnnnnnnnnnnnngaattccacagagaatggaagattcacatagtcactctatgaggtcaataaatcaggcagccagcatttgacaggatatttgaagaaagtaacacttttagcagaaactcactattaatgcactaagacctttgtatatgaaaaaagtagagtatgtaataataagagccaagaagtaggcagcccagtgcagaagacaagggaagaaaaagccagatgaaaccataataaagaccacgctattgatgaagggtggtcatcaattgcaaaactgatatcagaataaaatccayataaccatttgagtataaccagctagagaacattgtgtagttcttattacagaaaatacactgctattctaccaaaattctgagcaccttaaaaaactcctgaattaaataatttattctgatttgggtttgtttattcaattttttaaaatagagttcctcctacctgaatgttagagacaagactctgcagtgaaaactaagcaaaatgaggtaagcagtgttttctacagaattcagtctaaatctcttatttgtttgggagagctacgttttcaccttaagcagaaaaataattagtgatgtgttttgaaagttgttatataatgaataagatcctctaccatgtgtcaggccctcacaagcctcatccaccagaggagatgataagctatttgagataagtatcagaatcatcttttccttcctcacaagaccaaaggtctgaaaaataacagggtctcaatcaaaatttgttgttgttttcacaattagaatgaggtgcaagttgcaatgtactaagcagagtccttaagtgtaatctcgttctctctctaaatatatatatgcatatgtatatatagtctaaatatatatatttagagagagacagagaagttatataaattaatataacagagttatgtaactgtgatttacagtttcctcagagtttcaatctagaacttcatcagtgagaaaaaagaggaaccattagtgcaatgtaaatgcgacaatattaaatagtcttaaaatgtagattcttttggttcaaatcaattataatatatttgcacaagatctggacagcataaaaatgcctttttagtcattttctgcattggttcctcatcataccactctggtgtggatagggaaaacatgattactatcaatttatagaacgggaaactaaattcagataaattaaaatacttcttcaagatcaacatttagtaaattagatgaaaggttctgagaaatctgtattttaagaagaaaggctctgaggtgagtaattaataaggaattcaccaaaaacaattaacctgattttaaaatgggcaaggatttaaatagacatttctccaaagaaaatatatacacagccaacaagcatctgaaaacatactcaacatcgtcaatcatcggggaaatgca

SEQ ID NO: 702103 - DNA, 3477 bp, Homo sapiens
tttacaaaattaaatgtaaaatctcaatcaactttattcacacagtgaacaacattaattaattttaattctatagcttctaaatattttaagtactgaattattcattaccaataaaatttccaagctttgatatcatattaatgtactgctgtcataggcattcttatctatttctctggcaattaacatctagtcttggttctggacaaaaagaaaatcataattaaatctgttggattattcatcatagttagaaagcttattgtgttttgattccaatattaagcattcattcttaataagaagtgcatatctaactcccgtggggagcttttcaaaatataaaagcccagaattccattctaagtctactgaatcagaatttctggggacaaaggtatatgaaagagatacactaaaaaagaaaggggaggttacaaacatgtgcagagagttgggaagcaggaaggacatgtagaattactatattattttcaacttctcttctgctttttaagtcaaaagctgttcctaaattatagaaaataacactgttacatatctaagtccttcaagtctggtcaaattgggggaaggaaagaggaaacataggcaaagaaagaactgctacatttttatttttatacagggaaggatataagaaaaagaaaccactaccttttctatgaaaacattacgtacatttttttaaaagtctatttgtaaaactttccaaaactgcatgaaaacacaatagatgaaaaatagaatgtgacaaatgaagaaaaggaataagctaagaagcagttataagaaattgtacaatgacagattggatgaattatgtaggaaataaaaaattggcaaaaaatcacaaactagggagcaagataaaaaaacagaagagataaaatgcaactggaagaaaagataaatacagggaaatagagggaagaaaaaggaaacttcattgaacaaggagatgtttcaagaatccaatactgagatttacttgtaattttgttcatgaattattttgasacaggtaaatcattaaccgagtttactgattggtcaagagaaaagatgtaataaaatgaaatttgggagagttgtgaaacagacttttatggtgcaatttcctacaaatatggtgctttatcttgtttttttatcctaaggtcattctcattgtgtctcttcgtcagtgccaagaattcaggagtttgatatacagtttctgatacttttttcaatgataaataaagcaagttaaccagtcatgctaattattagaaaatatagccaatactgttttcagagattttaatgtgcttcagcaagtttctttcaacttctatcggatgatggatttttgtaaagaagcaaaataaatgcacaaatactcaaggcatatgctaagcacagcaccaggacccattcaacttagcctgtccatagactgagggattccgtcttggtggaaggtctgataaccttgtgggagcacctgaggatagtcagaacaattgaaagatggctaaaattggggaaatctagcagttaggaaaatggagagaagggcaaaatagtatagaaaaaaaaaagagtggaaaaatagtatagaaaagcaactaggaaggataagaaaacagtgaaaaatggctgaaataaatggcctttttttgagtaaagaaagaatgaaagttataggaggtaagaatcaaggtcaaggagagctcagaatgagaaggacaagaatccagtccatatatgaagtataagataatatccaaacatgttagtacaacagggagcatggaaaggaccatcctcctcttctccccactcgcttctcggctccgtctcctgccgcttctcctcctcactttcaagcttagctccaatgcccagtaaaactgagtaactttctacttccttgacgatactgttaagttgtataggacaaattcgttactcatctttaatagttagcataaaagtaccctctttctagaggacttttaagaggcctaggggaactaagtgcccctcctttgtataggtatttataaaatgtttccatttgtgtcattctcatatgttttggactttacagctgaatattaagcatgaccgaatgagggctttcttctcttgaacagaaaatacatctctaaatttgaacggcactacagattcaacttttaactaaggacctccagatcttttattagtaatttgcaaggaactcagtcaaataaaaaggtcctgtcttgtgctattcacaatagcaaagacatggaatccatctagttgtgaaacaatggtagattggataaagaaaatgtggtacatatacaccatgaaatactacatagtcataaaaagaatgaaatcatgtcctttgcggaagcacggatgcagttggaggccataatcataagcaaattaacgcaggaacaggaaaaacaaacactatatgttctcacttataagtgggagctaaacatagagcatatatggacgtaaatatgcgaacaacagataccgcggactagtagatgtgggaaggagggagggtgcgcattggttgaaaaactactcatcaggtaggtactatgctcactgtttgggtgatgagatctgtaccccaaacctcagcatcatgcgctattcccctgtgacaagcctgtacatgtaccctctgtatataaaataaaatttgattattttaaaaaggagcagtctttacaatgaacgatcagaaataaaatgcacctttttagcctcttctttctcctgttatctttttttttttcaatttcagtaaacatttattgtaccttactaatacaaatgctgaaaccatacaaatgtgtgtgttcatttgttacaggaactagagtcaggagcaggccttgttagatttcatttaatactctctttttcctgtgaggtataatagtagatatgctcttggtacaatttcccatctgctcctgataatggttgctataaaagaataatgagaattccttctaaaactagaaatagactgtttattttccaaagcaaacatcctgccaatgaactgaaggaaaattatgtacagtagcaatttattttaatgggacatttacctaatatcaaattgtaatgaaatttccttttgatgtatttatcttattcatatcaattatatatatatatatagatttgttattatcactgctattaatgtgtataccaaaattaattcatcataaagagctttaagtactacatgttttgtaagggtatcttgggttgtttttctttctcttccaagaaatgctgccctgggccaaaaagaaaaaatcacgtgctcctcaatttcaagcagagattcaatacagtgttacctaaagtgaggaaaatataaatatgttaagtttttgccctctgaaactgagggctacattttaaatctgg

SEQ ID NO: 702104 - DNA, 3477 bp, Homo sapiens
tttacaaaattaaatgtaaaatctcaatcaactttattcacacagtgaacaacattaattaattttaattctatagcttctaaatattttaagtactgaattattcattaccaataaaatttccaagctttgatatcatattaatgtactgctgtcataggcattcttatctatttctctggcaattaacatctagtcttggttctggacaaaaagaaaatcataattaaatctgttggattattcatcatagttagaaagcttattgtgttttgattccaatattaagcattcattcttaataagaagtgcatatctaactcccgtggggagcttttcaaaatataaaagcccagaattccattctaagtctactgaatcagaatttctggggacaaaggtatatgaaagagatacactaaaaaagaaaggggaggttacaaacatgtgcagagagttgggaagcaggaaggacatgtagaattactatattattttcaacttctcttctgctttttaagtcaaaagctgttcctaaattatagaaaataacactgttacatatctaagtccttcaagtctggtcaaattgggggaaggaaagaggaaacataggcaaagaaagaactgctacatttttatttttatacagggaaggatataagaaaaagaaaccactaccttttctatgaaaacattacgtacatttttttaaaagtctatttgtaaaactttccaaaactgcatgaaaacacaatagatgaaaaatagaatgtgacaaatgaagaaaaggaataagctaagaagcagttataagaaattgtacaatgacagattggatgaattatgtaggaaataaaaaattggcaaaaaatcacaaactagggagcaagataaaaaaacagaagagataaaatgcaactggaagaaaagataaatacagggaaatagagggaagaaaaaggaaacttcattgaacaaggagatgtttcaagaatccaatactgagatttacttgtaattttgttcatgaattattttgagacaggtaaatcattaaccgagtttactgattggtcaagagaaaagatgtaataaaatgaaatttgggagagttgtgaaacagacttttatggtgcaatttcctacaaatatggtgctttatcttgtttttttatcctaaggtcattctcattgtgtctcttcgtcagtgccaagaattcaggartttgatatacagtttctgatacttttttcaatgataaataaagcaagttaaccagtcatgctaattattagaaaatatagccaatactgttttcagagattttaatgtgcttcagcaagtttctttcaacttctatcggatgatggatttttgtaaagaagcaaaataaatgcacaaatactcaaggcatatgctaagcacagcaccaggacccattcaacttagcctgtccatagactgagggattccgtcttggtggaaggtctgataaccttgtgggagcacctgaggatagtcagaacaattgaaagatggctaaaattggggaaatctagcagttaggaaaatggagagaagggcaaaatagtatagaaaaaaaaaagagtggaaaaatagtatagaaaagcaactaggaaggataagaaaacagtgaaaaatggctgaaataaatggcctttttttgagtaaagaaagaatgaaagttataggaggtaagaatcaaggtcaaggagagctcagaatgagaaggacaagaatccagtccatatatgaagtataagataatatccaaacatgttagtacaacagggagcatggaaaggaccatcctcctcttctccccactcgcttctcggctccgtctcctgccgcttctcctcctcactttcaagcttagctccaatgcccagtaaaactgagtaactttctacttccttgacgatactgttaagttgtataggacaaattcgttactcatctttaatagttagcataaaagtaccctctttctagaggacttttaagaggcctaggggaactaagtgcccctcctttgtataggtatttataaaatgtttccatttgtgtcattctcatatgttttggactttacagctgaatattaagcatgaccgaatgagggctttcttctcttgaacagaaaatacatctctaaatttgaacggcactacagattcaacttttaactaaggacctccagatcttttattagtaatttgcaaggaactcagtcaaataaaaaggtcctgtcttgtgctattcacaatagcaaagacatggaatccatctagttgtgaaacaatggtagattggataaagaaaatgtggtacatatacaccatgaaatactacatagtcataaaaagaatgaaatcatgtcctttgcggaagcacggatgcagttggaggccataatcataagcaaattaacgcaggaacaggaaaaacaaacactatatgttctcacttataagtgggagctaaacatagagcatatatggacgtaaatatgcgaacaacagataccgcggactagtagatgtgggaaggagggagggtgcgcattggttgaaaaactactcatcaggtaggtactatgctcactgtttgggtgatgagatctgtaccccaaacctcagcatcatgcgctattcccctgtgacaagcctgtacatgtaccctctgtatataaaataaaatttgattattttaaaaaggagcagtctttacaatgaacgatcagaaataaaatgcacctttttagcctcttctttctcctgttatctttttttttttcaatttcagtaaacatttattgtaccttactaatacaaatgctgaaaccatacaaatgtgtgtgttcatttgttacaggaactagagtcaggagcaggccttgttagatttcatttaatactctctttttcctgtgaggtataatagtagatatgctcttggtacaatttcccatctgctcctgataatggttgctataaaagaataatgagaattccttctaaaactagaaatagactgtttattttccaaagcaaacatcctgccaatgaactgaaggaaaattatgtacagtagcaatttattttaatgggacatttacctaatatcaaattgtaatgaaatttccttttgatgtatttatcttattcatatcaattatatatatatatatagatttgttattatcactgctattaatgtgtataccaaaattaattcatcataaagagctttaagtactacatgttttgtaagggtatcttgggttgtttttctttctcttccaagaaatgctgccctgggccaaaaagaaaaaatcacgtgctcctcaatttcaagcagagattcaatacagtgttacctaaagtgaggaaaatataaatatgttaagtttttgccctctgaaactgagggctacattttaaatctgg

SEQ ID NO: 702105 - DNA, 1460 bp, Homo sapiens
gcccttgttgctatgtggagagggctagaatgtttttatgctgggctccgcggggaagagggtggtgatttctgtggctggtggttggatgttccccgatcgcctttatgtctccctccttccctctcagtccttttcttcacccaacaaaagacttcagaggccaggaggagagggactcacagcaattatattaacaccaggcgtgggtagtttgtagagtgctttcacgtttcatctacttcatcatcagaacagctctctaagggagaggagggggaatctatgatcctgtcaatttcacagctgagaaactgagtcccagagaagttattgaggaatttacgaagttctgggatgtcaggagggtttactgtcctagttgaagagcccaggaagacctcatctttttgctctttgtgtgcgttgaggaaggagcgcatgagtgagggtagatggctctgacagggagacactggaaaggtcaacgcagtagttaaccaggccatgctaagcacatcctggggccaacccacttgcctgccagaaaaggccacatgtctccacagtatgacaaggacattcctctctacaggttatgccaacctcaagacagagaagaaaccaagtgggattatgagctgacacaatgagacacaggcttataaacctgctccttgtggtcccctggaaggctgcgttcatcagagtctctcttctctaatgtttttctccactagtcccctggacatcaatcaacttggctctgtcaagcgtctcagcctcctgcatgaccacttgcctttccttctcctctctcctgcccttcctaggggcttcacagggacaggaagccaatcctcttgctcatttctttcttccttcttgcatccatccatccatttgtctgtccatccatccatccatccatccatccatccatccatctatccgtccatccttagagttattactatgtgctaggggttatgaggatggatgaggggtgggctctaccctgycagaccctggtttctgtgatctctcaggctgcatggatagaggggaaagcatgaagaaagggttggcagccattgtgatggtgatgctctgaggaggggcttgggatgctccacctgagactcagtctttccaggaacaactagaattggaaaggcaggaacctgcttccaatggccatggggagatagatgcctaagaaccttctggatctgatgtgatgccatgggcttttctcatgagttgacaaccttttctctcagggagaggagttggacttcttatagaagccacaatgccttacaaaaggtagaagctgatctttagatatgtcttctattcagacttttctctcaacagctctccacctctatccatcctcagagtagcccttgtgaagcacaaatctgatcgtatccctcccctgctcaacaaccgtc

SEQ ID NO: 702106 - DNA, 1145 bp, Homo sapiens
  misc_feature 205: n = A,T,C or G
acatgacaaggcacatctggcgaggtgcgctacctagagagccaggtggccctcatccctcagagctgaaaaggccacagcccttccagcttggggaatggccttagcagctggctcccagggaggggctcatctgtgacagcaaagccagcagcctggctattagagagcagccagcatggggctcaacccaatggaaaaatanatcccatcatgccagacatgcttgcttccagactgggggagttaataagtgactctgaggtggtttggagcactgtggaggggctgcggaggaattttctcatttctcgtaaaactttaattagtgttagtcacttcaagtgattacggggacttaaaatagccaccggtggggagctttaatgacacatacgaggccattttgtttgtttctacagggagctgagctgggcttgtaatagacacacatttgtctcctcgctggaccgtgagcaactgggagctctgtgaaggcagggacaagtagagcttgtctgtgtgtccccatgattggcacagagcctgagacatcagagaggcmccacaagcctaaatggactgccactcactggctaaggggacctgtcagctccaacccagtccctggtttattgcattctctagaacttcttccccaagtgtttacttttaatctgttttttcccactagaatattagtgttctgctcactgctgtattcccagtgcccagatgtagtaggagctgaatggaaggatggatgagatgggacaccatcttccaaaagtgccactgggagtcccaggaggcacctgtattgctgccacccgtggacctgccttccagatggccgagacctgcttccaaccaatttagttttgttttgttccacaaattcctctgcaggcacagcatgcttccctcctccccctgcccataacaccctgagaaacatcctctgagaaaaggatcccagagtagtcactgatgctgtagtatgaatttcaggaagtgtcttgcctctctaggttgtctctaagtctccactcttatcatgggaggacaggctttgctgtctttgtgaattgatcttggatgtcaaaaagggaggaggagggtttagtcccagctctccctgaggg

SEQ ID NO: 702107 - DNA, 650 bp, Homo sapiens
tccagacaaaccaactactaaaaacacattaaactgtgaacaaaatctgtcactcatttcattaatttctcattttttagacctactgaactattaatcatatttcaaagtttactcagaaatgtgagttcatgaggaacaaacacattaagcatcaytgtcactggctaactcctcaaatcaacaataccctttatttttagccatgaaaaccttgtgtcatgcaattattttgcagacaaatcttaaatcatttcattgcctttttatcaagaaaaaaatagttctaaattcttctgaaaaacagctttacccaaatggaatagtacaaagaattgagccaagaaatatccaatttataaattacagaaactctcaattttaggaaagaatgctgtaaatccaatattcattgacctattgttcatatcttctgcatatgctgccaatttccaaaactaggaaccctttcttcacttcatattttaaaattatacatgtttaacataatttttatttataagacaaagcttcaccaagaccaaatctatttttatttatagagtgtacttgctggaaatttgtatttataaaacttctctttcatggattcataaaatgagtcttttgctgattttgttaattacaca

SEQ ID NO: 702108 - DNA, 723 bp, Homo sapiens
taaaacaatttattgtaatattttattttatttttttggaacagcatttagctckgtcacccaggctggagtgcaatggcatgatcatagcttactgtaactttgaactcctgggctcaggtgatccttccacttcagcctcccaagtagctaggactataggcatgtgccaccactcctggataattaaaaaaaaaaatttttttttgtagtgataggagtcttactctggtgcccaggctggtctcaaacacctggcatcaagcgattctcttgtctctgccaccaaaagtgctgggataccagtcatgagccgcttcgcccaggtaaaacagtttattttaaaacaattcataggtaagtggtgaaactagaaagcaaacaagcacattattcaaaagaatttttaagaccagtaaccccaagctgatgttctcataggttccattagccgaaaccagtttacatggctttctccaatacaatcattgccaaaattgtattgaacttctatgtgttgcaagatgaccaaagccattttctcttcatagctgcaatcccattcttctatagtttgctttgtgatgctgggctgggattctgcaagcatttctgcttgtctggcttctcccctattaggtcctgagactagaggaaaccagaaaaccttaggagagagaagagatacgtgacttccttttatgtatccttctgttaccatcc

SEQ ID NO: 702109 - DNA, 629 bp, Homo sapiens
ttattgtggcattattcacaatagcaaagacttggaaccaacccaaatgtccaacaacgatagactggattaagaaaatgtggcacatatacaccatggaatattatgcagccataaaaaatgatgagttcatgtcctttrtagggacatggatgaaattggaaatcatcattctcagtaaactatggcaagaacaaaaaaccaaagaccacatattctcactcataggtggaaactgaacaatgagaacacatggacacaggaaggggaacatcacactctggggaccgttgtggggtgggggtagggaggagggatagcattgggagatatacctaatgctagatgacgagttagtgggtgcagtgcaccagcatggcacatgtatacatatgtaactaacctgcgcattgtgcacatgtaccctaaaacttaaagtataataataattaaaaaaagacaattttttcctcatttgactttgcttataatgttgtttattatgcggacatttaaaatttatgttgaatttattcagtgtttttaatgacttctgaattttgtgtcatattgagaaaggcatttcctactctgaaattataaaagaatcatctcatgttttcttttat

SEQ ID NO: 702110 - DNA, 607 bp, Homo sapiens
attattattattattattattattattattattattattattattattttgaccaagtcttgttcttgtcgcccaggctggagtacagtggtgtgatcttggctcactgcaacctctscacctcccagtttcaagcaattctcctgcctcagcctcctgagtagctgagattacaggtgcgtgccaccacgcccggctaatttttatacttttagtagagacaggatttcaccatgttggctaggctggtctggaacacctgacatctggtgatctgcccacctcggcctctcaaagtgttgagattataggcaggagtcacggcgcccggcctattagttcttttctaagatatttgtgagcaattaagaagtcattcataaggacaccatcctattagtattggttgtaaccatccagaagaaatagggtggacccacacacactcatatttggtttgtatatcaagattgatgaaaacgcacacaccaagaggcctgaaaagttatattattttcataataaggcattctgggaaaagcactgcacggctcccaagatgatctaataatggctcgagaaatagcaagaagtgatatatggcttg

SEQ ID NO: 702111 - DNA, 1205 bp, Homo sapiens
cagaccctcagtccctctcgagttgtttcaagttctcagtagccatatatggctatttctattcctgcacagagttctattgggcaacactactctagattctgccaactacttaaaccttgaagtcataatcttgaatgctttattttctcaccaattttttcatctttcctcattttcaactgtcatcttatattttatcatgaatttagactccccctaatggtttttagtcttctaggctctcctattttcacatacctctcaatgtagactagaatgtgagcagctactatacctttaattgatctaatttatttattgtcacacatcttaccaaccttcaacattgaattatttaattaattaaacgcttcaatcagtatttatggatagcctactctgggcttgagaataaactggttaagaacatagtggccaatgagacaggtgagaactctattctcatagaacttatcatctagggagtgaaaatagataccaaattaatacaagtaagtgaatgaatgcrtaaaaaaagtcataaagtgatgacaccactatgcattatctgaaataaaaagacatgggacatttattgcctctggagagatatatgctaatcagctgcagtctccttgaagacagcagactgctgatcttatgtactgttaaaaggaaatgagttcagtggttagagggcttttcgggatataagagagtcaacataatctgtgtaagcagtgaagcatggttactcagataaggtgattgttcattgtttgccactcagaggtgagattattagacataattcattccagtggtctttcagaagcaaagggttgccacagattagtaagcttgctaaagcatgctaactgagatgggttgtcactgaatgattaaacagactttgatggccacttgttgctgtggaaacactccgtcttcctctaagtttgtagaaacttttaaattctcaggcaaaggaaattccaaagtgttggtgatttctgatagacaattctctactagattttcacgtgtctgtttatcatctgcgcacaagtattggaagtttcctttatatactatcgtttcaaccctatatagcaagccaatatgggaaacagagtgtctttctccagagcaaaggacagattttctgccctccaaaatagttaaataatgtctccttctaa

SEQ ID NO: 702112 - DNA, 1717 bp, Homo sapiens
ctccctcccactgcccctctcacaggcccagtgtgtgttgttcctctccctgcgtccatgtgttctcatggttcagctcccatgaataggtgagaacatgtggtgtttggttttctattcctgtgttagtttgctgaggataatggcttccagctccatccatgtccctgcaaaggacatgatctcattcctttttatggctgcatagtatttcatggtgtgtatgtacaatattgtctttattcagtctatcattaatgggtatttaggttgattccatgtctttgctattgtgaatagtgctgcaatgaatatacacctgcatttatctttataatagaataatttttattcctttgagtatatacccagtaattggattgctgggccaattggtttttctgatttaggtctctgagaaatctccacactattttccacaatggtcaaactaatttatattccaatcaacagtgtaaaagcatccctatttctccacagccctgccagcatctattgtttcttgactttttttttttaagctatcatcttgacagttgccctttaattcatttttaggcgtgaccttgcacaacatgcaagaaaacagaacaaagatgtaaatggtggtgttcccatgtataagatctctttggatacttgtttgcccctgtaaagccgcagcccgcagctaaaataygtaagattcagttaaagtagtgttctctttactttctcttattttataattttttatgacaaagcaccaagaataaaaattttgcaggaaaacacacattccttaaatagagaatatttttacagagtctgatttttctagaatataatttacaacactatggtaaaattcattccgttctctgatattgaaaaggataatttcaatcaaaacaattaatgttcaagatgacaaatgaaatagtctgtcattctccagcgcatttttttccctacttattccgttcttgggagacttagcatcaatcactatatgatgatcttctcttcttgccatctgaacattttgcaggagtcaaatgcatgttttgcaactttggttttagactttggggtccagttagccagtctaaatactgtgttttcgttttctgttatgttggaatgccacaatggcccattacttctggtattcacatcttcgtgtagtacactcttcttgaatatgaggtgggcctgaaactcgctttaatcgatagaatgcagtggaaacattgctgccgtatttcagacctaaaacttaagaagccctggcagcttctgcttttgcattcctgggagccccagcttctatgtaagaagtgtggcatctctgctagagacactgtgtgttaaggccacgtgaagagaacctatagagaaacagaaacccttagactactggaagacagccaatgagcccgactaaaagagaaaatttaagtcccagacacgtgacccaagctgagccattttgagctacatacatgtctgaagcatgtgagtgaaaaagccatttggacattgtaacatcagcatatcactcccctatgacatcatgagaaatgatgaaagagtagttcttttaagcccttacattttaggatgatttgttacacagccacatgtaatcagaatatttctattccctttactgtctttgcatgttaaagaataatataggatttatttttcacaa

SEQ ID NO: 702113 - DNA, 1717 bp, Homo sapiens
ctccctcccactgcccctctcacaggcccagtgtgtgttgttcctctccctgcgtccatgtgttctcatggttcagctcccatgaataggtgagaacatgtggtgtttggttttctattcctgtgttagtttgctgaggataatggcttccagctccatccatgtccctgcaaaggacatgatctcattcctttttatggctgcatagtatttcatggtgtgtatgtacaatattgtctttattcagtctatcattaatgggtatttaggttgattccatgtctttgctattgtgaatagtgctgcaatgaatatacacctgcatttatctttataatagaataatttttattcctttgagtatatacccagtaattggattgctgggccaattggtttttctgatttaggtctctgagaaatctccacactattttccacaatggtcaaactaatttatattccaatcaacagtgtaaaagcatccctatttctccacagccctgccagcatctattgtttcttgactttttttttttaagctatcatcttgacagttgccctttaattcatttttaggcgtgaccttgcacaacatgcaagaaaacagaacaaagatgtaaatggtggtgttcccatgtataagatctctttggatacttgtttgcccctgtaaagccgcagcccgcagctaaaatatgtaagattcagttaaagtagtgttctctttactttctcttattttataattttttatgacaaagcaccaagaataaaaattttgcaggaaaacacacattccttaaatagagaatatttttacagagtctgatttttctagaatataatttacaacactatggtaaaattcattccgttctctgatattgaaaaggataatttcaatcaaaacaattaatgttcaagatgacaaatgaaatagtctgtcattctccagcgcatttttttccctacttattccgttcttgggagacttagcatcaatcactatatgatgatcttctcttcttgccatctgaacattttgcaggagtcaaatgcatgttttgcaactttggttttagactttggggtccagttagccagtctaaatactgtgttttsgttttctgttatgttggaatgccacaatggcccattacttctggtattcacatcttcgtgtagtacactcttcttgaatatgaggtgggcctgaaactcgctttaatcgatagaatgcagtggaaacattgctgccgtatttcagacctaaaacttaagaagccctggcagcttctgcttttgcattcctgggagccccagcttctatgtaagaagtgtggcatctctgctagagacactgtgtgttaaggccacgtgaagagaacctatagagaaacagaaacccttagactactggaagacagccaatgagcccgactaaaagagaaaatttaagtcccagacacgtgacccaagctgagccattttgagctacatacatgtctgaagcatgtgagtgaaaaagccatttggacattgtaacatcagcatatcactcccctatgacatcatgagaaatgatgaaagagtagttcttttaagcccttacattttaggatgatttgttacacagccacatgtaatcagaatatttctattccctttactgtctttgcatgttaaagaataatataggatttatttttcacaa

SEQ ID NO: 702114 - DNA, 1717 bp, Homo sapiens
ctccctcccactgcccctctcacaggcccagtgtgtgttgttcctctccctgcgtccatgtgttctcatggttcagctcccatgaataggtgagaacatgtggtgtttggttttctattcctgtgttagtttgctgaggataatggcttccagctccatccatgtccctgcaaaggacatgatctcattcctttttatggctgcatagtatttcatggtgtgtatgtacaatattgtctttattcagtctatcattaatgggtatttaggttgattccatgtctttgctattgtgaatagtgctgcaatgaatatacacctgcatttatctttataatagaataatttttattcctttgagtatatacccagtaattggattgctgggccaattggtttttctgatttaggtctctgagaaatctccacactattttccacaatggtcaaactaatttatattccaatcaacagtgtaaaagcatccctatttctccacagccctgccagcatctattgtttcttgactttttttttttaagctatcatcttgacagttgccctttaattcatttttaggcgtgaccttgcacaacatgcaagaaaacagaacaaagatgtaaatggtggtgttcccatgtataagatctctttggatacttgtttgcccctgtaaagccgcagcccgcagctaaaatatgtaagattcagttaaagtagtgttctctttactttctcttattttataattttttatgacaaagcaccaagaataaaaattttgcaggaaaacacacattccttaaatagagaatatttttacagagtctgatttttctagaatataatttacaacactatggtaaaattcattccgttctctgatattgaaaaggataatttcaatcaaaacaattaatgttcaagatgacaaatgaaatagtctgtcattctccagcgcatttttttccctacttattccgttcttgggagacttagcatcaatcactatatgatgatcttctcttcttgccatctgaacattttgcaggagtcaaatgcatgttttgcaactttggttttagactttggggtccagttagccagtctaaatactgtgttttcgttttctgttatgttggaatgccacaatggcccattacttctggtattcacatcttcgtgtagtacactcttcttgaatatgaggtgggcctgaaactygctttaatcgatagaatgcagtggaaacattgctgccgtatttcagacctaaaacttaagaagccctggcagcttctgcttttgcattcctgggagccccagcttctatgtaagaagtgtggcatctctgctagagacactgtgtgttaaggccacgtgaagagaacctatagagaaacagaaacccttagactactggaagacagccaatgagcccgactaaaagagaaaatttaagtcccagacacgtgacccaagctgagccattttgagctacatacatgtctgaagcatgtgagtgaaaaagccatttggacattgtaacatcagcatatcactcccctatgacatcatgagaaatgatgaaagagtagttcttttaagcccttacattttaggatgatttgttacacagccacatgtaatcagaatatttctattccctttactgtctttgcatgttaaagaataatataggatttatttttcacaa

SEQ ID NO: 702115 - DNA, 1717 bp, Homo sapiens
ctccctcccactgcccctctcacaggcccagtgtgtgttgttcctctccctgcgtccatgtgttctcatggttcagctcccatgaataggtgagaacatgtggtgtttggttttctattcctgtgttagtttgctgaggataatggcttccagctccatccatgtccctgcaaaggacatgatctcattcctttttatggctgcatagtatttcatggtgtgtatgtacaatattgtctttattcagtctatcattaatgggtatttaggttgattccatgtctttgctattgtgaatagtgctgcaatgaatatacacctgcatttatctttataatagaataatttttattcctttgagtatatacccagtaattggattgctgggccaattggtttttctgatttaggtctctgagaaatctccacactattttccacaatggtcaaactaatttatattccaatcaacagtgtaaaagcatccctatttctccacagccctgccagcatctattgtttcttgactttttttttttaagctatcatcttgacagttgccctttaattcatttttaggcgtgaccttgcacaacatgcaagaaaacagaacaaagatgtaaatggtggtgttcccatgtataagatctctttggatacttgtttgcccctgtaaagccgcagcccgcagctaaaatatgtaagattcagttaaagtagtgttctctttactttctcttattttataattttttatgacaaagcaccaagaataaaaattttgcaggaaaacacacattccttaaatagagaatatttttacagagtctgatttttctagaatataatttacaacactatggtaaaattcattccgttctctgatattgaaaaggataatttcaatcaaaacaattaatgttcaagatgacaaatgaaatagtctgtcattctccagcgcatttttttccctacttattccgttcttgggagacttagcatcaatcactatatgatgatcttctcttcttgccatctgaacattttgcaggagtcaaatgcatgttttgcaactttggttttagactttggggtccagttagccagtctaaatactgtgttttcgttttctgttatgttggaatgccacaatggcccattacttctggtattcacatcttcgtgtagtacactcttcttgaatatgaggtgggcctgaaactcgctttaatcgatagaatgcagtggaaacattgctgccgtatttcagacctaaaacttaagaagccctggcagcttctgcttttgcattcctgggagccccagcttctatgtaagaagtgtggcatctctgctagagacactgtgtgttaaggccacgtgaagagaacctatagagaaacagaaacccttagactactggaagacagccaatgagcccgactaaaagagaaaatttaagtcccagacacgtgacccaagctgagccattttgagctacatacatgtctgaagcatgtgagtgaaaaagccatttggacattgtaacatcagcatatcactcccctatgacatcatgagaaatgatgaargagtagttcttttaagcccttacattttaggatgatttgttacacagccacatgtaatcagaatatttctattccctttactgtctttgcatgttaaagaataatataggatttatttttcacaa

SEQ ID NO: 702116 - DNA, 1717 bp, Homo sapiens
ctccctcccactgcccctctcacaggcccagtgtgtgttgttcctctccctgcgtccatgtgttctcatggttcagctcccatgaataggtgagaacatgtggtgtttggttttctattcctgtgttagtttgctgaggataatggcttccagctccatccatgtccctgcaaaggacatgatctcattcctttttatggctgcatagtatttcatggtgtgtatgtacaatattgtctttattcagtctatcattaatgggtatttaggttgattccatgtctttgctattgtgaatagtgctgcaatgaatatacacctgcatttatctttataatagaataatttttattcctttgagtatatacccagtaattggattgctgggccaattggtttttctgatttaggtctctgagaaatctccacactattttccacaatggtcaaactaatttatattccaatcaacagtgtaaaagcatccctatttctccacagccctgccagcatctattgtttcttgactttttttttttaagctatcatcttgacagttgccctttaattcatttttaggcgtgaccttgcacaacatgcaagaaaacagaacaaagatgtaaatggtggtgttcccatgtataagatctctttggatacttgtttgcccctgtaaagccgcagcccgcagctaaaatatgtaagattcagttaaagtagtgttctctttactttctcttattttataattttttatgacaaagcaccaagaataaaaattttgcaggaaaacacacattccttaaatagagaatatttttacagagtctgatttttctagaatataatttacaacactatggtaaaattcattccgttctctgatattgaaaaggataatttcaatcaaaacaattaatgttcaagatgacaaatgaaatagtctgtcattctccagcgcatttttttccctacttattccgttcttgggagacttagcatcaatcactatatgatgatcttctcttcttgccatctgaacattttgcaggagtcaaatgcatgttttgcaactttggttttagactttggggtccagttagccagtctaaatactgtgttttcgttttctgttatgttggaatgccacaatggcccattacttctggtattcacatcttcgtgtagtacactcttcttgaatatgaggtgggcctgaaactcgctttaatcgatagaatgcagtggaaacattgctgccgtatttcagacctaaaacttaagaagccctggcagcttctgcttttgcattcctgggagccccagcttctatgtaagaagtgtggcatctctgctagagacactgtgtgttaaggccacgtgaagagaacctatagagaaacagaaacccttagactactggaagacagccaatgagcccgactaaaagagaaaatttaagtcccagacacgtgacccaagctgagccattttgagctacatacatgtctgaagcatgtgagtgaaaaagccatttggacattgtaacatcagcatatcactcccctatgacatcatgagaaatgatgaaagagtagttcttttaagcccttacattttaggrtgatttgttacacagccacatgtaatcagaatatttctattccctttactgtctttgcatgttaaagaataatataggatttatttttcacaa

SEQ ID NO: 702117 - DNA, 1717 bp, Homo sapiens
ctccctcccactgcccctctcacaggcccagtgtgtgttgttcctctccctgcgtccatgtgttctcatggttcagctcccatgaataggtgagaacatgtggtgtttggttttctattcctgtgttagtttgctgaggataatggcttccagctccatccatgtccctgcaaaggacatgatctcattcctttttatggctgcatagtatttcatggtgtgtatgtacaatattgtctttattcagtctatcattaatgggtatttaggttgattccatgtctttgctattgtgaatagtgctgcaatgaatatacacctgcatttatctttataatagaataatttttattcctttgagtatatacccagtaattggattgctgggccaattggtttttctgatttaggtctctgagaaatctccacactattttccacaatggtcaaactaatttatattccaatcaacagtgtaaaagcatccctatttctccacagccctgccagcatctattgtttcttgactttttttttttaagctatcatcttgacagttgccctttaattcatttttaggcgtgaccttgcacaacatgcaagaaaacagaacaaagatgtaaatggtggtgttcccatgtataagatctctttggatacttgtttgcccctgtaaagccgcagcccgcagctaaaatatgtaagattcagttaaagtagtgttctctttactttctcttattttataattttttatgacaaagcaccaagaataaaaattttgcaggaaaacacacattccttaaatagagaatatttttacagagtctgatttttctagaatataatttacaacactatggtaaaattcattccgttctctgatattgaaaaggataatttcaatcaaaacaattaatgttcaagatgacaaatgaaatagtctgtcattctccagcgcatttttttccctacttattccgttcttgggagacttagcatcaatcactatatgatgatcttctcttcttgccatctgaacattttgcaggagtcaaatgcatgttttgcaactttggttttagactttggggtccagttagccagtctaaatactgtgttttcgttttctgttatgttggaatgccacaatggcccattacttctggtattcacatcttcgtgtagtacactcttcttgaatatgaggtgggcctgaaactcgctttaatcgatagaatgcagtggaaacattgctgccgtatttcagacctaaaacttaagaagccctggcagcttctgcttttgcattcctgggagccccagcttctatgtaagaagtgtggcatctctgctagagacactgtgtgttaaggccacgtgaagagaacctatagagaaacagaaacccttagactactggaagacagccaatgagcccgactaaaagagaaaatttaagtcccagacacgtgacccaagctgagccattttgagctacatacatgtctgaagcatgtgagtgaaaaagccatttggacattgtaacatcagcatatcactcccctatgacatcatgagaaatgatgaaagagtagttcttttaagcccttacattttaggatgatttgttacacagccacatktaatcagaatatttctattccctttactgtctttgcatgttaaagaataatataggatttatttttcacaa

SEQ ID NO: 702118 - DNA, 663 bp, Homo sapiens
ttaatcattttaacaattataaaaagtcaatgccattgctatccctactttacaaatgagtgaagagacttgctaaaattgacacacctaatgagtcatgaaattaggatttgaacttaggtctatctgactcctgsgtctgtgacagaatcctccaaagaaagcttgctagtcctgtagtctttcacaatctctgcactatttaaacatgctcatcatcccatctcaggttcccatccccgagtttcaaaaaagctagtagcttagaacaagagcaaagagcacaataatttgcattaattccctacagacaaaatgtgctaaggaaaactttggaatttgtttttttttttaatttcctattaaacaaaaccaacacaaaataggcttttacaaaggttggctgcaaagtgaaatgtttccaagtgtcaagtgctctgccaccatgaaaagctgtgctggcacattaaccagatgagggatttttaccctcactccttctcaactcctgtcactatttcagaactacataggtaaatgaagctagaggagaaaaaaaaaaatggctgcaaataatgaaaggaaattagacatatgcttgaaccaaagacaggcaacagactatgtggtaaaatggagaaacacaagaatctggagacttgg

SEQ ID NO: 702119 - DNA, 2210 bp, Homo sapiens
  misc_feature 1071, 1144, 1145, 1146, 1147, 1148, 1149, 1150, 1151, 1152,1153, 1154, 1155, 1156, 1157, 1158, 1159, 1160, 1161, 1162,1163, 1164, 1165, 1166, 1167, 1168, 1169, 1170, 1171, 1172,1173, 1174, 1175, 1176, 1177, 1178, 1179, 1180, 1181: n = A,T,C or G
  misc_feature 1182, 1183, 1184, 1185, 1186, 1187, 1188, 1189, 1190, 1191,1192, 1193, 1194, 1195, 1196, 1197, 1198, 1199, 1200, 1201,1202, 1203, 1204, 1205, 1206, 1207, 1208, 1209, 1210, 1211,1212, 1213, 1214, 1215, 1216, 1217, 1218, 1219, 1220: n = A,T,C or G
  misc_feature 1221, 1222, 1223, 1224, 1225, 1226, 1227, 1228, 1229, 1230,1231, 1232, 1233, 1234, 1235, 1236, 1237, 1238, 1239, 1240,1241, 1242, 1243, 1768: n = A,T,C or G
aagaagatgaagcaggggttattaaagtccttgtggagaatgtaaagctcaaaatgacagagtagctacttgggatcaaacatctagctacctacaaaagggcactcaaattgagcatccctggcttgccaccatatctcctcttatttcaggaaattgtacacttctacttggtcttctcctgaatgctcggtggggtgaattaagcacaactcttgattgagtaggccttcttccaatattcatttattgattgaatagaacaactaagaagtgggtattgcagaaagtaatatttggctaacattccttgatatagtatcacaaacatttaagcattttatagaacttttccccccagagtaaccaaatgtttgctattattactccttcagttagatgggataaagacaattggtgttaagccattattatgccaaattcaataactaagtgtgaacaggtccacatgcctgatgatataacacaaaagtcatattaccgatgatgtagtcattgaaaatgaaacatttacacaaccgaaagtatgattaatcatacaagagatctatttccatatcttttgtccacaacatggctatcactacttttaatcaaaacactgaagcctgaatcactctggtagggcttgaacaacagcaactatgacagggaacaaaacctaggaagaaaccccttcatttcgtttatgtgtctactggaagctccaggagtgggagacggggagcagctaatgtcgatgcatgtggaagagagataggtggtgaaattgaccgtaacattggggagcaaagctgagaaaaaaggctaccggggcaaagtgcttgttagtaatagacaaacgttgctataaggaagtttgttatatttctctcaagttttaaaaaatatttctaagccaatttcacataatatataactgagagaaaccttaggacttatgtgccgtattgtttcacgttttttggtgaagtaggcaaaggaaactcagggaggtcgagttattcttccaatgtcacacagcaagctaacaagcttggtaattgctangtcaacagtaggttaccaagctagcttgataattcgcaagtcataagtagggcttttgactctttttcatcannnnnnnnnnnnnnnnnnnnnnnnnnnnnnnnnnnnnnnnnnnnnnnnnnnnnnnnnnnnnnnnnnnnnnnnnnnnnnnnnnnnnnnnnnnnnnnnnnnnttcctatttctccacatcctctccagcacctgttgtttcctgactttttaatgattgccattctaactggtgtgagatggtatctcattgtggttttgatttgcatttctctgatggccagtgatgatgagcattttttcatgtgttttttgtattcttcaattttatttaaaaaatttgaaaatatataatttaagtcatcagacgtgggatatttgtttttttgctttcttttttttttttttccttttcttttttgagatagagtcttgctctgtcactcaggctggaatgcagtggtgcgatctcagctcactgccacctctgcctcctaggttcaagcgattcttctgcctcagcctcctgagtagctgggactacaggcacatgccaacacgcctagctaatttttccatttttagtagatacggggtttcaccatattggccaggctggtctggaactcctgacctcgtgatccgccccgctcagcctcccaaagtgctgggattacaggcgtgcacncacacccagctggttatttcatttttctcctatgtgtgtgtgtttgtgtgtgtgtgtaaaatattttcataagggaagtacatcgttgcatgatagaattgttttagaaggagtattttcaacttgccttactccacttctccctttaaaaatctcttctggccctcacccttctctcccaatataagtaacccacataaacaacttgctctacttttcacctcaattactaacatcaacatcaatgcacatacacagacacacacatatttacatttacacacaagaktgtcatcattatgttacttctaaaaatgcaatcatattatatatccttttataaattttacttttgtcactttataatactgccacgaataactggcaaatgtccaatttattgtattaatagctatagcctttcgtaaagtaaagacaccat

SEQ ID NO: 702120 - DNA, 2377 bp, Homo sapiens
actggtaaagagacgtgggaaatgaattttatttcaccacttaccttgaacatagacataaatgaccgaggccaagtcagtttcccggtagaagcacttgtaggctccagtgtcatttccgatcacttttggaattgtgagtgtcttacagaagaggccatcgctgcactcagtcacctccaccctttgctcactgccactctgattattgggccaaagccagtccaagtccctctgtcccctgaaaaattaatttcagggaggtattaatatgaagtgccagactgtgaggctatttctaagaaaagagaaaatttggttttgaaacttaaataaactcttcaacagacacagtcagtcttctaccggccaggcatggtggctcatgcctataatcccagcactttgggaggccaaggcggatggatcacctgaggccaggagttcgagaccaggctgggcaacatggtaaaaccctgtctctactaaaaatacaaaaatgagccaggtgtggtggcgcatgcctgtaatcccagctactcaggaggctgaggcatgagaattgcttgaacccgggaggtggaggttgcagtgagccaaaatcacaccactgcacttcagcctgggcaagagggcaaccctgcctcaaaaaaaaaaaaacaaagtcttctaccaacaagtcagattgacatatgatgaaaagttataaactcagcttcagaagtcacttataaagattcctgagttttccattaattaatgcattctttctttcaacaaatatctattaagcatctactatgtgccaaacttgttaaggactagagaaagagcagtgaacaaatcagacaaaaatcaatgcctttatggaacctcagtctaactggagaaaacaggcaattaaaaagtaaggaaagtttattgtataaaagatagtgtttagtactatggagaaaaatatagaagatacaaagaaaagagtaaagaattttgcaggaggtggtcttgataaagctagccataggaacatcatgaagagcagtattacaggagcaaaaacagcacatggaaaggccctggagcaggtgcatatctggagtattaagggaacagccaggaaaccagagcagccaggtaagagtgagcaaaggggagtaagaagtgaggttaggaaggaaggaggtgcaagtaagagtccctcaggaccttgtaaggacctcgcattaaaacatagatggcttgtactgcagcatttctctacaaggccccaaggaagataagaagatagtcaacatcaagaagaatgtaacattattggcccttcattcaaagaacttaaaatttccaggaagttgcagctaaatcaatgaagttacttttaacacactccatggtttttttcagaacataagaaatgtttatgcagagttttaaaaagggagcatgggatccttggggatttcaaataaccttgttatcgagggtcggtaaaaggaaaatctaatgggaaatgtgtcttaaacaagtaaagctagagaaacagcacctgctactgtgttttttcccaagggctgggtattggtaaggggctagggtattctttatactgcagtctaaaatagatgtatgtcattcggtttaatgcttagtattcaacaagtatgaagcaatggcaataacctacccaaggtcctttgtggacccccagcactcttccaggagggtaacatcacctccacttgtcacagtctctaccaaaaacacacaggtcctaagaaggctccatgcctttcgtgtgtgatcactatgttaaacccaagggtcttctatctttcgtcctggggtaagggttgaaaggcaaaatttaaaggcctcttcttcttgacaaagaagtctacttctccagttatcaaaaatcaatagcatgacttcttgctagcaagtggggaaagatgcattccagaatatcaaggcagggcccgaagtccattatttatgtagatcatgcgctcagtaatattacccactaaatattaaattgctattaaatattactgcctaagtaattatagtaataaatttcttataaagcaaagtttttggaaagggataataagtgttcaagaatcataccaagcataataaatatagtcccaaattttttcaactctattccttaaatgtatgccctcaacttcatttattcattcatatttattgagcgtatgtctactatacgccaggtggctgtactggttattggaatgtgggtgtgkgtgtgtatttgtgtgcgtgtgtgtgtgtgtgtgtgtatgcatgttggcagagaatagtataaaaacaccagcaaaattgtacagaatttttgagagaaaat

SEQ ID NO: 702121 - DNA, 1190 bp, Homo sapiens
catcagcatgacaatctagggagaagctattacttttcttcagctatgagaaccatgctacccaaagccaagtaccatgaagatgaagaaattgtcaaggtttaccctgtccattcggttgcggtgccgaatctccagctgctccttagccttctggaagcgagcatgctcattatcatctgcagaggtctcgaaatacacatcaacatcattggttggcagaggagttggaggaactgaaacaaaattacagagggagttctctttgggatcagatgcactgtgctctaggaagaaaacccagctcaggacctgcaggatggactcaatttgttttgtggcattctctaagtgcagggtgctgctatctgccaagacttcacttggttagattacagtgggcaatcttccttacacaatattcatcaaccatgtcagcccacgctaatacagcaatttattggcagcttcacaccagtgaggcatctacttaagacctcagggctgaaaaagaggtggtttcttctataccttcccttcagtgctcgaaccctggaaacctaaacaatagctaccttattgctcgtaactgagcatctgaacagagacaagggcaggaatcagaccctgtagaggcacttttatgcaattccttatttttaaagaaatttattactcaggtacctctgctcttctggctatctttgagtcttaatttacaacagaaaacaggctcaagtgaatgttctttgcatatacgctgggtagagaaagtccccatcactccagctataattttgagttttcagtatcagtgaaggactcttagccccaccatcagtgacagaaccaacaaggataaaactgagttgctctatttgacaaggacacctttcaccgatatgaagatagggctttttgatccatgacactgaccaatagggcttcccaagcgttccccagagcacaggcccattggagcacccccgactgctggatgggcataatctctcatggggcccaagcaagtctctgcacgatggaatttagcctgataagggaaaggactgagatgacaagtttactcagtcagcctctcaagacatacctaaggtaacacttaytagcctaattcatgcaagatttcccaagctggtgtggacttgcttgatagattatgacacaatttc

SEQ ID NO: 702122 - DNA, 630 bp, Homo sapiens
agaagaccaaacaccgcatgttctcactcataggtgggaattgaacaatgagaacacttggacacagggtggggaacatcacacactggggcctgtcgtggggtggggagaggggggagggatagcattaggagatatacctaatgtaaatgacaagttaatgggtgcagcacaccarcatggcacatgtctacctgtgtaacaaacctgcacgttgtcacatgttccctagaacttaaaatataataaataaaataaataaaggagttttttcctttgcctttcactttgatcatacacatccagaagtcactttttattctgttctagctcctgggaaaaggatttgtttgtgaagatacaaatagtaaataattaaggtttttaaaagatgcattctgtcacatagacctgaatgactgttgcctctgtgctagccttcttggagtaaacctgcaatttttttccctttggtaggctcttgcagccaatgccggaacaggatttgctgttgctgagcctcaaatcgcaatgttttgtgggaagttaaatatgcatgtgaacattcagactgggaaatgggaacctgatccaacaggcaccaagagctgctttgaaacaaaagaagaa

SEQ ID NO: 702123 - DNA, 630 bp, Homo sapiens
agaagaccaaacaccgcatgttctcactcataggtgggaattgaacaatgagaacacttggacacagggtggggaacatcacacactggggcctgtcgtggggtggggagaggggggagggatagcattaggagatatacctaatgtaaatgacaagttaatgggtgcagcacaccaacatggcacatgtctacctgtgtaacaaacctgcacgttgtcacatgttccctagaacttaaaatataatwaataaaataaataaaggagttttttcctttgcctttcactttgatcatacacatccagaagtcactttttattctgttctagctcctgggaaaaggatttgtttgtgaagatacaaatagtaaataattaaggtttttaaaagatgcattctgtcacatagacctgaatgactgttgcctctgtgctagccttcttggagtaaacctgcaatttttttccctttggtaggctcttgcagccaatgccggaacaggatttgctgttgctgagcctcaaatcgcaatgttttgtgggaagttaaatatgcatgtgaacattcagactgggaaatgggaacctgatccaacaggcaccaagagctgctttgaaacaaaagaagaa

SEQ ID NO: 702124 - DNA, 630 bp, Homo sapiens
agaagaccaaacaccgcatgttctcactcataggtgggaattgaacaatgagaacacttggacacagggtggggaacatcacacactggggcctgtcgtggggtggggagaggggggagggatagcattaggagatatacctaatgtaaatgacaagttaatgggtgcagcacaccaacatggcacatgtctacctgtgtaacaaacctgcacgttgtcacatgttccctagaacttaaaatataataaataaaataaataaaggagttttttcctttgcctttcactttgatcatacacatcyagaagtcactttttattctgttctagctcctgggaaaaggatttgtttgtgaagatacaaatagtaaataattaaggtttttaaaagatgcattctgtcacatagacctgaatgactgttgcctctgtgctagccttcttggagtaaacctgcaatttttttccctttggtaggctcttgcagccaatgccggaacaggatttgctgttgctgagcctcaaatcgcaatgttttgtgggaagttaaatatgcatgtgaacattcagactgggaaatgggaacctgatccaacaggcaccaagagctgctttgaaacaaaagaagaa

SEQ ID NO: 702125 - DNA, 672 bp, Homo sapiens
gagattaagtgggaatacatcttttgatcacataatttttttaaaaatgtattttctatcaaaggggtatatgtgcatgactattacatgggtatattgtgtaatgatgaagattgggcttccagtgttctcatcacctaaatagtgaacattgaacccaacaggtaatttttkaaccctcaacctcctgtcaccttctccctttttggaatccccagtgtctgttatttccatctttacatcatatcaattttgagtgtgatcctctcttaatatataatttttgactcactgggcccccttagaagaagcaaatagaactcaccataatcagattattttttatttggtggaaaatgttgtgtttccagagaacaaatatgttttgacttttcttattttctgaagtttgtgacaaatatagcaaatagacctggaatttagtagttcacaattattgtttttttctatcacatgcatgtacataagtaagactgtgtacatcattgtgagattacaaattaattctcactgcactaaataatttattgctcaattcactgcataaattaagagttgatattctatttcattctatttctgttcacatcttgaacaaaaaaaatgttgtgggaaaaagaacactcacatggaaccaaagaatgaacaaga

SEQ ID NO: 702126 - DNA, 1170 bp, Homo sapiens
atgttactcctgtttattttgtagtgaacacattccatatgtctcagtaaatagttctttgtgcaatagatcyttgaaattggcttcctcccagccatgaaacagatatggcattggagcaatgctagaaagcaagaaaggaatgccagagatctaatttgaggaaagatctgaatgcacatgtctctggtaaacatcttagaaagttgttcagttttccatggttcggattttatttataattcttagtctttagaatatagaatccatacttagcagattttttttaatgtaaagatgagctgaggccagtatatgctactcatgagaagaattctttaaacgtggcactacttttggcacatgttagcctctgcctttgtgttatgggaaacctaacgtttagaatacctcgtgagttgaatacccaaaagtaaactatcccttcccaccatgaagcatagatctttaatatatacttacagaattttcaacataaaaccccaaattcttcttgtcagttttcagttaaccactgtcatatgagaaaagaagtcaaaggagagaggcccgctggtagaagtgagtactagaacatgcctacaactacactcgggagactgcttgcttccctacaaccattttggaagctctgatttttttatttgagttcagtgcaaagttaaagggactgtattagaagattctttgtgaattgttctgcagactgggcctttctgttttctccgcacttgaacaagaagtcatgttgaccccaattttttaaaagagcagaaaaaatgaaactactcatcgaaaacttatgccacaaaatttgggtcacacattagttaagtgggaggtacaataccaattacttcattgttcctgtcaaggaagccatgagtctatcctgcaaaaataaaaaaaatttaaaaagcgaagtaaggcagcattcttgacaggaacaattccctcaccattacccccgcccccgcaaaaaaaatgtctggtgagatcaaaacattaaggaagagaacatatttaaacataaaagaggaccagaatgttcctcatagatgactgttctaggccatcttccttgtaggaattctaggtcaggaaactgatacctgatgaggaaaacagtttgaactttctaaagcatgc

SEQ ID NO: 702127 - DNA, 1170 bp, Homo sapiens
atgttactcctgtttattttgtagtgaacacattccatatgtctcagtaaatagttctttgtgcaatagatccttgaaattggcttcctcccagccatgaaacagatatggcattggagcaatgctagaaagcaagaaaggaatgccagagatctaatttgaggaaagatctgaatgcacatgtctctggtaaacatcttagaaagttgttcagttttccatggttcggattttatttataattcttagtctttagaatatagaatccatacttagcagattttttttaatgtaaagatgagctgaggccagtatatgctactcatgagaagaattctttaaacgtggcactacttttggcacatgttagcctctgcctttgtgttatgggaaacctaacgtttagaatacctcgtgagttgaatacccaaaagtaaactatcccttcccaccatgaagcatagatctttaatatatacttacagaattttcaacataaaaccccaaattcttcttgtcagttttcagttaaccactgtcatatgagaaaagaagtcaaaggagagaggcccgctggtagaagtgagtactagaacatgcctacaactacactcgggagactgcttgcttccctacaaccattttggaagctctgatttttttatttgagttcagtgcaaagttaaagggactgtattagaagattctttgtgaattgttctgcagactgggcctttctgttttctccgcacttgaacaagaagtcatgttgaccccaattttttaaaagagcagaaaaaatgaaactactcatcgaaaacttatgccacaaaatttgggtcacacattagttaagtgggaggtacaataccaattacttcattgttcctgtcaaggaagccatgagtctatcctgcaaaaataaaaaaaattwaaaaagcgaagtaaggcagcattcttgacaggaacaattccctcaccattacccccgcccccgcaaaaaaaatgtctggtgagatcaaaacattaaggaagagaacatatttaaacataaaagaggaccagaatgttcctcatagatgactgttctaggccatcttccttgtaggaattctaggtcaggaaactgatacctgatgaggaaaacagtttgaactttctaaagcatgc

SEQ ID NO: 702128 - DNA, 643 bp, Homo sapiens
aagaaaaacctgctattcccccaagcttaaaatggaaacattctttaatgggaaaataatgccttaattcactctcttaaaatgtttaaattaaatatatataatacaatgttttcatctctacagtcttactcattatttttctaagcataatttttaaatctatcctttatgcagaaaaagctggtaaaacagtagattcattttttgtttccatggaagccttccttctataaaacatgtcttaccttttctaattatttttttaatgccatcatttcaactyttggtgttttcttcccctaagtctccagtttaaatcagtttttattttgtggcttgtctgactctggagctttcctctatgaaactggtcattccactcagaaaaaaacttagatttttggtgccagtccgaaaggaacaaataggtcagctcctacttactatttttggtgaataaaggaaagagaaatgtcagtctgttcatatattgatatattcattcaactagtatttaccgagcatgtattctagacagatactagctcagggacctgaagtaaagctggggaatgttgacacacacacaaaaattactatacattgcagaatgaaacactgaaattttctatctggtgtt

SEQ ID NO: 702129 - DNA, 2025 bp, Homo sapiens
tgttccactaattctcacaaggagcacattttctttgagaaaccaaggaaaactggatgatcataaagttgctatgaaaggctgactggagtccgtcctgagggctatgcagcatttgcttcatgtccaccccaacagtgctttcatgtgtgcttagttctctgcattcatgcctggagtccagcttccacatccgtaagagattgtcagctctaaagatctgaggacataatggaggcaagctgcatagatatgtacctcacactgagccagggcacttcagtcccgacctctcctgtggagggatggccagctggaaagtggtcacatctaccaagcactacatggctcatctgtcctgctttccctcctgattacaaacagattttgggcatctctgtgtgggtcctagtctctctaaacccacactagcacttcagtaaaactgttgtatctttataacgctttttaaaggcagagttttcagggatttttttttttctttgagtagtgcatgtattgaaatagccgtttagctttgcccagtaataaataactctgtaaaaaagaaacacttaagatggatattctgtaaacttcagaattattgtgaaattgcatttttatctcctatttttagagcccatttgatttatcccagcttggcatattagaatagacatggggtacacaaacagcctgatagttaaaattttgtctgcatgtgaatctcctctggcttccttctctgccaggaaaatttttcctgttgtcagtcaactgatcctaatatcttcttggaacagagcaaacattttaaagtgcagagtaaaagtcctcccccagccctagggagaaaactttttttttccttgagctgttgatgtctttaagagaaatgactttagttggttcagtcagatgatagaggacacagttaactccatataaggaaaatgtttgaatgccagtaccattgatttcaagtaaggtttatgtgggtaacattgtttaagaagataatctgagtcataaattgcataaggggtaactccctcttaagcaacagcaaaagagtagttttgtagttttgaactttgttttgaaaaaatcctatattaataaacattttgaaatatgctgtctacttaggtaggaatgtggacctcctgaccatggactatatggcttttaattaactgctgtttccaattctttttagagtttcagtcagaattagttattctgagcctaaaaaataaaatgaagacacaaatttctcttaaaccctattaaagggtcttcttttaaggcagacaaaacaagtcttcttaagacagccttatggtaattgatccagagtmatttagtttatttcaacaattattccagcacacattttttttaactattggctaaacataaattgttaacatgatagaaaacagtcaccaaggggagtacttacaaaccagaacacagtagtgatggtcacagaaagagacttttttaaaaatcaaaattaagaatgtctctaaaactcttcattgatcttataatttagaaaaaatgaagtatatgtgagagatgactcatgggctggataggaaagttgtggacactgggcagaggtagggaaacaatctcagggaagaggaatattgggtagaaaaaataaaatcccttttaactttttaaaagttattatcaattagggttaaaatgaacaaaatattttggatcaatttacataaaggcattgaaaggtctccacaatgagactatagaattaccttatttcggaagtaatcaaggtaatattttatttgaaaagtgtttgggcaataatagcttttattagtcagggttctcctgagaaacagaaccaatgggatatgtagatagagatataaatatatttatacatacatacagagagagagagagacagacagacagacagctcatatgattttggaggctagaaagtctgaaatgccaagaggctggaaattcaggtaaaag

SEQ ID NO: 702130 - DNA, 2216 bp, Homo sapiens
gtactttaattaaagcataatgtgctttaatttctgttttgctagaaactaaatatcaccatctgttttttaaagattttcatgataagtttcactttctcaaaaacaggagcaacacaaatttaccttatttaataagtttcttctgggcaaatcaagtacttgctaattcatacttttaacagcttactattcaaaagattttttcatatactaaaagtaaacctcaaagagtcacacagaagattaggacacaataaaaatatcaaaaaacagtatgaatatttaccagatttttatgagggcaataatcttctaagtgcaagaaggcaaatatataaacattactcaaatacataaacacttaaagctgtcattaaagtgagaaaaaataagcaatattaaccaaaaacagccaaagggaaatgtctgcaacaattatgacccaaaatcaaatcatatgctattttttccttttattcgagagaaggtctcactctgttgtaggttgcctaggctggagtgtaggcaccattatagctcactggaacttccaactcttgggctcaagagatcttcgggcctcaggcccctgagtagctaggactagatgtgtgcaccaccacacctggcaaatttttttgtatacacaagaggtgggggtggagtctcgctatgttgcctaggctggtcctgacctcctggcctcaagtgatcctccagccttggctccctaaagtctgggattatcggcatgagccactgcgcctggcccatatgctagtcaaaaagctaaaaaatagataataggtacaacaggagcaaacagaatttaaaacaagcatacagaaatcaaatgcaatatgagccaaagaaactcaatgtataattcacatatctcagatatcaattcataaccattaagatggaaatagtattaagtagtattgctacgcatacacacatgcacacgtctctttgagactctatactctggccttgccagatttgtgctgattctgaatctcaaaagaaccatcatctctgggatatcacataaattgcaatatttgcttgatacaactctctttcctcactttcctacactataattattgttataaatatttatttacatgcttgttccccacatgactgtatgttttaaaagtagagactgtcttgattaccaacaagtcttcgaaattgaatgtaagcaccatatacatttatttgctcaatgttggcatggttacattaaaagtggtgacaggtaacttctgcaatatttgtagaacactttaatccaaggccaagactctaagataatttaagaaatacatgtaggggggtattttaaatgattatatttgtaatttttaaaaatctaggggaaacatattcattagataactgattaaattatagtataagcctatatgacagcatgcaatatattagtataaaatgctcatggcaatattaatttttaaaacagtaggctacaaattgaacctacagtattgttatagacataaaaattacacaaggactacaaggtgaaagtttcaaaaaggttaacattagcactgctaggtcaagaaaatgaaaaatccacactagaatgaataaattacatatatatacatgatgaaaactatgtaagagtcaaaacgaatgaaactcaactatacatgacaatgtggttgactctcacaaacttaaagaaaaaaagtcacaaaagaatactccagattatgattccattcatagagttcaagaacatgaaattaacctattattaagaggtaaatgtgataagggctgttaaacatataagtaataaatactaacaatgaaatattagacatttaggactgctttcttgggcaagaggaaaaaggcrtaaggagatataagtagttaagagatgagatctagaaaacataaaacacaaaaacattgattcattgtttattttcatttacattaatgctatttaaacaatatatatttttaataaaagacttctacttaaactttattaaaatgatgacttcataccatcataatttgcccggtttaattatttttctaaatgtaaattttcttcaagtaggactcataggccctcaggactcacagggcctcactatgtactagtaagggctagtacacaccataaagaagtataatatatacctatacatacacat

SEQ ID NO: 702131 - DNA, 1564 bp, Homo sapiens
aaactttaatatgcttaatgtgtaatggagctattttatgtccacattttcaaacttatctgaccataaatatactttatgaaatgtttcattcaaaatagtttacgaaaatactgttctgttaactaaaaagaaaaagaagaaaaaaaccaatcatattagtagtagtctgggagagaaggaacaagatataaaagaaagataaagggaacaataaagagaattaatgattctataactacaatcttgggagaaaaaaggttagtctcaatgtatttgtccagctgaggcaaagaaacgaagacaaacgggatggagaagtagagctggagcagagtactgctatgttctgaggcaatttgatgagttaccacagattgagaaaaagatgttacagaaccaagtgtcttggagaaaggaggaggaatatgcatgacaatgtctcctgtaagattttgaattacgtaccttaaaaaaattaaggcttccattatctaaagcaggggttctgcaaactaggacccttgagccaaagctgaatctaggcctatttttgtatggcctgtgagctaagcatgaattttatatttttaaattgttaaaatagtaatatttaaagaataatatttaaatatatgtcaaaaaaacataaaattcaaattcctatgtccataaagtatgattggaacacaactatactcattcatttatatattgtctatggatgcttttgtactgtgttggsatactcggatagctgtgacatagatcttatggttaccaactgggatttcaaaaaagttttctaatatctaattaaagtttaaagttactgtgttcctccagagataaaactacaacaccaaaaagaactaataaattatattgaatacttcaaagaacaaatctaggagacttattcagtttatttataaacaattttgagatatctattagatagacagatagctgttttagaataaaaggcaaaaccctcttaggaaacaaatactaacagtctttactgaattgcaaactagcagctatggtaaagaaatatttttctacagagatgaatgataatttaatttatattaacttactcataaatgagtcagctaataaaaactactgagaaaaagagcatagagtcattatggaaacaagcactctcagtactcaactacagttaaaaagaaaacactcaatgagtcagcaggaactaagcaaaggcaaagagatttcttaataccttaaagaaatcctaattaattcatgagattgtaatttttaatgtcaagttagaagcttgacagacagcttcaaacagaccaaagttcaggactattctaaacatgggagcacatcaggtaagaaaaagtaacagttttcctaaatgtagaaacaaataatgaagttcaattagatttaaaagaaatcatacctgtactttaatgaaataaagacattcatttccaagtaagtatttatatttatttacatttaaattatactataatgtattaatttacatttagttttaggtatatgtttctgtgtatca

SEQ ID NO: 702132 - DNA, 602 bp, Homo sapiens
ctagaatgtagtatacaaagtgctgtaagacaaggttggagaaaactcggcatataaacgtatatgcaaagatgaaaagtttattttaagaatatatatcatttcatcagggagcctgccccaatattcacctaggttcttttctattttccctaagcatcggccagcttgagaaattaagggacagagtacaaaagagagaaattttaaagccgggcatccgggggagacatcacatgtcrgtaggttccatgatgccccactagccgcaaaaaccagcaagtttttattagggattttcaaaaggggagggagtgtgcgaataggtgtgggtcacagacatcaagtagtttacaaggtaatagaatatcacaaggcaagtagaggcagggcgagatcacaaaaccacaggactggggcgaaattaaaattgctaatgaagtttcaggcaccattgtcattgataacatcttatcaggagacagggttttgagatcaaccggtctgaccaaaatttattaggcaggaatttcctcttcctaataagcctgggagcactatgggagactggaatctatttcacctctgcagtctcgaccata

SEQ ID NO: 702133 - DNA, 2006 bp, Homo sapiens
atatgtgataattgcttttgttctatacctacctaagcaactgtatatttagatctcatcatttcctagtctatgactgacaacccaacatttaattggctcatcttccaaaaagaacaggtgtttttcctaaaaaaaaaaaaaaaatattttgcttgaaaaatatttttgattgatttattacagctaacatattttagctgaaataaggactttcacaaataacctagaaaacacataggcaagatatatcaatgaaaaacatttttggcaggattttacctaaaacaataaatcctaaaccactattacaagtgtatattattttcctttaaattatgtaataaaatttatttttccatggatttagccagaatgattttcttaatcataatctgctcatactgaagggaattttttaagattaacttttaaggtgctcttgagatttgcataaatctttgttaatgacaaattcctgctcrcttattctgctttcctctataatatttggagccattcccctcatctctatcgtattttgtcttttcagtcatctaaagaaagtcaggtaatgaaatcacagtgaacttattcccctgaaattttcctgaaacatttgccattctcagaacagattgttttacaagcatattttacttagttgcaaaaaagcagcaagacaaattttccttcaaaagaaaataggttgcatgcatctttaacttttgcttttcagttagaataagcaatagcattcttccaaaacactagacaaatagcccagtgttctgcttattacattttgattattttctggtgacttccatacggactcatatttgtgtgtacagcaattcaacatgtattgacacttaccttgtgccaagtcctgtgctagtgttaaagtgcccagaccaggttaggaagccactgtcttggccctagagggctcacagctggtcagggagacagaagaaacttcaaaaggatgccactcgggctgacccttgaaggaagagtagaagtctatcaggtggaagagagaagaaatggatttccaagcagtgaaacagcctcttcaaaggctcaaaggtgcaaaattgcataatcggttcaggaaatgaagtcagtacatgtaataagaaggcagttatcattccttgaacaaaggtgtgactttgcttgcaaactggtaaaagcatagattgtttatgtgccttctggctcatgtcctaattcttgatcacaggacacttgagcccaggtttcttggcccttcagcaccaagcagctggctccgatcaccatccacttcagtctcagggtcaccttcttgcaaaaatgtcccatgctcataaagatagaagtaatccatccacttttaggcagtgggagcagaatataaagaaaggtgaggccgggaatggtggctcatgcctgtaatcctagcactttgggaggtcaaggtgggtagattacttgagcccaggagttggagaccagcctggccaacatggtgaaatcccatctctactaaaatacaaaaagtagctgggcatggtggtgtgcacctgtggtcccagctactagggaggctgaggcaggaggatcgactgaacctgggaggtggaggctgcagtgagccgggatcaccaccattacattccagcctgggtgacagagggagacactgtcttgaaaaaaaaaaaaaacaaattaaaacagaaaaagaatacaaaggagggtgaggtaaagttcccaactacagaggaataaggatgggggcttttcaggaaattcctatggaaaaacactgagagaggaaggtagcgtggcagaaacaagactcggtgaagagcacacactctgaagtcccttctcccacttctgtgtgacttccaacaattaacttagccttttattgcctcagtttcctcacctgtaagatgaagattaaaaggttaccaggtacaaactccataaggttgctgcaaggattaaat

SEQ ID NO: 702134 - DNA, 2006 bp, Homo sapiens
atatgtgataattgcttttgttctatacctacctaagcaactgtatatttagatctcatcatttcctagtctatgactgacaacccaacatttaattggctcatcttccaaaaagaacaggtgtttttcctaaaaaaaaaaaaaaaatattttgcttgaaaaatatttttgattgatttattacagctaacatattttagctgaaataaggactttcacaaataacctagaaaacacataggcaagatatatcaatgaaaaacatttttggcaggattttacctaaaacaataaatcctaaaccactattacaagtgtatattattttcctttaaattatgtaataaaatttatttttccatggatttagccagaatgattttcttaatcataatctgctcatactgaagggaattttttaagattaacttttaaggtgctcttgagatttgcataaatctttgttaatgacaaattcctgctcgcttattctgctttcctctataatatttggagccattcccctcatctctatcgtattttgtcttttcagtcatctaaagaaagtcaggtaatgaaatcacagtgaacttattcccctgaaattttcctgaaacatttgccattctcagaacagattgttttacaagcatattttacttagttgcaaaaaagcagcaagacaaattttccttcaaaagaaaataggttgcatgcatctttaacttttgcttttcagttagaataagcaatagcattcttccaaaacactagacaaatagcccagtgttctgcttattacattttgattattttctggtgacttccatacggactcatatttgtgtgtacagcaattcaacatgtattgacacttaccttgtgccaagtcctgtgctagtgttaaagtgcccagaccaggttaggaagccactgtcttggccctagagggctcacagctggtcagggagacagaagaaacttcaaaaggatgccactcgggctgacccttgaaggaagagtagaagtctatcaggtggaagagagaagaaatggatttccaagcagtgaaacagcctcttcaaaggctcaaaggtgcaaaattgcataatcggttcaggaaatgaagtcagtacatgtaataagaaggcagttatcattccttgaacaaaggtgtgactttgcttgcaaactggtaaaagcatagattgtttatgtgccttctggctcatgtcctaattcttgatcacaggacacttgagcccaggtttcttggcccttcagcaccaagcagctggctccgatcaccatccacttcagtctcagggtcaccttcttgcaaaaatgtcccatgctcataaagatagaagtaatccatccacttttaggcagtgggagcagaatataaagaaaggtgaggccgggaatggtggctcatgcctgtaatcctagcactttgggaggtcaaggtgggtagattacttgagcccaggagttggagaccagcctggccaacatggtgaaatcccatctctactaaaatacaaaaagtagctgggcatggtggtgtgcacctgtggtcccagctactagggaggctgaggcaggaggatcgactgaacctgggaggtggaggctgcagtgagccgggatcaccaccattacattccagcctgggtgacagagggagacmctgtcttgaaaaaaaaaaaaaacaaattaaaacagaaaaagaatacaaaggagggtgaggtaaagttcccaactacagaggaataaggatgggggcttttcaggaaattcctatggaaaaacactgagagaggaaggtagcgtggcagaaacaagactcggtgaagagcacacactctgaagtcccttctcccacttctgtgtgacttccaacaattaacttagccttttattgcctcagtttcctcacctgtaagatgaagattaaaaggttaccaggtacaaactccataaggttgctgcaaggattaaat

SEQ ID NO: 702135 - DNA, 2006 bp, Homo sapiens
atatgtgataattgcttttgttctatacctacctaagcaactgtatatttagatctcatcatttcctagtctatgactgacaacccaacatttaattggctcatcttccaaaaagaacaggtgtttttcctaaaaaaaaaaaaaaaatattttgcttgaaaaatatttttgattgatttattacagctaacatattttagctgaaataaggactttcacaaataacctagaaaacacataggcaagatatatcaatgaaaaacatttttggcaggattttacctaaaacaataaatcctaaaccactattacaagtgtatattattttcctttaaattatgtaataaaatttatttttccatggatttagccagaatgattttcttaatcataatctgctcatactgaagggaattttttaagattaacttttaaggtgctcttgagatttgcataaatctttgttaatgacaaattcctgctcgcttattctgctttcctctataatatttggagccattcccctcatctctatcgtattttgtcttttcagtcatctaaagaaagtcaggtaatgaaatcacagtgaacttattcccctgaaattttcctgaaacatttgccattctcagaacagattgttttacaagcatattttacttagttgcaaaaaagcagcaagacaaattttccttcaaaagaaaataggttgcatgcatctttaacttttgcttttcagttagaataagcaatagcattcttccaaaacactagacaaatagcccagtgttctgcttattacattttgattattttctggtgacttccatacggactcatatttgtgtgtacagcaattcaacatgtattgacacttaccttgtgccaagtcctgtgctagtgttaaagtgcccagaccaggttaggaagccactgtcttggccctagagggctcacagctggtcagggagacagaagaaacttcaaaaggatgccactcgggctgacccttgaaggaagagtagaagtctatcaggtggaagagagaagaaatggatttccaagcagtgaaacagcctcttcaaaggctcaaaggtgcaaaattgcataatcggttcaggaaatgaagtcagtacatgtaataagaaggcagttatcattccttgaacaaaggtgtgactttgcttgcaaactggtaaaagcatagattgtttatgtgccttctggctcatgtcctaattcttgatcacaggacacttgagcccaggtttcttggcccttcagcaccaagcagctggctccgatcaccatccacttcagtctcagggtcaccttcttgcaaaaatgtcccatgctcataaagatagaagtaatccatccacttttaggcagtgggagcagaatataaagaaaggtgaggccgggaatggtggctcatgcctgtaatcctagcactttgggaggtcaaggtgggtagattacttgagcccaggagttggagaccagcctggccaacatggtgaaatcccatctctactaaaatacaaaaagtagctgggcatggtggtgtgcacctgtggtcccagctactagggaggctgaggcaggaggatcgactgaacctgggaggtggaggctgcagtgagccgggatcaccaccattacattccagcctgggtgacagagggagacactgtcttgaaaaaaaaaaaaaacaaattaaaacagaaaaagaatacaaaggagggtgaggtaaagttcccaactacagaggaataaggatgggggcttttcaggaaattcctatgraaaaacactgagagaggaaggtagcgtggcagaaacaagactcggtgaagagcacacactctgaagtcccttctcccacttctgtgtgacttccaacaattaacttagccttttattgcctcagtttcctcacctgtaagatgaagattaaaaggttaccaggtacaaactccataaggttgctgcaaggattaaat

SEQ ID NO: 702136 - DNA, 632 bp, Homo sapiens
cagtggaagacaaagtgagaatgacatccattgcacagctggaattgtgagcacttgaatttcccataaggatccaagcattgcttgctgctgggagggctgtgacaccaggcgagcatgatcgaaattccccaawttgtctcctttgagattagctcaagtgcggatgcaacagaagcttatcctgatgtgtgtgggtgaaaacttatgcctgggggacacctactctctggtgttgttcctaaggagcatataaccataaaagaggggaagcaaaggaactgtgatttccaagtccttcaattcttcaacaaaccatgttgggttgatcgcaatggctctgtgaatcctcttttacttcctgaattgcttccagagcatggcacggaggagtggattgtggctcagatctggaatggcaaaatattaatatgtggactcgaccagtagactaatcctggttccatctgagagagtgctcttttttgattcactgcagctggagggctcacaggggagagaggtgtgatagagcctcattgtctctttggagccaatgcctagcctgggaggtattagcacgttgtggttaaaactgagctagtgtcaagccaactaggattctcatgtgc

SEQ ID NO: 702137 - DNA, 585 bp, Homo sapiens
cttgcatttccttggttgctagtgaggttgggcaccttttacgatgtttattggctgttcatatttctcctttgctaatcacatggcttttcaattttatacttagctgttttctctttgttctgtctgtaatttaattttgttaatgatgcgaactagagatttaattttatgttttaccaaatgaatagccaacactatgtattgtctgttgtatttttccccactggtttatatgatgttgtgtattatctaccaaatttacatgtatgcttccaaagtcttattccatcccattcttttatttttctttcatgattaacaccatatttttgaattgctaaaactttataatataaatataagctttgtatgtctataaataaaatacrttttattaattataattatatgttatataattataatataagcacttgaacatatatacttctataattatatattatataattatatatcatacttctatgatatgttctataattatatattgtatatatcatagttctatgatatgttctataattatatattataaagttacaattaattgtatattta

SEQ ID NO: 702138 - DNA, 610 bp, Homo sapiens
ggaatgattaaatgaagttacttatatccatcactagagaagcaagtgagtccttgggattggaagtatcctttgactttaacctttccattactttgtataaaatatttttcaagagccattctttgccttcataatttataagaataccagtgaaaaacacttgttttatttaaataattttacttttggttasaactgcaggtgttttaggaaatggttttggaagacttgtcttttaaagtcaattcaaaaacttacattctgctgcgtgttgggaaatcattaggctgatattctgctagccaatagagtatttaatagaagtatatctaaacacatgtttcttgaagatatattcgaaggcaggaaatttattttattttattttactttaagttttggtatacatgtgtagaacgtgcaggtttgttacataggtatacatgtgccatggtggtttgctgcacctgtcaacccatcatctaggttttaagccccggatgcattaggtatttgtcctaatgctctccctcccattgctcctcaccccctgacagtccccagtgtgtgatgttcccctccctgtgtctatgtgttctcattgttc

SEQ ID NO: 702139 - DNA, 1463 bp, Homo sapiens
tacaaaaattagccaggtgtggtggtgggtgcttgtaatttcagctactcrggaggatgaggcaggagaaatgcttgaacccacgaggggaggtggaggtctcagtaagctgagattgtgccactgccctccagcctaggagataagagaaattctgtctcaaaaaaataaaagaaagaaaaagaaaaaaggaagggtcaggcatccaatagacaggagaaaggacacgagtggaaaaagaaaactttttttttctttcaaattccagaaagtaatggtataaaagttggagcatttagggaaatcaacagagcaacactgaaaacaggaaataatctgaaattctgaaagttgaagagagcattatttcccagattgctagggaaaggaacatgcttagctagacaggccaggaaaaaacttttcattgttgaataataatcctggatcaaaaatgtggtagatttaagaaacttaacagggggatagttaaaaataggattttgatttgttcttcttctttgtcataacaatatttatttggaaaaatgtatgcaaatgtgactaatatgcattcatatgtccatataaatgtctctaaaatttactgcttgaactataactacaaaatgttacttgtaatgataaccttactactaatacttcttatagttttgaatgttgtatatacttcatacttgaaataggaattctattatttccaggacaaatagaattagttttgttgttaaaactgatgggaaggaaatagtaggcaatgtgtatagaggggaatgaggaagccacttcctcaggtcacagcccaagaaatggcccagcaaccacagttcatgatgtgaggggccatggggcagtctcaggggtggctccagcatattaagtgtgtggttatcaagaaaggaaagaccacggaatgttctatgagaaacatgaacaaaataaaccactacctataggaaaatatgaattttaaattgatattaaaataaatgtctaaagggtggagagggctgggcccataatatggctatttatgggaagtataggaagtttaaaatttttagtatttgattctgtgttatgttagcttattagtttcatgtgtgcaaatgagttatccccaaactccatctcctttttgaactgtttagatggtggaaaatatggctgtgtgagttttaaacttgatgtttaattttaaatattcttacaataatacaggatatacagagaaaatagagtctctgtcattttatatgtttccttctagatcataaaattatattaaaaatatctatccaattggcagagttatattttttctgttttctcacttaaaatattgtaaaaatacctcaacttctatgtcctcatgtcattaattagtattttatttatagcaaatgtgatattaatttgtgatagtctaatttagatgaata

SEQ ID NO: 702140 - DNA, 1463 bp, Homo sapiens
tacaaaaattagccaggtgtggtggtgggtgcttgtaatttcagctactcaggaggatgaggcaggagaaatgcttgaacccacgaggggaggtggaggtctcagtaagctgagattgtgccactgccctccagcctaggagataagagaaattctgtctcaaaaaaataaaagaaagaaaaagaaaaaaggaagggtcaggcatccaatagacaggagaaaggacacgagtggaaaaagaaaactttttttttctttcaaattccagaaagtaatggtataaaagttggagcatttagggaaatcaacagagcaacactgaaaacaggaaatratctgaaattctgaaagttgaagagagcattatttcccagattgctagggaaaggaacatgcttagctagacaggccaggaaaaaacttttcattgttgaataataatcctggatcaaaaatgtggtagatttaagaaacttaacagggggatagttaaaaataggattttgatttgttcttcttctttgtcataacaatatttatttggaaaaatgtatgcaaatgtgactaatatgcattcatatgtccatataaatgtctctaaaatttactgcttgaactataactacaaaatgttacttgtaatgataaccttactactaatacttcttatagttttgaatgttgtatatacttcatacttgaaataggaattctattatttccaggacaaatagaattagttttgttgttaaaactgatgggaaggaaatagtaggcaatgtgtatagaggggaatgaggaagccacttcctcaggtcacagcccaagaaatggcccagcaaccacagttcatgatgtgaggggccatggggcagtctcaggggtggctccagcatattaagtgtgtggttatcaagaaaggaaagaccacggaatgttctatgagaaacatgaacaaaataaaccactacctataggaaaatatgaattttaaattgatattaaaataaatgtctaaagggtggagagggctgggcccataatatggctatttatgggaagtataggaagtttaaaatttttagtatttgattctgtgttatgttagcttattagtttcatgtgtgcaaatgagttatccccaaactccatctcctttttgaactgtttagatggtggaaaatatggctgtgtgagttttaaacttgatgtttaattttaaatattcttacaataatacaggatatacagagaaaatagagtctctgtcattttatatgtttccttctagatcataaaattatattaaaaatatctatccaattggcagagttatattttttctgttttctcacttaaaatattgtaaaaatacctcaacttctatgtcctcatgtcattaattagtattttatttatagcaaatgtgatattaatttgtgatagtctaatttagatgaata

SEQ ID NO: 702141 - DNA, 964 bp, Homo sapiens
ttctaatttctctagtctcaaaattgctgagctgatatctttatctttggtaaaacttgtttgatatgcccatgtatctcatttctcttttgaacttgactcactatcatcatttgtcaattaaatgatttaggtaggaaactattcttaatacatgttaaaataaattataaagttgtaatacctaaaatgctataatgctgatattgttggtctgtgtccccacccaaatctcatcttgaattctagctcccataattcccacgtgttgtgggagggacctggtgggagataattaaatcataggggtggtttcccttgcattgttcttgtggtattgaatgagtctcaggagatctgatggttttatgagaaaaacccctttcacttggctctcattctctcttgcctgctgccatgtaagacgtgacttttgccttttgccatgattgtgaagcctccccagacacgtggaactgtgagtccattaaatctttttttctttataaattattcagtctcaggtgtgtctttatcagcagcatgagaacagactaacacaactgctgattcaaaaattaaaaatcacatcaaagaaacacaatagagtttaaaatctatttacataaatataagaattagtatgtaatacaagtggcattgattatagtgggtcatttaattagagttactgaacaaaataaaaatagcacacaggaaaacaaaacaaaatttggttttcatgttaattattagcctaacaggttttcaatgagccaaatatcttaatataaaataagaatcattttttaaaagaaatcatgagaagaaracatgggagactttatttgcacttatttttaagcatttcacaaaattctcatgcaacactagagatcattgttgaactcaattgaaccataaaatgtctccatagaaaatatgttcttaaataaaatcaaaa

SEQ ID NO: 702142 - DNA, 1480 bp, Homo sapiens
tatctaatatgamcttaagctaaagaaggaaatataaattttgcctagtattaagagacagtaggccaagaaaaagatatgcaggctgcttgttacaaggctaagatctcgaaaaaagaaaaatcagaaaaagaaaacatatgcataataagaaaaactggcacacactttaaaatcttatctaatagcaaaatccttgatgttggactgaacagctacaaaaatatgtcaaattaaccttctcccaccacactcacacacagactaaattaatgttcttggttttctacaataaaaacctagaggattgcattacttgccttttatatttcacatgttggtttaaatgtataaaaatatgaaaccaatccatttaaaatatatttgtagttaaatgcaacattacctttgtctgtgtatatgagtgcagttgatacagaatccaaaaattaaaatttgcagcgtgtaatatcttcaattctatgaacaatctagatttctgataaaaactaaatatatagaatatgaagtgaataaaatacaaacacggaattgtaattgagatgaagtcttataaaaacttattataattgtacaatcagggttttcctaagaataagttttagaaaatttgtaaaatattctaagaatataaatgtatataatggtttttttgaaatttctgaataaaagatttaaagtataaattttaaccatttttctgtataacatcaatttcattgtatcttatctttagttttgctttagtaaatataactgcatattacatcagaatagaaaatactatttatttacctgaagacctgtaagaacttggaattctacactatactaggatttccagtaattaaaataaggactatattaaatatgtataattaaattaaattaaatatatagaagaaatgcttcttttgattttaaaaggaggatatcagaaaaaaaataggaatttgtatttacatatagaattattttgtaatcacatgaaaattggggggaatttaaggatcttccaattagcaactagttctttgtcagataatattaactaggacatttattttaatttaggaatttcaaatattggtgtaataatatacaacaccacagattggtaaaagaatgcagtatactatttgacaaataataaagcatgtagttttgtaaatgtttagtataaattttaaattttcatgtaataagcaaataagaatgtaaaacttgaatatattaagttatgtatgttgtaatattactaaaaatttaaatagtaaaaagcagaaactgaccacttggagctaatatatataatttgattcattatagaactaaactctatatccatatttaccttcatacatagagatcagaactactacaaatgactctggaacacagcactgtataaagggtgtgataccttttaaagacaaaaattactgcaacaaaattttta

SEQ ID NO: 702143 - DNA, 1480 bp, Homo sapiens
tatctaatatgaccttaagctaaagaaggaaatataaattttgcctagtattaagagacagtaggccaagaaaaagatatgcaggctgcttgttacaaggctaagatctcgaaaaaagaaaaatcagaaaaagaaaacatatgcataataagaaaaactggcacacactttaaaatcttatctaatagcaaaatccttgatgttggactgaacagctacaaaaatatgtcaaattaaccttctcccaccacactcacacacagactaaattaatgttcttggttttctacaataaaaacctagaggattgcattacttgccttttatatttcacatgttggtttaaatgtataaaaatatgaaaccaatccatttaaaatatatttgtagttaaatgcaacattacctttgtctgtgtatatgagkgcagttgatacagaatccaaaaattaaaatttgcagcgtgtaatatcttcaattctatgaacaatctagatttctgataaaaactaaatatatagaatatgaagtgaataaaatacaaacacggaattgtaattgagatgaagtcttataaaaacttattataattgtacaatcagggttttcctaagaataagttttagaaaatttgtaaaatattctaagaatataaatgtatataatggtttttttgaaatttctgaataaaagatttaaagtataaattttaaccatttttctgtataacatcaatttcattgtatcttatctttagttttgctttagtaaatataactgcatattacatcagaatagaaaatactatttatttacctgaagacctgtaagaacttggaattctacactatactaggatttccagtaattaaaataaggactatattaaatatgtataattaaattaaattaaatatatagaagaaatgcttcttttgattttaaaaggaggatatcagaaaaaaaataggaatttgtatttacatatagaattattttgtaatcacatgaaaattggggggaatttaaggatcttccaattagcaactagttctttgtcagataatattaactaggacatttattttaatttaggaatttcaaatattggtgtaataatatacaacaccacagattggtaaaagaatgcagtatactatttgacaaataataaagcatgtagttttgtaaatgtttagtataaattttaaattttcatgtaataagcaaataagaatgtaaaacttgaatatattaagttatgtatgttgtaatattactaaaaatttaaatagtaaaaagcagaaactgaccacttggagctaatatatataatttgattcattatagaactaaactctatatccatatttaccttcatacatagagatcagaactactacaaatgactctggaacacagcactgtataaagggtgtgataccttttaaagacaaaaattactgcaacaaaattttta

SEQ ID NO: 702144 - DNA, 1322 bp, Homo sapiens
caatttcctgcctaggtatacaagtcaggctttcagttgtctgggagttgacaggaaaaatcttgcctggggtctcgtagttctgtagtggttttcacttacctatcctgtccctttttattcagcttgacacctgacccctgtggctggaatcctacaatcctrtactgctgtcgctccatcttctctgagggtgggtggagagaatggtcgagagaatggtctggctgtatagagtaaggaaggagaatgagggggctgctgctattttctcagttacaatttcattccaattttcaagcccaccccacattctggcctccagaggtaactggacaatcacatttctcttcatttcttcttcttgttgcaagaatctgcctgtttctgagtgtcatccctgtgcagaaagtgaggctctcctctctgctttggaggagcagcagccacgtgttcatcctccatgtttgaacacatcgcatttgctgacactgaatttctaattctctccatcttttgactgtatacttttgatattatttttactcttcttttcttggttttcaggaaagcagcagaaatgcatattttcaacccaccatatttaagcagaattcgctaacaacatctctacactcatcagctccattcctttgatcatggaaggaatgaataaacagagtttttgcagtgagtcccaaacagtaaaccacacagcagatcacaaagaactttactattttttaaaacagtaagagctcatgctattactccagtgtttcaaagatgtgttctgtgtagtcaattaagaaatgcatcttatctctcaagttatcttggtaactttagtttgttatgatgacttatctcagttcaccacatacagatgactactaaaaactggtaaatatatatgtgtgtatccacctatatattcatctatccatctatatcctgataggtatgtttatattatatacatatgatatgtgtatatatagacagatacgtatatatatgtatatatgtatgtatgtgtatataactgaattcatatatgtatatttttatttgtatttatgtattttttcttcttaagaaaagaaaatatcaagaacagaccagacaattttgtgaaagccatgtctattctctgcttccctaagatttatatgcaacatgaaattactcaactaaggtctgaatttccaccttaggtgtgctaggacatttcatacgtcaccactcatatccaaggtattttagaattatgaacagtgaacagtgagcaagttcacaggccctttttattttagcacttc

SEQ ID NO: 702145 - DNA, 1309 bp, Homo sapiens
attaggcaacccaaattaagcggttctttacaaaataactgaccagtccccttcaaaagtgtcaaaatcatgaaaaaatgggaaggactggagggcttgttccagattaaagatgagggatcttgcaagcaaatgcagactgagatctcgaatcagatcctagaccagagagaaaggaagattgacagatctgaaagagggctggagatgaaccaacaggaccacgtggatgtaaatgtgctgcctgtgaaccttgttctgtggacactcacagtcggggtagctgtgaagagtataaggggtaggtgaagagtacaaggaaattttgcattctttttgcaatttcaatacatctaaattatttcaaaattcaaatttgaacatttttaattaaataggaaaacaaacttggctttgtatttgacatacaagaaagatgctcagcaaatggcgttcattattccttttaacaagaagaactgatggctgggggtgcttttagcccattgtccctgagaaagcatgccttggcctcggaagggcagagtgaggaagcaaagttgtttttataactgcttcaaatttcaaggttgctgagggactctgtggaggagaaaaatgtgctggattctggaaagaatgatcttttttcttttcacagaaaagaaaaactgcagtgcacgaaacaaaattcagagagcacaataagtcttccacagcctgttgctatcaggcaagccattgttcaggcctgggtgttcagggccacagcctggaaagagatgcagcttcctcacttcctgggcaattcactcggaatcgcattgcctctgtgaaaagaaaaacccagatcctggaaggggaaagccagctcctgcctgctttggccgcccacttmgcttagggtgggcgtattctgatgagggggcaccatcaccctggcattgactcacgatcccagcaccaatgaatgcaggaaggcactgctctcctcctgtaactccatggtgcctgagatgacattcctttaataaacaaacaaacaaacaaacaaacaaacaaactccaaaatgtcatcctgatgctatcatatatttgatcttggtattctcttccaaaaaggatggggaaggcagggtgggatatatttcagcagccaccttggatttttagctttccttgctctgcctccaatgattagctgtgaggagccctcaaaatatattttaaaggacttcgtgtggctcacaggggcttctaacccagatcacctcctgtctctcctaccatgaatgttatgatccaggaa

SEQ ID NO: 702146 - DNA, 1309 bp, Homo sapiens
attaggcaacccaaattaagcggttctttacaaaataactgaccagtccccttcaaaagtgtcaaaatcatgaaaaaatgggaaggactggagggcttgttccagattaaagatgagggatcttgcaagcaaatgcagactgagatctcgaatcagatcctagaccagagagaaaggaagattgacagatctgaaagagggctggagatgaaccaacaggaccacgtggatgtaaatgtgctgcctgtgaaccttgttctgtggacactcacagtcggggtagctgtgaagagtataaggggtaggtgaagagtacaaggaaattttgcattctttttgcaatttcaatacatctaaattatttcaaaattcaaatttgaacatttttaattaaataggaaaacaaacttggctttgtatttgacatacaagaaagatgctcagcaaatggcgttcattattccttttaacaagaagaactgatggctgggggtgcttttagcccattgtccctgagaaagcatgccttggcctcggaagggcagagtgaggaagcaaagttgtttttataactgcttcaaatttcaaggttgctgagggactctgtggaggagaaaaatgtgctggattctggaaagaatgatcttttttcttttcacagaaaagaaaaactgcagtgcacgaaacaaaattcagagagcacaataagtcttccacagcctgttgctatcaggcaagccattgttcaggcctgggtgttcagggccacagcctggaaagagatgcagcttcctcacttcctgggcaattcactcggaatcgcattgcctctgtgaaaagaaaaacccagatcctggaaggggaaagccagctcctgcctgctttggccgcccacttagcttagggtgggcgtattctgatgagggggcaccatcaccctggcattgactcacgatcccagcaccaatgaatgcaggaaggcactgctctcctcctgtaactccatggtgcctgagatgacattcctttaataaayaaacaaacaaacaaacaaacaaacaaactccaaaatgtcatcctgatgctatcatatatttgatcttggtattctcttccaaaaaggatggggaaggcagggtgggatatatttcagcagccaccttggatttttagctttccttgctctgcctccaatgattagctgtgaggagccctcaaaatatattttaaaggacttcgtgtggctcacaggggcttctaacccagatcacctcctgtctctcctaccatgaatgttatgatccaggaa

SEQ ID NO: 702147 - DNA, 1015 bp, Homo sapiens
tttaatggcacaacatccgttttccccagctcggcagctttcttttacctgacctgtaacatgaagactgtaagtttcatgaaggtagaaatcttgtctggctcatctttgcctcgctaaagtctaatgtaatgcctggcttgaaaatcagtgtttaataaatattaggtaggaattacaattattcaaccacatgctcatttgtgctcatttattttgatatttcaaaatgattaataattttctcaaattaaatgaagtgctagcagcacaagcaatataactataatcctcttttcaacctaatttctctatattatgagtagtgaatcaagtggaaaatttcagaatcatttcttaatcattggtatctgaaaatttcagctcayttattcaacatttattgaattgctacagcaatacaacatggataacaccaaaatgtgtaagtcacggtccttcgactgatgcaaagtagttcctggtagagaataaggacttagtaatgaaaagcttctttttattgagcaattattccagtcactcatctaaacaatttatatgtattatcgcatttaatcattagaaaaaaaccaattaggtgggtgctattaggttggcgcaaaataattgcggtttttaccattgaaagtaatggctattaggtaaggattataatattattatccctatgagcaaaccgaatgacaatgaagttatgtaaagcaattgccctgtgttattcagccaatttggaattcagatagaatccaaaacctgaagtctgagtaactgctgtagtgattgttctcgatattgtatactgatggagatttttttttaaatctactggttctatatataaaaacaacaacagtaagctaaggatatcttcactgggttttcttttggtgtcaaggaatgttcacagaactctcagaaacaaattcgaaaggattcgtgacaaatgtgagtctgttttggaaaaaacattgctaggcatttattgtaatta

SEQ ID NO: 702148 - DNA, 1536 bp, Homo sapiens
tatagctaaaatatactattacttgtttttaactttcctgagcagcctatagtttattctttgacacatttcttcaaggtcaccaatttactataagcattgatatttaatgtactacagatataaaaattataggtgtagaagattgagctagatatattgccatgaataactgccctaggaatgtcatttttagacttttttgaaaatattgcctttatacaagatgtggtacagaaaaaacgtcaattaactgagggctttattaaagatattatrgaactatgaatgtatataaaacctttaacaataaatttgataaatttttaagcactagatagttaaatttatcctagttataacttcatttacatttgtgctccaatattatttcaatttagaattactggaagaatttagtccagttgttgagagacttggatttgatgaaaattttgtggatctaacagaaatggttgagaagagactacagcagctgcaaagtgatgaactttctgcggtgactgtgtcgggtcatgtatacaataatcagtgtgagtgggttcttattcattctacctactaactaaaagtacatacatttcttaatgttcagtgagttcgctgtgtgattctgaaagattcatgacttttgttggaggtatagttatatttagtcagtaatctgtctaggacagctaaaattaggtgctgctattccataataagtgttaagattttgatgacatgtagctcaatgctctgtgcacttttcatttgcacagagcattgttcctgttcatctgcacagagcattcatctgtgcagagttttcgtctgacacagtgcattggttcccattttagaaagccatacccagctgggcacagtggagcgcccctgtagtcccagctgtttgggagactgagctgagaagattgcttgaacccaggagtttgagtccagcctaggcaacagagcaagatcccatctcttaaggaaacaaaaagccatacctctgtaggtcattcttaagttgtaagagttggcttcttaatatgctttttggaataattttttattattctaaaacaatctctaagcagagttttcaggtaggctagatttgcctttgatgtgtcttttacatgttcccttcgattcccctttgatgtgtgttttacatgttcacttcgattcccctgagaccctcatgttgctctctgaattcccaagttagcacttttggaatgttgtccagggctatctgccatgtgctagaatcttctccaagctcctatttaatctgttcaaataatctttgtcaaagttagcaagaaagcagaatggtttgtctccttcatatattgagatatgaatgactgatggtgtttccagtgatatttacatttgaaaataagctgcagtaagcaccagtgaatatctgattaggctttcggacatcttatgactctgctggtgactcccctatcataccacatacaagacaaggtactctgctgttgtgtaagactt

SEQ ID NO: 702149 - DNA, 596 bp, Homo sapiens
cattttatatattttttgaaaatccataaagataaagctaaatacctgagaaataatactgttagtcatttgagatgagcatatcttttaaaggtaagcagagacattgggggaaaaaaatgagataaaggaatgacaggattgcccaatacaaacaggagggctgtgttgtgtggagaggtgtagaggtgaggacacatttaatattggatctaaagaatactgtaattgtaataattgtcagattattgtgaggcttacatttctaggcatgctaatgttctttaagtagaggtcacaaactcagtgcctgcagggcccagacaggtaatgcaaatgtgacttgttgaggaatgttgcaacaggagaccctgaggccactactggacagccatttctaatcagtcacagcctattgttgccaaaccaagtccagtatttctagatctttcagtttttaagagaagctagaattctggattttataygaagactctagatttttaggtgctgacttaattcattaaaggcactaaaaaatgaacactcatctctgggttaggcttgatccacctgccatcaaattgcaatctttg

SEQ ID NO: 702150 - DNA, 642 bp, Homo sapiens
aggtatccacctgcaagctgaagagagaggccttggaagaaaccaactctgctaacaccttgatcttggactttcagcctccaaaaccgtgagaaaaatcctgttcaagccactcagtctgtgcagccctagcaaactaatacacctactcctacagcccaagaaagcacacaggctgagaagcacatgtccttatagtaggaagcatgagaatgcaaaggatgagtgaggtgctgccagggccgactagagcccccttgcaatgctyagagccactagggtcccatgttaagttcaggatatcctgataattggtttttcaagtggtgtcttcttgcagttatcgaaacttacagcaagaggatggtagaccaagcagcgttcaccacttctgcatttggtgctgagcgttagttgatatttatactctccctcctctgcctgtgttctagattcccctcagccacacccaacagttctgttctgctagtggagcttgcttgcttgcaagctgtgacctgcacccacgatgggtctgacttcgtgctgaccatgcctttgtgacatcatgattgtttccattgctcattttggctgacaccaggcagaaaattggcaagagatattcagtaaataaccaga

SEQ ID NO: 702151 - DNA, 539 bp, Homo sapiens
actctgtttttaatttttctatattcgttttttggtattgtatttttttttagtttaaaaatatttttgatctgtgatcggctgaatctgcagatgtggaacctgcagatacggagagtgactgtattagcattgacctgttttccactctatctgagttgaaaatgtcttccagacaccgctcccaggctgcctttcacatgcccctgggmagcctggagaggctcttcggtggacaaggttgagatggagatgctgtgttcacagctatcgacagaaagggaaatgagaggagagtggtttctgtgcctccactgggcccagactggagtctgaagtgagcagaaagccctgattccacttcagctgtcgaggcagtgttgcaaaatggttagagcccagaccctggggccagattgcctgggttggaatcctgtggctaccactgactttatatgtactcctgggcaagttgcttaatctctctgtgcctgaatttcctcatcgtaaattaagaataatgataagtcagtgtcatt

SEQ ID NO: 702152 - DNA, 539 bp, Homo sapiens
actctgtttttaatttttctatattcgttttttggtattgtatttttttttagtttaaaaatatttttgatctgtgatcggctgaatctgcagatgtggaacctgcagatacggagagtgactgtattagcattgacctgttttccactctatctgagttgaaaatgtcttccagacaccgctcccaggctgcctttcacatgcccctgggaagcctggagaggctcttcggtggacaaggttgagatggagatgctgtgttcacrgctatcgacagaaagggaaatgagaggagagtggtttctgtgcctccactgggcccagactggagtctgaagtgagcagaaagccctgattccacttcagctgtcgaggcagtgttgcaaaatggttagagcccagaccctggggccagattgcctgggttggaatcctgtggctaccactgactttatatgtactcctgggcaagttgcttaatctctctgtgcctgaatttcctcatcgtaaattaagaataatgataagtcagtgtcatt

SEQ ID NO: 702153 - DNA, 646 bp, Homo sapiens
atctcccaccaggttcctcccttgacatgtggggattacaatttgagatgagatttgggtggggacacagaaccaaaccatatcagtaactgaaggtgaggggaatctagaatggacagtagaagaggaagaaggcaaatgcasagtgggcgccactaacctctattgtcttgatcttccctcaggaagagaggcctgtgggaatcctggaggagctgctccttgaaagtatatggggaagtggatctaagtggccccgggggagaacacaggcatgttctcccagactccttccaggaagaactagctctgaggcagagtacagtcagcagagagcttccagctttcagctctgcctcagcggcagagtcagctcgaattcccaccattcctggggatgcctgcatttacctggttgctgagtgacactgatgggtatactcactccagagctctctgccaggtcggctgaggctttatggagcctatattgcagttcaagttcttcctccacccatcctacatcccccacactcctctccctaataaatatctgcactgcatattccatctcaacactgcttctgagactgctccccacccaatgtgaaaacacgtaaagggcttagcatggttcctgatacct

SEQ ID NO: 702154 - DNA, 789 bp, Homo sapiens
caccactcacttgggagagggtgtaaattaatggaaaggacacagcttttggagatggagagggtgggcttaaatcccacttcagccttatggtggttgttaaaccttggcaagtcacttactgtaagaataacaaccaccaccaccagctaccacttattaagtgtttatcatgtgccaggtgctttaccagagacaccacctcattattcttcacacgggggtaagtcacttgctcacgattttgctgcttgaagaagaagagatgggatttaaagtcaggttcccaacttaatctatgcttataactactatacctcttcactacataatttcccctaacttccctgagccttagtttcttcagatgtaaaatgcggctgataatgcctacctcttaagtttaagatgggagttaaagacgataacacatatcagaccccaacaaatagaaatctcgattgttagtcacttcagaaggcaaygtttcatattaacaattccaagttgcaatgccattgactctgggagtgggaggagactttacaggtcatcaactcccaacctccttcaaccctgatagtcaaaaagaaggcagttggtgtgggcctggcatggcttagctgacttcctggagagggaagcgcagaatgttccagaaagtgaagatgttcaaccaggacttgaggattgtattaggaaaacttatggtcaggtcccaaggcttctagcttttatattcccctgcaaaactcatcctggttagaggggatccatgctgcatttgca

SEQ ID NO: 702155 - DNA, 2345 bp, Homo sapiens
ggaataagaaaatgagaaggccagccacaaagcccagcttccagggcactctggagaagctgaacaaacaagctctgggaggaattggctctagggtgaaccaggattggggaggctgagagcagaacacatggcagtggcattagggcattagtggcattaggggcacagtcctgatgggtctgggctcctctccttgtgttttcctctctccatgtctgcccacttctcttctttgctctctgctctgacttctctctatctcatggtttcttcttgctcagaactttggcccacccatggcccctcatgctcccctccccagcctctctttacttcatgacttttagttcctctgttcactgctgatatgctttggctgtgtcccaaatctcatcttgaattgtggctctcaccactccgatgcatcatgagagggacctcgtgggagataattgaaacatgggggttgtttccccatactcttcttgtggtagtgaataagtctcatgagatctggtgattttataaggaaaaatcctttttgcttggctttcattctctcttgcctgccaccatgtaagacatgccttttgccttctgctatgattgtgagccctccccagccatgtggaactgtgagtcaattaaacctctttttctttataaattacccagtctcagttaagtctttatcagcagtgtgaaaatggactaatataactgctaactgccctattcttcccatattcttctaagtcattaaccctgggggaaaattatcatgccaggccaactccttgcccacttgccagwctatagattagattcttgggtcagatgcctatcactcagctgtagtcagttgaggggaacttacatgatctagagcatggctgctgtgggctgtggggaggacaggttttctgtgacatggacaaccactgttataaacaatctgtctggaacagtgaggacgggagcctgggtaagagcccttcccagggttcactcacttgcttccctgttctgctctttctcctgcagaccctctctagactcactgcaagggaaaggaagcaggaggatcaatgtggaggcagccgaacagaactgcagatctacacaaggtctgaatctctaaacctgcctcctttctcctctttttctttccacttgcctctgactagaagggactgcgtttacttaactgctttttttaaacaacaaaatcaacagtgctccagcaaatatttgatgagtagcttctatactgaagtctcactactcagcaacgaaatttcatctgaagccagtagaaaaccagagatgtgaaatatttatcacaaattatgttttactatttaccctcatatacatcatcttgattttattaacaccatagtaaagtcactaggaaagctattaccatcatactaattttgtggataaagaaactgaagttcagagaagcccagttgactggttagggtcacatagagagcaggaaggagctcagtactacagcttgggtggcagcacctccctcatggaactgtagcatgctttgtcctatgggataaaagtcacattatggctaggacatttccctgtgttgcttgtattgtcccacatgttgtttttgttgacattcttttttttgatcccagatccctaagaggtatcatctcttctttgataggtaccatgcctgaggtgctttcactcagtgctaaccacccagtctgggccatctactcagggagttatcttccttctcgtccacatgcttctcgggcctgctcttccctgtccatggtcctggactcagggtctgccactttgcctctctggggaatggccacggtttcctctccttagaaggcactcctcatcctgaggtctctgcttgcaaggagccccatttctaaactccaaggctactaagcttgcttggcctccaacttccaagcagcagtggtgcaggattctacttgaattttacaccagggacttaggtaggagccccctccctacaggtggtcagctgaatcatgggatttttttcatcttctgaactagaaggagaaacttgtgggttcagaacaagacaaaaatatgagccaagttctacgagagaagataggaaaggtgaagtctacaggaaactttaattgctttataggaacaggaagagaatgtaaaggaggaagctggcgctcagccttccttggagtgaggaaggtgggtggagaagttctctcttaatcagagcctggtgggaagccaggaaaactgtggctttagctgattgctgctttaatggtgactgggacagggagaac

SEQ ID NO: 702156 - DNA, 581 bp, Homo sapiens
ggctcctgtgggtaatgctgctgtgaacacgggtgtgcaggcagctcttcaagactctgctttccactcttttggtatacaccccgaagtgggattgctggatcgttggataattctacctttaattttttgaggagctgtcatactattttccatagcctctgcaccattttacaattctcaccaacagcacatagagytctgatttctccacatcctcaccaacacctgttattacctgtttttttttttttccatagtagccaccctcctccccctgcatttgccaataaagttttattgggacatactgggacacaaccacacccattcatgtacatattgcctatggctgctttcccgctatagtggcagagctgtgtcattgtacaagaccacttggcccacaaagcctaaaatatcgatcagcttgtcctctacagaataaatctgccagcccctgacacacacacacagattcctcagtagaattcctggatttgcagtggcttctaagatcccccagtgtaactgagagtcatgtgaagaaactgtgcttgattaaaccatgtcacattgtg

SEQ ID NO: 702157 - DNA, 581 bp, Homo sapiens
ggctcctgtgggtaatgctgctgtgaacacgggtgtgcaggcagctcttcaagactctgctttccactcttttggtatacaccccgaagtgggattgctggatcgttggataattctacctttaattttttgaggagctgtcatactattttccatagcctctgcaccattttacaattctcaccaacagcacatagagttctgatttctccacatcctcaccracacctgttattacctgtttttttttttttccatagtagccaccctcctccccctgcatttgccaataaagttttattgggacatactgggacacaaccacacccattcatgtacatattgcctatggctgctttcccgctatagtggcagagctgtgtcattgtacaagaccacttggcccacaaagcctaaaatatcgatcagcttgtcctctacagaataaatctgccagcccctgacacacacacacagattcctcagtagaattcctggatttgcagtggcttctaagatcccccagtgtaactgagagtcatgtgaagaaactgtgcttgattaaaccatgtcacattgtg

SEQ ID NO: 702158 - DNA, 1377 bp, Homo sapiens
tgcagtctccagtaattttccatctctgagatgctcatcacccgctggggccctggagaaactgtctctggcagcccccgacttgctggcgggtctaaagagaattattggttccgagatgggaaaaagcaagccagaccaaaaataaagatgctttgggaggcgcacacaaatcatctgtgaagaatttcaagtcttttgagggaraaattaatgtataaaggaaaaaaaagatgtccagccaccagaagttgctttctccctccatctccagccacatttgcatagaaagtaagctccccagtaatgctttaagaggaatacagattaacatgggatttgcatactttttgtgcattccatttccagagatgtttaaatgaattgcttgattaagccttagtcaatttattttttaatttattagaattttgttaagtcactaaatgttttcaaggtggagaagaacatctaaacttggaatggaatagagactgttggaggcatctcatctgtccatccctagcccgtcagcctcccttgcagaaggaaatttattttatttatttatgctttaaaagttgcatttcaggttcagggatacatgtgcagatttgttatgtaggtaaattgcgtgtcgcgggggtttggggaacagattgttttgtcatcggggtaatagcatggtacccgataggtagagtttagctcctcaccctcctcctgccctccacctacaagtaggccccattgctgttattctgtaggtatcttgaaactatgtatgaccacacttgatctcttgatggctggcccggagtgcagcagagtgaactggctgtgtaccaattacagggttccctgcatgaatttcaatccactctctgacatcgtgaccttcacagtaactcacttccctatgcctcagtttcctccttcatataacatgacagaatgcactcaccttgcaagctgttgtgaggaacgagtgggaagatccaggtaaaagggctaaacagaagcatccaccttgtgcgaggcactgtgctgacctcatctttattccacttaacatccctcacccacccataatggaggagactggaggcgggaggacatgggctatggatccctgtaaccccaaaggctggcacacaggaggccctcaatgaactcggtgaggtcgaagtgtgcaggcaccacataggttctcacctacagtgactcagaaccttggcattgaggtcacatttaacctgagtctcggctgggcgtggtggctcaggcctataatcccagcaccttgggaggctgaggcaggcagatcacctgatgtcagaagttcaagaccagcctggccaacatagtgaaactcca

SEQ ID NO: 702159 - DNA, 1377 bp, Homo sapiens
tgcagtctccagtaattttccatctctgagatgctcatcacccgctggggccctggagaaactgtctctggcagcccccgacttgctggcgggtctaaagagaattattggttccgagatgggaaaaagcaagccagaccaaaaataaagatgctttgggaggcgcacacaaatcatctgtgaagaatttcaagtcttttgagggaaaaattaatgtataaaggaaaaaaaagatgtccagccaccagaagttgctttctccctccatctccagccacatttgcatagaaagtaagctccccagtaatgctttaagaggaatacagattaacatgggatttgcatactttttgtgcattccatttccagagatgtttaaatgaattgcttgattaagccttagtcaatttattttttaatttattagaattttgttaagtcactaaatgttttcaaggtggagaagaacatctaaacttggaatggaatagagactgttggaggcatctcatctgtccatccctagcccgtcagcctcccttgcagaaggaaatttattttatttatttatgctttaaaagttgcatttcaggttcagggatacatgtgcagatttgttatgtaggtaaattgcgtgtcgcgggggtttggggaacagattgttttgtcatcggggtaatagcatggtacccgataggtagagtttagctcctcaccctcctcctgccctccacctacaagtaggccccattgctgttattctgtaggtatcttgaaactatgtatgaccacacttgatctcttgatggctggcccggagtgcagcagagtgaactggctgtgtaccaattacagggttccctgcatgaatttcaatccactctctgacatcgtgaccttcacagtaactcacttccctatgcctcagtttcctccttcatataacatgacagaatgcactcaccttgcaagctrttgtgaggaacgagtgggaagatccaggtaaaagggctaaacagaagcatccaccttgtgcgaggcactgtgctgacctcatctttattccacttaacatccctcacccacccataatggaggagactggaggcgggaggacatgggctatggatccctgtaaccccaaaggctggcacacaggaggccctcaatgaactcggtgaggtcgaagtgtgcaggcaccacataggttctcacctacagtgactcagaaccttggcattgaggtcacatttaacctgagtctcggctgggcgtggtggctcaggcctataatcccagcaccttgggaggctgaggcaggcagatcacctgatgtcagaagttcaagaccagcctggccaacatagtgaaactcca

SEQ ID NO: 702160 - DNA, 1377 bp, Homo sapiens
tgcagtctccagtaattttccatctctgagatgctcatcacccgctggggccctggagaaactgtctctggcagcccccgacttgctggcgggtctaaagagaattattggttccgagatgggaaaaagcaagccagaccaaaaataaagatgctttgggaggcgcacacaaatcatctgtgaagaatttcaagtcttttgagggaaaaattaatgtataaaggaaaaaaaagatgtccagccaccagaagttgctttctccctccatctccagccacatttgcatagaaagtaagctccccagtaatgctttaagaggaatacagattaacatgggatttgcatactttttgtgcattccatttccagagatgtttaaatgaattgcttgattaagccttagtcaatttattttttaatttattagaattttgttaagtcactaaatgttttcaaggtggagaagaacatctaaacttggaatggaatagagactgttggaggcatctcatctgtccatccctagcccgtcagcctcccttgcagaaggaaatttattttatttatttatgctttaaaagttgcatttcaggttcagggatacatgtgcagatttgttatgtaggtaaattgcgtgtcgcgggggtttggggaacagattgttttgtcatcggggtaatagcatggtacccgataggtagagtttagctcctcaccctcctcctgccctccacctacaagtaggccccattgctgttattctgtaggtatcttgaaactatgtatgaccacacttgatctcttgatggctggcccggagtgcagcagagtgaactggctgtgtaccaattacagggttccctgcatgaatttcaatccactctctgacatcgtgaccttcacagtaactcacttccctatgcctcagtttcctccttcatataacatgacagaatgcactcaccttgcaagctgttgtgaggaacgagtgggaagatccaggtaaaagggctaaamagaagcatccaccttgtgcgaggcactgtgctgacctcatctttattccacttaacatccctcacccacccataatggaggagactggaggcgggaggacatgggctatggatccctgtaaccccaaaggctggcacacaggaggccctcaatgaactcggtgaggtcgaagtgtgcaggcaccacataggttctcacctacagtgactcagaaccttggcattgaggtcacatttaacctgagtctcggctgggcgtggtggctcaggcctataatcccagcaccttgggaggctgaggcaggcagatcacctgatgtcagaagttcaagaccagcctggccaacatagtgaaactcca

SEQ ID NO: 702161 - DNA, 1093 bp, Homo sapiens
gcttttaatataactttcagttgatcctaaaattataactgattttcttatgagttttgtttggagcttgtaaagaaatctatgtaytgcagtatttttttcttccattaaaagatacaggagagggcgaggttgggcacggttgctcactcctgtaataccagcactttgggaggccgaggcaggcagaacacgaggtcaggagatcgagactctcctggaaaacatggtgaaaccctgtctctactgaaaatacaaaaattagctgggtgtggtggcacgtgcctgtaattccagcttcttgggaggccgaggcaggagaatcgcttgaaccagggagttggaggttgcagtgagctgagatcatgctactgcactccagtctggcgacagagagagattccgtctcaaaaaaaaaaaaaaaaaaaaaaaaggatataggggagggcgagacagattactccttatcccagggcctggatagacatagatggagactccaagaatccagggttgaagagtcttttaagggagaggttgaaatatgggaactttttccagatactgactgacaagtagtatcatcaatgacataaaccatcagcaacgaggctcagcagaggaaaacagacggctccttgaatttatcaagctgttgtagtggtaggcatttcctaagtgatactgggctggctgaaagaactcagcctcatttcaaatgtgcataatatactccagactcaagggatgcagccctttatctcctataagattttacaaatccgtggagtcaaaggaaaaagagtctaacgttcaaatggcagaagaatttttaatcaagtagaaccttcctattgaggaggtcaccatccgaccccaacagctcatataagggcaagaggcatagcctttgggagaagcgctggcccaagcagcactgagggattcccactcggtgggtgcgaatcctggccaaggggatggtcacattccagctgataaaagaacctgtcctggattacagtgaacacagcaggaccctcatgggaatcactgcggatccctgagccctcagagaaccaaggttctgaga

SEQ ID NO: 702162 - DNA, 1613 bp, Homo sapiens
gaaatccattttttatagttaattggagctaactttcctatctaatggcagaggtatgcacataagattgaatcagagaggtccatcccacaggttatatgatcgggtcaatgctgggcacacgaccgaagccaggggagtcagtgtcttccttggaactcgatgcctgagccagctggatcagggtccagggctcccgtgtccttcagggctctcctctgcccccagctttgccatggaggcagggattggccctcctttccctcctcccaaggttgtcttcctcttgtatttaccacacttgcttttgcctcctgagaggccccagggctcctacctgtgggcagggatgctgcctcgggccagcgcatagcagatgtgttccaagaacgaatgagtgaaaagccatttggggaaagcacatcatgtctccaatgcccttcccggaggaagtcaactgtggttctgcaaacacagcagcctgggtaaatgaacgctgtctgctggtttatcttttctatgactctggatttccacttattcattgacatcaaatgaagtattactgtgggatcttatgtaaggtcataaaaagacagacgttttacttcctggaaaggtaaattgttattccctcaaagttaaggaagaaaacttataagcagggaaaccaaagggggctgagtgctgaccttgggagcagatgcagctccagcactgaaagaaaacatcattaaaggaaagaggctcaaaggcacggagcccgcaggcaactctctgcgcgccctgcctgtccagaacctgctgatcccggtcaggatagcggaggaggggccaacagagtgcttcccgtggcttttgtgcgttagctgccatctggcatttatcttagagacagagtggtcaataatttaaaaagtgcaaatgacttctatccacttgtaagatgttacaaaggcagagatttggttcaaagttgctgcattaaaaaatgtctgtcttcatgaagacaagcgatttcacatctcttagaaagaatgacaatggttttcttatcactaccatattacatcaatgtagagcctttgagtccttaataatggaacacttatgtattttgccattatcaaaagataaaatttagcctttcagagggaattttgacaccatactatattttataatgatgtagaaagtgatggattttaattaccagttttatcttcagagtgctataacttatatttgtaattgtagtttggaagttcccaatgtcattatrttttttttgaaagagaaatgatggcatcttgaattaagcccacaatttactcaatctaatcttacttaaaatgactccacgatgcaaatgtacttccccagttcagtcaaatcagctcctccttccctgtgtcactgatttccctaacccctgccactaacatccacagacaaaggcatttttacagacaactggagactgtattgtccttcccatctctcttcttcagacagacctttgtattcatcagaaaatgaagtccaaatgaacaaatttgatcatttctttctcacttgatgggacaaaagggagactttcctgacttctaaac

SEQ ID NO: 702163 - DNA, 1613 bp, Homo sapiens
gaaatccattttttatagttaattggagctaactttcctatctaatggcagaggtatgcacataagattgaatcagagaggtccatcccacaggttatatgatcgggtcaatgctgggcacacgaccgaagccaggggagtcagtgtcttccttggaactcgatgcctgagccagctggatcagggtccagggctcccgtgtccttcagggctctcctctgcccccagctttgccatggaggcagggattggccctcctttccctcctcccaaggttgtcttcctcttgtatttaccacacttgcttttgcctcctgagaggccccagggctcctacctgtgggcagggatgctgcctcgggccagcgcatagcagatgtgttccaagaacgaatgagtgaaaagccatttggggaaagcacatcatgtctccaatgcccttcccggaggaagtcaactgtggttctgcaaacacagcagcctgggtaaatgaacgctgtctgctggtttatcttttctatgactctggatttccacttattcattgacatcaaatgaagtattactgtgggatcttatgtaaggtcataaaaagacagacgttttacttcctggaaaggtaaattgttattccctcaaagttaaggaagaaaacttataagcagggaaaccaaagggggctgagtgctgaccttgggagcagatgcagctccagcactgaaagaaaacatcattaaaggaaagaggctcaaaggcacggagcccgcaggcaactctctgcgcgccctgcctgtccagaacctgctgatcccggtcaggatagcggaggaggggccaacagagtgcttcccgtggcttttgtgcgttagctgccatctggcatttatcttagagacagagtggtcaataatttaaaaagtgcaaatgacttctatccacttgtaagatgttacaaaggcagagatttggttcaaagttgctgcattaaaaaatgtctgtcttcatgaagacaagcgatttcacatctcttagaaagaatgacaatggttttcttatcactaccatattacatcaatgtagagcctttgagtccttaataatggaacacttatgtattttgccattatcaaaagataaaatttagcctttcagagggaattttgacaccatactatattttataatgatgtagaaagtgatggattttaattaccagttttatcttcagagtgctataacttatatttgtaattgtagtttggaagttcccaatgtcattatgttttttttgaaagagaaatgatggcatcttgaattaagcccacartttactcaatctaatcttacttaaaatgactccacgatgcaaatgtacttccccagttcagtcaaatcagctcctccttccctgtgtcactgatttccctaacccctgccactaacatccacagacaaaggcatttttacagacaactggagactgtattgtccttcccatctctcttcttcagacagacctttgtattcatcagaaaatgaagtccaaatgaacaaatttgatcatttctttctcacttgatgggacaaaagggagactttcctgacttctaaac

SEQ ID NO: 702164 - DNA, 1613 bp, Homo sapiens
gaaatccattttttatagttaattggagctaactttcctatctaatggcagaggtatgcacataagattgaatcagagaggtccatcccacaggttatatgatcgggtcaatgctgggcacacgaccgaagccaggggagtcagtgtcttccttggaactcgatgcctgagccagctggatcagggtccagggctcccgtgtccttcagggctctcctctgcccccagctttgccatggaggcagggattggccctcctttccctcctcccaaggttgtcttcctcttgtatttaccacacttgcttttgcctcctgagaggccccagggctcctacctgtgggcagggatgctgcctcgggccagcgcatagcagatgtgttccaagaacgaatgagtgaaaagccatttggggaaagcacatcatgtctccaatgcccttcccggaggaagtcaactgtggttctgcaaacacagcagcctgggtaaatgaacgctgtctgctggtttatcttttctatgactctggatttccacttattcattgacatcaaatgaagtattactgtgggatcttatgtaaggtcataaaaagacagacgttttacttcctggaaaggtaaattgttattccctcaaagttaaggaagaaaacttataagcagggaaaccaaagggggctgagtgctgaccttgggagcagatgcagctccagcactgaaagaaaacatcattaaaggaaagaggctcaaaggcacggagcccgcaggcaactctctgcgcgccctgcctgtccagaacctgctgatcccggtcaggatagcggaggaggggccaacagagtgcttcccgtggcttttgtgcgttagctgccatctggcatttatcttagagacagagtggtcaataatttaaaaagtgcaaatgacttctatccacttgtaagatgttacaaaggcagagatttggttcaaagttgctgcattaaaaaatgtctgtcttcatgaagacaagcgatttcacatctcttagaaagaatgacaatggttttcttatcactaccatattacatcaatgtagagcctttgagtccttaataatggaacacttatgtattttgccattatcaaaagataaaatttagcctttcagagggaattttgacaccatactatattttataatgatgtagaaagtgatggattttaattaccagttttatcttcagagtgctataacttatatttgtaattgtagtttggaagttcccaatgtcattatgttttttttgaaagagaaatgatggcatcttgaattaagcccacaatttactcaatctaatcttacttaaaatgactccacgatgcaaatgtacttccccagttcagtcaaatcagctcctccttccctgtgtcactgatttccctaacccctgccactaacatccacagacaaaggcatttttacagacaactggagactgtattgtccttcccatctctcttcttcagacrgacctttgtattcatcagaaaatgaagtccaaatgaacaaatttgatcatttctttctcacttgatgggacaaaagggagactttcctgacttctaaac

SEQ ID NO: 702165 - DNA, 1168 bp, Homo sapiens
gttctttccactttctaccaccaggaagaagaggattttgtattattaaaagccatggtacccaggagtgcttttacagattactttagctatggtgtatttgttgccattttaaaaattccatgggactaattggaactcaaactgagctggtaactttatgaacataatattgtaccttttcaatcttggggcagaagtcctaaatgaagtcttgagactgccttgagtgaagtcttctggttgactaaatccttcaacaaaactctgtcagaatagctaaatagtatgtaaaaagcacatagatattaagctaggtaacataaatgggtaaatggttactcttgcccaggctggagtgcagtggtgtgatctcagctcactgaacctccgcctcaggagttcaagcgattctcctgcctcagcctcccgagtagctgggactacaggcgtgcgccaccacgcctggctaatttttgtatttttagtggagacgaggtttcgccatgttggccaggctggtctctaattcctgatatcaagtgatccacccgcctcagcctcccaaagtgctgggattacagacatgagccaccatgcccggccattattttatgattttagcttgtgaatctttcttagtctgccaaggtagaaagtattcaaagaaaacaaaaaagcccccaagtttctttctttccttagagttgaggggagggggataaaatttcaggagagaaaatccaggggtgtagcagaagagtggaagcatgaggcaggtgctggctggcggaggcataccttccacttgcggcagcagcggaagttgcagggggagaggtcatgacatggtgctgtccagggccccccattagcctccccagaactgragaaatgtgcagataagtgaaattaagaactactcattcaagcacattgtttagaactttccaaatgctataaaaacttaggggactatatgtgattagtatctcttttaggatgagttattttggtgaaaatacagacttgtagttattgataccagttaaatccctggcagtgagttttgttaagaaactaggcctgggcaggggatgtataaggagactgatctactgcagagatcgccatctgccagaactgctttttctccttcagtcccttt

SEQ ID NO: 702166 - DNA, 1148 bp, Homo sapiens
tgagatatcaaaataatggcagtaagtcaggttgtaaagacttcaaagaatgagggaaagtgactaaacattgggagagtgatcaatataatcaaatggtatgagattccaagctggaggggtttgaggagaaggaagtagaagtattctgcaagaggacacttattctacttctagaggcagtggttagagcgctgagggtgagaactagtctgcacttggggggctacatgagaagcagcagcatcagtgagagacagatgacagtaagaatgaaaatgtaaagggaaaattgagaaattataaaaatggagattcttctgtgtactgtgtacatttcttacagaagctttcaacacatttaatttcatttgaatcttgcaatactcttgagagatattatcattccccttttaccaaaaaaaggctgactggccaagatcacataaaatcacataaataatagaagtcaaaagtatgactttaacccatctagtgttacaagaaccacataatcttcaataaattgagagtatcttaactaattaattaaattttaaaaattaataattttttaaaaagatgtattcaagttataaattcaaagagaaatgaacatattacttagaaacagccccggattagagtcccaattatatcacttaataactgtgtggtttaggtaagccatgtaaagttgctgtactacttaaatttaaaataaagacaattttacctaagcataaaattgttgttatgttattgtgcagttataaatcacttattaaattataaatttatgataattattaaagagaatacttaattttaagccataaggtcttctattagaaaaatattcaaatataatgtgatatatcactcatttttataaataaaaatataaaattaattatagccttaataaaaaattttggaagtgcattaccaagactaaatttatatttcataaaatgaataaatttaagatgtataccttaactttatgtatttctgcactcatattcacaccagccatgttaagrtaaggaacagtttcactaccacagaaaatgttctggtgctttattccagtcagtaacaaccactggtcaaatttgtctggaatcatacagattttacacttt

SEQ ID NO: 702167 - DNA, 863 bp, Homo sapiens
tattgaaatcccattggggttttaatttttcattccctaatggctaatgatgttgacatcttttcatgctctgattttccaaacatatattcttttcagtgaaatgtatattcatgtcttttgcccactttctaatttgactttgttcactcctaagttttgaaagttctttatatattcttgctactagtctttttcagacacatggcaagcaaaaggggaaggaagcagctcttttttactgtcaagttgaggtgaaggtcaaggttccccattaggccttctttgccacacaaaaagtaaatactcttgtgtttttaaggtaaagtaatgaatgccaagaaagactcaaattttatttatgtactgatcataaaaatgaactatgatttataattcttctcttccattttcattatacataaattaagaaaacaaaatacatcatgctcaataayaaggattctgagtagaaactcaccagttcaccttagctatattttcccttttgggtttcttttcttttacttttttctctctctctcctttttctttaaaaattttggagtgtaaacatatacatcatcttaatttgagtccttatgtgttgacggtgtgcagggaagaatgggaaagtaactgttaagtggagctcagaaagagctaacaaattcttgaaaaagtgagattattgctggtctttcaatttttttttttaactttctgtttcctcacactcttccgtactaaatgaattttatatatatatatttttttggttgttgttgttgttgttgttgttgttgttgttttgtgatacacagttttgctattgttgcccaggctggcatgatcttggctca

SEQ ID NO: 702168 - DNA, 1216 bp, Homo sapiens
gagcgtgacacatctcacacatgcacgtgaacacccaattaccacgcctatgaactacaaaagcatctaagcagattttaaattagccagttgtttccctaggatcctccaaaggtgatcaatacagtttgtttttttcttggtggagggatctcatgatgaactaatgaatcttaacatgaattgtaagcaaataaataaaatggtatggtttaagccattaagttttgggatatctgttacatggcaatagatgactgcaatagtcctcttccatttaacaagaaaactttgtagatagaaatgttaaagctgggtgcaatggctcacacctataatcccagcactttgggaggccaaggcatgagaatcacctgaggttaggagttcgagaccagcctggccaaagtggtgaaatcccatctctttttttcttttttttttttttttttttcctttttctggagaatggggtctcactatattgcccaggcaggtctcgaactcctgggctcaagctatcctcctgcctcttgcctccctgagagctgggatcacaggcgtaagccaccgcgcccggcgtgaaatcccatctctactaaaaatacaaaaattagctgggcatggtgggatgtgcctgtaatcccagctactcaggaggctgaggcaggagaattagcttgaacctgggaggcagaggttgcagtgagccgagattgtgccgctgcactcccgcctgggcgacagagtgagactctgtctcaaaaaaagaaaagaaagaaagaaaaagaaaagaagtgttaaagcaattttcatgatcaatcttgtcttttctgttgcatctgtgaactgacattctaaccttgatgggcaggtggcattgccacgcattttagaagttgccgccgattttgtgcccatccacatggagcagggtgccttcagtctgacatgttccccacrtgtcccttctggcattgttgcttcaggaaccaggcactgcatttgtcccacaagaatcagcccccagatttccatccagattatctgatttcttccattggttttaattcatgggtggcccatttacttcaaatctaatgtctgaaaggctctttatttcttttttctagagacaagaagcaaagctggtcagtatgtttcactcacacagaagccatgtctaatctgtaggtggataattttgacattgcca

SEQ ID NO: 702169 - DNA, 1386 bp, Homo sapiens
acagtttgaaaaacactggcttcagccattatatccaggagatctggttaaaagttgccaggaagaggcgacctgttaacccatgagcacctaccggcatagataacattatgggaggtttggatttggaagcaatcctgactttgaacctgagttccagcacttcttagcagtgtggcccctatcgggttacttagcttccttccctaaaatgggactcacaagagtcccctcctcagaaatgggaatgagccagtgggagtatacagagccctgagtggctcaaagccactcaaagccctgggtggctgtaagtttgccaaatccataggcaggttcttccagggcccactaacctactcccccaccccagttgctgccacacccagctccagcaagcccagagtaaggtcaaggagtcatcatttccacctttcactgagcacttgctaggtgtcacaggccacgtattgcccattaaaaccagtgtagggccaggcacgctggctcacgcctataatcccaacactttgggaggtcaagggaggaggatcacttgaggtcaggagttcaagaacagcctggccaacatggcaaaaccccatctctactaaaaatataaaaattagccggggatggtggtgggtgcctgtaatcccagctacttgggaagctgaggcaggaaaattgcttgaaccagggaggtggaggttgcagtgagctgagatcacgccaatgtattccagcctgggcaacagagcgagactccatctcaaaaaacaaaaacaaaacaaaaaacagtgtaggccgggtgcagtgacctgtaaccccagcactttgggaggccaaggtgggaggatggcttgagcccaggagttcaaggctgcagtgagcgatgattgcaccactacattccatcctgggcaacagagcaagacccctgtctcttactaaaaacaaccaaaaaaccaatgttgtaagatgagtataaaactcattgaatagaagcagaaacaggggcttacagaagtgatatgacttgcccagggtccctcagctggcaggcccagtgtgatcccagatctctctcctcaaagcatgacctggctgaaggctatayctcgagcctacctaggattctcccatgtgggcatcagatgaggccctccaggaagcccagcactggggcactgcagaacccagcactttgtctagggcaagagccagtgaccacacagccctctctgatctgtggcttctgccagaccactgtctccaggctgggtacccctgcaggctattcaccagcacctgggatggcaggaagggaagaaggagttgggcctggagccagctgccaggcaggagtaggtggtatgtgttcgc

SEQ ID NO: 702170 - DNA, 648 bp, Homo sapiens
tacaggcgtgagccaccgcgcccggcctccttttccttttttaactaatggaataaacggcaatgtgccaagcatacagcaatgcccattcccggccttcagaaagcctcgggcgcaggcgcagctcgcgttcaagcgctctctcgctggcgcgtgacaacagttggttccaccctacgcccaacattgtctccctgcgcacgcgcggccgtactccgcccgccttactccaccctcccccactcccgcgagcacgtgcgcgtcctcgcggctcacatttcggcggagggcgcgctccctggaaaattccactcctgtgctagctccaccctatgcggcttttctcctacccgacgctcttcactctcagctcccttcccggcggcctttgcgggaacaagatggcagcccycatacctcaagggttctcttgtttatcgagggttttgggctggtggtctcggcaggtgggtagggacggggccgataggaccctaggggctacaggaggaggacagagtcgagggaaatactctctgtgcaattgtccttggtgagctgggacaatacgagtcatacctaggccggggaagaggcttaggtggacaggacctagctgcggagctcagtggtcgaatggggatagcc

SEQ ID NO: 702171 - DNA, 1523 bp, Homo sapiens
gtccccccagaaaaggccaggtgtggtagctcatgcctgtaatcccagcactttgggaggctgaggtgggaggattgcttgagcccaggagtttgagaccagtttaggcaacaaagtgaaaccctgtctctacaaaaggcaatacagtgaaaccttgtctctacaaaaagtgcaaaaatwagctgggcatggtgccacacacctgtaattgcagctactcaggaggcagagacaggaggattgcttgagcccagaggtaaagactgtaatgaaccatgattgtgccattgcactccagtttaagtgacagagtgagactctgtcttaaaaaaaaaattattttgatattaagtgataagtggctatttgcctagtagcttcctaaaataaactagcataaaatgaaacttattttccaacctatccctaagcccttggaatttcagttctaataactagaatagttacataaaaccagtaaaaagttgtttaataagaatgtacacatttcccctactaaaatttattgcttgtttcaaaataaaatcataaagttatctcaaaaccaagcaaaaaaattatttggtacaaagtagcaaacttgctgcattagaagaaaaggccatttcttcacatatttgaatacaggcaccaacacataattccacatgaaattatatttctttttttttttttgagatggagtttcgctcttgttgcccaggctggagtgcagtggcgtgatctcggctcactgcaacctctgcctcccaggttcaagtgattcttctgcctcaacctccagagtagctaggattacaggcgcacaccaccacgcccagctaattttctattttttttagtggagatggggtttcgcaacattggtcagggtggtctcaaacacgtgacctcaagtgatccacctgcctcagcctcccaaagtgctgggattaccggcgtgagccaccgtgcccggcctgaaattatatttcaaagaatttttttcacctgtaaaattttaaacatccaaaataaaaggaaaagatttattttcaagggttgactttctgtagaaactctctgagacacgtaatagttgataaatgtcttacattcttatttatatgacgtatggactcaatctacattcaaatcaggttctgctctttggcagcctaaaatgtcagggaatctagctggctccagaatatccagttatttaattgcagaggtacatctagttcacttattaaatcctgtgctcccaagctctaacacagttggcattcataaatagtatttacttagagtaagagtgaaaaatcaggactgaaggacagagatcattactgcaaacattataaggatttcaacagaacagctggaattttaatacagctttattctgcagtcactctgcagtttgtttacttttatttcattaaatttcaacttaacattttaggcaatgaaaaaactgactcctaaaaacatttctctctaattaaagatcagtttgt

SEQ ID NO: 702172 - DNA, 1523 bp, Homo sapiens
gtccccccagaaaaggccaggtgtggtagctcatgcctgtaatcccagcactttgggaggctgaggtgggaggattgcttgagcccaggagtttgagaccagtttaggcaacaaagtgaaaccctgtctctacaaaaggcaatacagtgaaaccttgtctctacaaaaagtgcaaaaattagctgggcatggtgccacacacctgtaattgcagctactcaggaggcagagacaggaggattgcttgagcccagaggtmaagactgtaatgaaccatgattgtgccattgcactccagtttaagtgacagagtgagactctgtcttaaaaaaaaaattattttgatattaagtgataagtggctatttgcctagtagcttcctaaaataaactagcataaaatgaaacttattttccaacctatccctaagcccttggaatttcagttctaataactagaatagttacataaaaccagtaaaaagttgtttaataagaatgtacacatttcccctactaaaatttattgcttgtttcaaaataaaatcataaagttatctcaaaaccaagcaaaaaaattatttggtacaaagtagcaaacttgctgcattagaagaaaaggccatttcttcacatatttgaatacaggcaccaacacataattccacatgaaattatatttctttttttttttttgagatggagtttcgctcttgttgcccaggctggagtgcagtggcgtgatctcggctcactgcaacctctgcctcccaggttcaagtgattcttctgcctcaacctccagagtagctaggattacaggcgcacaccaccacgcccagctaattttctattttttttagtggagatggggtttcgcaacattggtcagggtggtctcaaacacgtgacctcaagtgatccacctgcctcagcctcccaaagtgctgggattaccggcgtgagccaccgtgcccggcctgaaattatatttcaaagaatttttttcacctgtaaaattttaaacatccaaaataaaaggaaaagatttattttcaagggttgactttctgtagaaactctctgagacacgtaatagttgataaatgtcttacattcttatttatatgacgtatggactcaatctacattcaaatcaggttctgctctttggcagcctaaaatgtcagggaatctagctggctccagaatatccagttatttaattgcagaggtacatctagttcacttattaaatcctgtgctcccaagctctaacacagttggcattcataaatagtatttacttagagtaagagtgaaaaatcaggactgaaggacagagatcattactgcaaacattataaggatttcaacagaacagctggaattttaatacagctttattctgcagtcactctgcagtttgtttacttttatttcattaaatttcaacttaacattttaggcaatgaaaaaactgactcctaaaaacatttctctctaattaaagatcagtttgt

SEQ ID NO: 702173 - DNA, 1523 bp, Homo sapiens
gtccccccagaaaaggccaggtgtggtagctcatgcctgtaatcccagcactttgggaggctgaggtgggaggattgcttgagcccaggagtttgagaccagtttaggcaacaaagtgaaaccctgtctctacaaaaggcaatacagtgaaaccttgtctctacaaaaagtgcaaaaattagctgggcatggtgccacacacctgtaattgcagctactcaggaggcagagacaggaggattgcttgagcccagaggtaaagactgtaatgaaccatgattgtgccattgcactccagtttaastgacagagtgagactctgtcttaaaaaaaaaattattttgatattaagtgataagtggctatttgcctagtagcttcctaaaataaactagcataaaatgaaacttattttccaacctatccctaagcccttggaatttcagttctaataactagaatagttacataaaaccagtaaaaagttgtttaataagaatgtacacatttcccctactaaaatttattgcttgtttcaaaataaaatcataaagttatctcaaaaccaagcaaaaaaattatttggtacaaagtagcaaacttgctgcattagaagaaaaggccatttcttcacatatttgaatacaggcaccaacacataattccacatgaaattatatttctttttttttttttgagatggagtttcgctcttgttgcccaggctggagtgcagtggcgtgatctcggctcactgcaacctctgcctcccaggttcaagtgattcttctgcctcaacctccagagtagctaggattacaggcgcacaccaccacgcccagctaattttctattttttttagtggagatggggtttcgcaacattggtcagggtggtctcaaacacgtgacctcaagtgatccacctgcctcagcctcccaaagtgctgggattaccggcgtgagccaccgtgcccggcctgaaattatatttcaaagaatttttttcacctgtaaaattttaaacatccaaaataaaaggaaaagatttattttcaagggttgactttctgtagaaactctctgagacacgtaatagttgataaatgtcttacattcttatttatatgacgtatggactcaatctacattcaaatcaggttctgctctttggcagcctaaaatgtcagggaatctagctggctccagaatatccagttatttaattgcagaggtacatctagttcacttattaaatcctgtgctcccaagctctaacacagttggcattcataaatagtatttacttagagtaagagtgaaaaatcaggactgaaggacagagatcattactgcaaacattataaggatttcaacagaacagctggaattttaatacagctttattctgcagtcactctgcagtttgtttacttttatttcattaaatttcaacttaacattttaggcaatgaaaaaactgactcctaaaaacatttctctctaattaaagatcagtttgt

SEQ ID NO: 702174 - DNA, 1523 bp, Homo sapiens
gtccccccagaaaaggccaggtgtggtagctcatgcctgtaatcccagcactttgggaggctgaggtgggaggattgcttgagcccaggagtttgagaccagtttaggcaacaaagtgaaaccctgtctctacaaaaggcaatacagtgaaaccttgtctctacaaaaagtgcaaaaattagctgggcatggtgccacacacctgtaattgcagctactcaggaggcagagacaggaggattgcttgagcccagaggtaaagactgtaatgaaccatgattgtgccattgcactccagtttaagtgacagagtgagactctgtcttaaaaaaaaaattattttgatattaagtgataagtggctatttgcctagtagcttcctaaaataaactagcataaaatgaaacttattttccaacctatccctaagcccttggaatttcagttctaataactagaatagttacataaaaccagtaaaaagttgtttaataagaatgtacacatttcccctactaaaatttattgcttgtttcaaaataaaatcataaagttatctcaaarccaagcaaaaaaattatttggtacaaagtagcaaacttgctgcattagaagaaaaggccatttcttcacatatttgaatacaggcaccaacacataattccacatgaaattatatttctttttttttttttgagatggagtttcgctcttgttgcccaggctggagtgcagtggcgtgatctcggctcactgcaacctctgcctcccaggttcaagtgattcttctgcctcaacctccagagtagctaggattacaggcgcacaccaccacgcccagctaattttctattttttttagtggagatggggtttcgcaacattggtcagggtggtctcaaacacgtgacctcaagtgatccacctgcctcagcctcccaaagtgctgggattaccggcgtgagccaccgtgcccggcctgaaattatatttcaaagaatttttttcacctgtaaaattttaaacatccaaaataaaaggaaaagatttattttcaagggttgactttctgtagaaactctctgagacacgtaatagttgataaatgtcttacattcttatttatatgacgtatggactcaatctacattcaaatcaggttctgctctttggcagcctaaaatgtcagggaatctagctggctccagaatatccagttatttaattgcagaggtacatctagttcacttattaaatcctgtgctcccaagctctaacacagttggcattcataaatagtatttacttagagtaagagtgaaaaatcaggactgaaggacagagatcattactgcaaacattataaggatttcaacagaacagctggaattttaatacagctttattctgcagtcactctgcagtttgtttacttttatttcattaaatttcaacttaacattttaggcaatgaaaaaactgactcctaaaaacatttctctctaattaaagatcagtttgt

SEQ ID NO: 702175 - DNA, 1480 bp, Homo sapiens
gggcaaaagagctattacttggtagtaaattataatctgaattttataaattctgatttataaaaatcagaattataatctgatttttctgaacttcctttatagcaggggtccccawcccctgggccacggacccatatcagcctgtagcctcttaggaacggagctgtacagcaggaggtgagcggcaggtgagcaagcatgactgcctgagccccgcctgctgtcagatcagcggaggcattccattctcacgggagcacaaaccctattgtgaactgtgcatgcaaagggtctaggttgagcgctccttaggagaataatgcctgatgatcatccccaaacgtgccccctgccccaccatctttggaaaaattgtcttccaggaatctagtccctggtgccagaaggctggggaccactgttttacagaagaattttgttagaacccaaagattatcttgggtcctttatttacaaattactcaactgaggcctagacagcataaatgacttgccccaaatctctagctagtgttgtagaatttactgacatgttgatttctgtcccttctgtatcttccaatttcctactgtaagccattagtcacactttgaaaatttccttcccttagggctttagtgagataaaatgcagaagcataggaatcaaaagctcttgttttatgtaagaaaagttgtaatttggccctggtggggttggaggagtgactttagtctggagaagggaaagggaatgaggggagggatggaggaaagggagaatgatttccttcctggggaaggaactagaaagggagggaaaaggattcctggggcttgggaggagaagccactttccctatttaaatgctaattagttcattaacccaccaatgggaaagagccaatgccactttcaaaaaaatatttcacttgtctaaacactgatttacagaatgaaaggtttctttcatggttgggggcaggggttctttttgcttgcggtaagaaggaaggagttgcgctaatttgctcaaggtttttcttttgcacacaatagtgtttggtcattaatcataaaaaaaatcacaagaacaattagggaattaaagaaagtgaaagaatgacatactttggaataataaaagtttataaaccaggccaggcacggtggttcatgcctgtaatcccagcactttgggaggccgaggtgggcggatcacaaggtcaggagttcgagaccagcctggccaatatggtgaaaccctcgtccctactaaaaatacaaaaaaaattagccgggcgtggtggcacatgcctgtaatcccagctacttggcaggctgaggcaggagaattgcttgaacccgagaggtggaggttgcagtgagccgagattgtgccactccagcctgggcaacagagcaagactctgtctcataccccccacaaacaaaacaccagtttataaacctaca

SEQ ID NO: 702176 - DNA, 1515 bp, Homo sapiens
gcataacttttaaaaagcaacctcatgtaattctttatcagacatgtgcaagttaaatccatgatacatatacttcttgtacattattcccctacaaggcaatgaaaaatatataaaattttgtctaagaaatagactaaagccatgatgacataagaagtttagctggcagaagcatgccaacttaatggaagccatttcagtgactcaagacagaggactgtaacgtcctttatcaagttttgcagtttttctatttttttttcaactagaagtaaaagatgggcaaatcaaaaatatggttttgtaatgcacaggtttacaacagatatgagggaatttgtggaaatctgaatcatgaaatttccgggaatgatcagagagacttgatagttcatattagattagccctattaataggtacatagtacgagggataagagaatgagtagggaaaaagagaacatggagctttaattattattctatgtatctttcttgtcttactattaaaaggaaatgtattaagtgtcttttttatctgaggtctactttagaaactggatatatacaattgtgtttcaaacgtgagcctgtccttcaaataattatatatgaatattactataaaaattaaaagcaatacctagaaaacagagtgaaacaaagcatagatcaacacataatttttgtacttcgaatatttttctacttagcagagttctcacaaatctattatggctcaaataagggctgttgcatgctccagtatgataggaaaatgtgaaatggaaaaggcaaaagacattttgttctttaaaactaatgttggaaaacaaactttatgatgaaagctctggacctcactaatgtatgaaaaacaacttctaaaagatgtctgattttgacagataaattataattgagttctaaaaactgaaattttgatatattattagagaaatgatattaatattttcagtgcgtgatgatgattataatagatcctttttctactctagagagccatctaaataaagtcctagtttcaaaagattataaagtttatttcacaatgagaaccattcaatataaaaacagacaaatagatgcatggaagagaatagagaactcagaaataaagctgaagacctacaaccatcttatctttgacaaactcagcaaaaataaatattggggaaaggactctttttttttagaaagtggtgctaggataactggctacccatgcagaataatggaastggactccttccttttactacatacaaaaattaactcaagatgaattaaggttgaaatgtaagagttcttcatactataaaaaccctagaagaaaacctaagaaatatccttctcagcatcagcctagataaggaatttatggctaagtcctcaagagcaattgcaacaaaaacaaaaattggtagtgggacctaattaaactaaatgacttctgcacagcaaaaggaactattaagggattaaccagat

SEQ ID NO: 702177 - DNA, 1515 bp, Homo sapiens
gcataacttttaaaaagcaacctcatgtaattctttatcagacatgtgcaagttaaatccatgatacatatacttcttgtacattattcccctacaaggcaatgaaaaatatataaaattttgtctaagaaatagactaaagccatgatgacataagaagtttagctggcagaagcatgccaacttaatggaagccatttcagtgactcaagacagaggactgtaacgtcctttatcaagttttgcagtttttctatttttttttcaactagaagtaaaagatgggcaaatcaaaaatatggttttgtaatgcacaggtttacaacagatatgagggaatttgtggaaatctgaatcatgaaatttccgggaatgatcagagagacttgatagttcatattagattagccctattaataggtacatagtacgagggataagagaatgagtagggaaaaagagaacatggagctttaattattattctatgtatctttcttgtcttactattaaaaggaaatgtattaagtgtcttttttatctgaggtctactttagaaactggatatatacaattgtgtttcaaacgtgagcctgtccttcaaataattatatatgaatattactataaaaattaaaagcaatacctagaaaacagagtgaaacaaagcatagatcaacacataatttttgtacttcgaatatttttctacttagcagagttctcacaaatctattatggctcaaataagggctgttgcatgctccagtatgataggaaaatgtgaaatggaaaaggcaaaagacattttgttctttaaaactaatgttggaaaacaaactttatgatgaaagctctggacctcactaatgtatgaaaaacaacttctaaaagatgtctgattttgacagataaattataattgagttctaaaaactgaaattttgatatattattagagaaatgatattaatattttcagtgcgtgatgatgattataatagatcctttttctactctagagagccatctaaataaagtcctagtttcaaaagattataaagtttatttcacaatgagaaccattcaatataaaaacagacaaatagatgcatggaagagaatagagaactcagaaataaagctgaagacctacaaccatcttatctttgacaaactcagcaaaaataaatattggggaaaggactctttttttttagaaagtggtgctaggataactggctacccatgcagaataatggaactggactccttccttttmctacatacaaaaattaactcaagatgaattaaggttgaaatgtaagagttcttcatactataaaaaccctagaagaaaacctaagaaatatccttctcagcatcagcctagataaggaatttatggctaagtcctcaagagcaattgcaacaaaaacaaaaattggtagtgggacctaattaaactaaatgacttctgcacagcaaaaggaactattaagggattaaccagat

SEQ ID NO: 702178 - DNA, 1515 bp, Homo sapiens
gcataacttttaaaaagcaacctcatgtaattctttatcagacatgtgcaagttaaatccatgatacatatacttcttgtacattattcccctacaaggcaatgaaaaatatataaaattttgtctaagaaatagactaaagccatgatgacataagaagtttagctggcagaagcatgccaacttaatggaagccatttcagtgactcaagacagaggactgtaacgtcctttatcaagttttgcagtttttctatttttttttcaactagaagtaaaagatgggcaaatcaaaaatatggttttgtaatgcacaggtttacaacagatatgagggaatttgtggaaatctgaatcatgaaatttccgggaatgatcagagagacttgatagttcatattagattagccctattaataggtacatagtacgagggataagagaatgagtagggaaaaagagaacatggagctttaattattattctatgtatctttcttgtcttactattaaaaggaaatgtattaagtgtcttttttatctgaggtctactttagaaactggatatatacaattgtgtttcaaacgtgagcctgtccttcaaataattatatatgaatattactataaaaattaaaagcaatacctagaaaacagagtgaaacaaagcatagatcaacacataatttttgtacttcgaatatttttctacttagcagagttctcacaaatctattatggctcaaataagggctgttgcatgctccagtatgataggaaaatgtgaaatggaaaaggcaaaagacattttgttctttaaaactaatgttggaaaacaaactttatgatgaaagctctggacctcactaatgtatgaaaaacaacttctaaaagatgtctgattttgacagataaattataattgagttctaaaaactgaaattttgatatattattagagaaatgatattaatattttcagtgcgtgatgatgattataatagatcctttttctactctagagagccatctaaataaagtcctagtttcaaaagattataaagtttatttcacaatgagaaccattcaatataaaaacagacaaatagatgcatggaagagaatagagaactcagaaataaagctgaagacctacaaccatcttatctttgacaaactcagcaaaaataaatattggggaaaggactctttttttttagaaagtggtgctaggataactggctacccatgcagaataatggaactggactccttccttttactacatacaaaaattaactcaagatgaattaaggttgaaatgtaagagttcttcatactataaaaaccctagaagaaaacctaagaamtatccttctcagcatcagcctagataaggaatttatggctaagtcctcaagagcaattgcaacaaaaacaaaaattggtagtgggacctaattaaactaaatgacttctgcacagcaaaaggaactattaagggattaaccagat

SEQ ID NO: 702179 - DNA, 618 bp, Homo sapiens
aaaatgactgccacttatcaatggccttttgataattttatctaaccttaccaaaaaaaagagggagagagaaaactttttactttaaaatatgaaaaaagtatgagtagttgtctgtattctctaattcatatttcaacactgttgcaaaaaaacttgttccagataagcttttaatgaagatgaatttatttctataactacttgtggttgtacacatggcttcaactttcctggcttctatttttttttttttacttcttatctgtaaaacgatacagttgaagtagaagatttataagtttctttttatgctttaaaatattaggattttaaawagaaaattatattttaagatagcacacatattacagaatgtgtttgaaagggcagagcagattactaattttctgtaaaactaatataaatattatatactcatgtatgaatatggagtgaaaataaaagaaacatatgaagcatacagaaaaccttttttcttctttctttttaaatcaccagtgaggagagtgctttcagctactttcaatttgaaaccgtttatttcaagcaaccaaagagctatgctgccacctactgaccatatgattagcatcc

SEQ ID NO: 702180 - DNA, 618 bp, Homo sapiens
aaaatgactgccacttatcaatggccttttgataattttatctaaccttaccaaaaaaaagagggagagagaaaactttttactttaaaatatgaaaaaagtatgagtagttgtctgtattctctaattcatatttcaacactgttgcaaaaaaacttgttccagataagcttttaatgaagatgaatttatttctataactacttgtggttgtacacatggcttcaactttcctggcttctatttttttttttttacttcttatctgtaaaacgatacagttgaagtagaagatttataagtttctttttatgctttaaaatattaggattttaaatagaaaattatattttaagatagcacacatattacagaatgtgtttraaagggcagagcagattactaattttctgtaaaactaatataaatattatatactcatgtatgaatatggagtgaaaataaaagaaacatatgaagcatacagaaaaccttttttcttctttctttttaaatcaccagtgaggagagtgctttcagctactttcaatttgaaaccgtttatttcaagcaaccaaagagctatgctgccacctactgaccatatgattagcatcc

SEQ ID NO: 702181 - DNA, 3083 bp, Homo sapiens
cttaaggagagcagagcataaggattgaaggttaacatgcaatgacccagttttgtgcttcttatagaattgtccaaagtaaggtatagtataaaattataaacaacctatgtggaattaataatataaataattgctctacatatgaagtgctttgatttatgtcaacctcttaccaataataaatactttattataattttttcaccttatcaatgagtataatataaaataactagtatatggaaaattagcatagtcaatatgatggaaatcttaatgttaaaatatatggttagtctcttttagctcatatttgactttttcagtattttgcaattaacartatataaggaaaatatttcaaagaaaatcttaacgttctacatctatttttttctagttacaaatagggtggatttcacctgattgcaaaatagcaacaactttatcatccataaaagtggattacattcacacttttgaatagtattttacttacagttagttataaaacacataggtcaatataagtgaagtaaaaatttctgatgacttcaattctagaatttccaacacattctttgatttttaagttggttgttggaaatactgtttctctatatacattttataggtcttaattattttacttaatactttatatttctatctttatttctacttaataaaaatataagctgtaaagattcagtcaagctaagcactcatccacaggaataaaatattgtatgatattagctatatataaccatgagcagagagaggaaatatttttcaaccatttctcttaattcctctggctaagagtgagaaatagctcctcaattgccagtgagttataacatccaaatttgccaaagagctcttggtggagagttagtgtcaaatgatccctctccctttttagaaatgtacttagggtgacttggttccttttttcttttaatttgcactaaacctttaggaataattattatcctagtcaactactcaactccataatctcaagtaatataaatattcatatatcacttatagtaagtattaatgttttatatattaaatatggttatatattatattagtgtttataggtatacaggtattatataacatatagatacatatgtatttaatgtgattaaactgagttttatgctttattataatgtgcatttaaagtgtaattaaaatgataatgaccaatttttaaatataaagtgtatattttggcatctggataactcgtcaatctcctcaattaagatgttgttaaatattgaaagttgaacaaaagtaaatcatatctgcaaactataactagtgcaaccacaaaagaaaattgtccttagcttgggctgctataacaaaatgtcatatactgggtgactaaaacaacaacatttgtttctcatagtatagagcctggggagcccaagaaggacaggctgattcagttcctggtgagagccctcttcctggagcttgcagatagctgtcttctgtgtcctgacatagtggaaagagagcaagttctggtcttccaccttcttcctacagagaagatcccagcatggagtcactgcccttatgatctaactgaaatctaattacctcccaaaggcctcacttccaaataccctcacattggggaacacggattcaacatataaatttggggaggatacaaactttcagcccataatgagaatctttagacaaacttaatctaattatatggtgttcttttactggaaaagctgagttgctcaaagataagacagaaatcatataaactaggatttcattatttttcctggaaaattgtaaattaacaaaaaacatatgccctatgccactgaccatattctaaatctagcagtttaatatttgcattagtgagaatttccagatcagatttctcagatgaattaaaatcctgacttgtaaagcagaataccaagaaaaacatgcatttaaaatttgaagtgatgatgggagatattttaatgatacacattgtaaaaatattcacttcacatgttgggatttttttacatgcaactcttttttagaatccgtattcatgtgtgattctttggtcataacactcagtgacaaaaagcaggttaccatatttgaccataataataatttacagaaacagactccttaaaataatggtgaattattttgcaacagggcaaaaatgaatattcacgtcttttctactaactcctgcccatagtaaaactttttatattagcctacttgctaaataaggaaatatggaaaacagtgaagaaaagaaagagaaaagccagatgaggctgaactgaaagaagaatttaagaatttgacaattaaggtccttaggaataactacagaggacatagaaattgggaagggaaaaggttttcaaggaatgttacgggtgtaatgaataggattagtattctttgagagacttaagtacaaatgaaattccatttaaattattttagctgtaaatgtgtatctgtgcagaaattaatccacgcaataaaaacccttgctggtaaatggtttctttggaaataatttccatcttctacctccccactttgggaccaaaggtgttatagtcaccattatttctgatttaaaatgtttttggaataacatcaaaagatggctcttgaatagcatgaaaaagccaaacagataatgtagaaaatattctgatattggatttgcaaatttgggaataattgagtattagaaattgtatatactaagtacaaagtaaaagctatgtacagtataataaaaaaacttttctaaactgtcatcatctaaaacaatcctgctaaaaatgcaaaatgaaaatcagtttttaccaacttataaggaccctatattatttaaaaactgtgattatttggggatagtgagcaaaatcaatatcaggatttgttacattagttcaaaactatgcctgctctacaatcaaaccaaatagtcttatccttcagggattaaatcagctggtacaaactagttgcaattagtaacttgg

SEQ ID NO: 702182 - DNA, 3083 bp, Homo sapiens
cttaaggagagcagagcataaggattgaaggttaacatgcaatgacccagttttgtgcttcttatagaattgtccaaagtaaggtatagtataaaattataaacaacctatgtggaattaataatataaataattgctctacatatgaagtgctttgatttatgtcaacctcttaccaataataaatactttattataattttttcaccttatcaatgagtataatataaaataactagtatatggaaaattagcatagtcaatatgatggaaatcttaatgttaaaatatatggttagtctcttttagctcatatttgactttttcagtattttgcaattaacagtatataaggaaaatatttcaaagaaaatcttaacgttctacrtctatttttttctagttacaaatagggtggatttcacctgattgcaaaatagcaacaactttatcatccataaaagtggattacattcacacttttgaatagtattttacttacagttagttataaaacacataggtcaatataagtgaagtaaaaatttctgatgacttcaattctagaatttccaacacattctttgatttttaagttggttgttggaaatactgtttctctatatacattttataggtcttaattattttacttaatactttatatttctatctttatttctacttaataaaaatataagctgtaaagattcagtcaagctaagcactcatccacaggaataaaatattgtatgatattagctatatataaccatgagcagagagaggaaatatttttcaaccatttctcttaattcctctggctaagagtgagaaatagctcctcaattgccagtgagttataacatccaaatttgccaaagagctcttggtggagagttagtgtcaaatgatccctctccctttttagaaatgtacttagggtgacttggttccttttttcttttaatttgcactaaacctttaggaataattattatcctagtcaactactcaactccataatctcaagtaatataaatattcatatatcacttatagtaagtattaatgttttatatattaaatatggttatatattatattagtgtttataggtatacaggtattatataacatatagatacatatgtatttaatgtgattaaactgagttttatgctttattataatgtgcatttaaagtgtaattaaaatgataatgaccaatttttaaatataaagtgtatattttggcatctggataactcgtcaatctcctcaattaagatgttgttaaatattgaaagttgaacaaaagtaaatcatatctgcaaactataactagtgcaaccacaaaagaaaattgtccttagcttgggctgctataacaaaatgtcatatactgggtgactaaaacaacaacatttgtttctcatagtatagagcctggggagcccaagaaggacaggctgattcagttcctggtgagagccctcttcctggagcttgcagatagctgtcttctgtgtcctgacatagtggaaagagagcaagttctggtcttccaccttcttcctacagagaagatcccagcatggagtcactgcccttatgatctaactgaaatctaattacctcccaaaggcctcacttccaaataccctcacattggggaacacggattcaacatataaatttggggaggatacaaactttcagcccataatgagaatctttagacaaacttaatctaattatatggtgttcttttactggaaaagctgagttgctcaaagataagacagaaatcatataaactaggatttcattatttttcctggaaaattgtaaattaacaaaaaacatatgccctatgccactgaccatattctaaatctagcagtttaatatttgcattagtgagaatttccagatcagatttctcagatgaattaaaatcctgacttgtaaagcagaataccaagaaaaacatgcatttaaaatttgaagtgatgatgggagatattttaatgatacacattgtaaaaatattcacttcacatgttgggatttttttacatgcaactcttttttagaatccgtattcatgtgtgattctttggtcataacactcagtgacaaaaagcaggttaccatatttgaccataataataatttacagaaacagactccttaaaataatggtgaattattttgcaacagggcaaaaatgaatattcacgtcttttctactaactcctgcccatagtaaaactttttatattagcctacttgctaaataaggaaatatggaaaacagtgaagaaaagaaagagaaaagccagatgaggctgaactgaaagaagaatttaagaatttgacaattaaggtccttaggaataactacagaggacatagaaattgggaagggaaaaggttttcaaggaatgttacgggtgtaatgaataggattagtattctttgagagacttaagtacaaatgaaattccatttaaattattttagctgtaaatgtgtatctgtgcagaaattaatccacgcaataaaaacccttgctggtaaatggtttctttggaaataatttccatcttctacctccccactttgggaccaaaggtgttatagtcaccattatttctgatttaaaatgtttttggaataacatcaaaagatggctcttgaatagcatgaaaaagccaaacagataatgtagaaaatattctgatattggatttgcaaatttgggaataattgagtattagaaattgtatatactaagtacaaagtaaaagctatgtacagtataataaaaaaacttttctaaactgtcatcatctaaaacaatcctgctaaaaatgcaaaatgaaaatcagtttttaccaacttataaggaccctatattatttaaaaactgtgattatttggggatagtgagcaaaatcaatatcaggatttgttacattagttcaaaactatgcctgctctacaatcaaaccaaatagtcttatccttcagggattaaatcagctggtacaaactagttgcaattagtaacttgg

SEQ ID NO: 702183 - DNA, 3083 bp, Homo sapiens
cttaaggagagcagagcataaggattgaaggttaacatgcaatgacccagttttgtgcttcttatagaattgtccaaagtaaggtatagtataaaattataaacaacctatgtggaattaataatataaataattgctctacatatgaagtgctttgatttatgtcaacctcttaccaataataaatactttattataattttttcaccttatcaatgagtataatataaaataactagtatatggaaaattagcatagtcaatatgatggaaatcttaatgttaaaatatatggttagtctcttttagctcatatttgactttttcagtattttgcaattaacagtatataaggaaaatatttcaaagaaaatcttaacgttctacatctatttttttctagttacaaatagggtggatttcacctgattgcaaaatagcaacaactttatcatccataaaagtggattacattcacacttttgaatagyattttacttacagttagttataaaacacataggtcaatataagtgaagtaaaaatttctgatgacttcaattctagaatttccaacacattctttgatttttaagttggttgttggaaatactgtttctctatatacattttataggtcttaattattttacttaatactttatatttctatctttatttctacttaataaaaatataagctgtaaagattcagtcaagctaagcactcatccacaggaataaaatattgtatgatattagctatatataaccatgagcagagagaggaaatatttttcaaccatttctcttaattcctctggctaagagtgagaaatagctcctcaattgccagtgagttataacatccaaatttgccaaagagctcttggtggagagttagtgtcaaatgatccctctccctttttagaaatgtacttagggtgacttggttccttttttcttttaatttgcactaaacctttaggaataattattatcctagtcaactactcaactccataatctcaagtaatataaatattcatatatcacttatagtaagtattaatgttttatatattaaatatggttatatattatattagtgtttataggtatacaggtattatataacatatagatacatatgtatttaatgtgattaaactgagttttatgctttattataatgtgcatttaaagtgtaattaaaatgataatgaccaatttttaaatataaagtgtatattttggcatctggataactcgtcaatctcctcaattaagatgttgttaaatattgaaagttgaacaaaagtaaatcatatctgcaaactataactagtgcaaccacaaaagaaaattgtccttagcttgggctgctataacaaaatgtcatatactgggtgactaaaacaacaacatttgtttctcatagtatagagcctggggagcccaagaaggacaggctgattcagttcctggtgagagccctcttcctggagcttgcagatagctgtcttctgtgtcctgacatagtggaaagagagcaagttctggtcttccaccttcttcctacagagaagatcccagcatggagtcactgcccttatgatctaactgaaatctaattacctcccaaaggcctcacttccaaataccctcacattggggaacacggattcaacatataaatttggggaggatacaaactttcagcccataatgagaatctttagacaaacttaatctaattatatggtgttcttttactggaaaagctgagttgctcaaagataagacagaaatcatataaactaggatttcattatttttcctggaaaattgtaaattaacaaaaaacatatgccctatgccactgaccatattctaaatctagcagtttaatatttgcattagtgagaatttccagatcagatttctcagatgaattaaaatcctgacttgtaaagcagaataccaagaaaaacatgcatttaaaatttgaagtgatgatgggagatattttaatgatacacattgtaaaaatattcacttcacatgttgggatttttttacatgcaactcttttttagaatccgtattcatgtgtgattctttggtcataacactcagtgacaaaaagcaggttaccatatttgaccataataataatttacagaaacagactccttaaaataatggtgaattattttgcaacagggcaaaaatgaatattcacgtcttttctactaactcctgcccatagtaaaactttttatattagcctacttgctaaataaggaaatatggaaaacagtgaagaaaagaaagagaaaagccagatgaggctgaactgaaagaagaatttaagaatttgacaattaaggtccttaggaataactacagaggacatagaaattgggaagggaaaaggttttcaaggaatgttacgggtgtaatgaataggattagtattctttgagagacttaagtacaaatgaaattccatttaaattattttagctgtaaatgtgtatctgtgcagaaattaatccacgcaataaaaacccttgctggtaaatggtttctttggaaataatttccatcttctacctccccactttgggaccaaaggtgttatagtcaccattatttctgatttaaaatgtttttggaataacatcaaaagatggctcttgaatagcatgaaaaagccaaacagataatgtagaaaatattctgatattggatttgcaaatttgggaataattgagtattagaaattgtatatactaagtacaaagtaaaagctatgtacagtataataaaaaaacttttctaaactgtcatcatctaaaacaatcctgctaaaaatgcaaaatgaaaatcagtttttaccaacttataaggaccctatattatttaaaaactgtgattatttggggatagtgagcaaaatcaatatcaggatttgttacattagttcaaaactatgcctgctctacaatcaaaccaaatagtcttatccttcagggattaaatcagctggtacaaactagttgcaattagtaacttgg

SEQ ID NO: 702184 - DNA, 3083 bp, Homo sapiens
cttaaggagagcagagcataaggattgaaggttaacatgcaatgacccagttttgtgcttcttatagaattgtccaaagtaaggtatagtataaaattataaacaacctatgtggaattaataatataaataattgctctacatatgaagtgctttgatttatgtcaacctcttaccaataataaatactttattataattttttcaccttatcaatgagtataatataaaataactagtatatggaaaattagcatagtcaatatgatggaaatcttaatgttaaaatatatggttagtctcttttagctcatatttgactttttcagtattttgcaattaacagtatataaggaaaatatttcaaagaaaatcttaacgttctacatctatttttttctagttacaaatagggtggatttcacctgattgcaaaatagcaacaactttatcatccataaaagtggattacattcacacttttgaatagtattttacttacagttagttataaaacacataggtcaatataagtgaagtaaaaatttctgatgacttcaattctagaatttccaacacattctttgatttttaagttggttgttggaaatactgtttctctatatacattttataggtcttaattattttacttaatactttatatttctatctttatttctacttaataaaaatataagctgtaaagattcagtcaagctaagcactcatccacaggaataaaatattgtatgatattagctatatataaccatgagcagagagaggaaatatttttcaaccatttctcttaattcctctggctaagagtgagaaatagctcctyaattgccagtgagttataacatccaaatttgccaaagagctcttggtggagagttagtgtcaaatgatccctctccctttttagaaatgtacttagggtgacttggttccttttttcttttaatttgcactaaacctttaggaataattattatcctagtcaactactcaactccataatctcaagtaatataaatattcatatatcacttatagtaagtattaatgttttatatattaaatatggttatatattatattagtgtttataggtatacaggtattatataacatatagatacatatgtatttaatgtgattaaactgagttttatgctttattataatgtgcatttaaagtgtaattaaaatgataatgaccaatttttaaatataaagtgtatattttggcatctggataactcgtcaatctcctcaattaagatgttgttaaatattgaaagttgaacaaaagtaaatcatatctgcaaactataactagtgcaaccacaaaagaaaattgtccttagcttgggctgctataacaaaatgtcatatactgggtgactaaaacaacaacatttgtttctcatagtatagagcctggggagcccaagaaggacaggctgattcagttcctggtgagagccctcttcctggagcttgcagatagctgtcttctgtgtcctgacatagtggaaagagagcaagttctggtcttccaccttcttcctacagagaagatcccagcatggagtcactgcccttatgatctaactgaaatctaattacctcccaaaggcctcacttccaaataccctcacattggggaacacggattcaacatataaatttggggaggatacaaactttcagcccataatgagaatctttagacaaacttaatctaattatatggtgttcttttactggaaaagctgagttgctcaaagataagacagaaatcatataaactaggatttcattatttttcctggaaaattgtaaattaacaaaaaacatatgccctatgccactgaccatattctaaatctagcagtttaatatttgcattagtgagaatttccagatcagatttctcagatgaattaaaatcctgacttgtaaagcagaataccaagaaaaacatgcatttaaaatttgaagtgatgatgggagatattttaatgatacacattgtaaaaatattcacttcacatgttgggatttttttacatgcaactcttttttagaatccgtattcatgtgtgattctttggtcataacactcagtgacaaaaagcaggttaccatatttgaccataataataatttacagaaacagactccttaaaataatggtgaattattttgcaacagggcaaaaatgaatattcacgtcttttctactaactcctgcccatagtaaaactttttatattagcctacttgctaaataaggaaatatggaaaacagtgaagaaaagaaagagaaaagccagatgaggctgaactgaaagaagaatttaagaatttgacaattaaggtccttaggaataactacagaggacatagaaattgggaagggaaaaggttttcaaggaatgttacgggtgtaatgaataggattagtattctttgagagacttaagtacaaatgaaattccatttaaattattttagctgtaaatgtgtatctgtgcagaaattaatccacgcaataaaaacccttgctggtaaatggtttctttggaaataatttccatcttctacctccccactttgggaccaaaggtgttatagtcaccattatttctgatttaaaatgtttttggaataacatcaaaagatggctcttgaatagcatgaaaaagccaaacagataatgtagaaaatattctgatattggatttgcaaatttgggaataattgagtattagaaattgtatatactaagtacaaagtaaaagctatgtacagtataataaaaaaacttttctaaactgtcatcatctaaaacaatcctgctaaaaatgcaaaatgaaaatcagtttttaccaacttataaggaccctatattatttaaaaactgtgattatttggggatagtgagcaaaatcaatatcaggatttgttacattagttcaaaactatgcctgctctacaatcaaaccaaatagtcttatccttcagggattaaatcagctggtacaaactagttgcaattagtaacttgg

SEQ ID NO: 702185 - DNA, 3083 bp, Homo sapiens
cttaaggagagcagagcataaggattgaaggttaacatgcaatgacccagttttgtgcttcttatagaattgtccaaagtaaggtatagtataaaattataaacaacctatgtggaattaataatataaataattgctctacatatgaagtgctttgatttatgtcaacctcttaccaataataaatactttattataattttttcaccttatcaatgagtataatataaaataactagtatatggaaaattagcatagtcaatatgatggaaatcttaatgttaaaatatatggttagtctcttttagctcatatttgactttttcagtattttgcaattaacagtatataaggaaaatatttcaaagaaaatcttaacgttctacatctatttttttctagttacaaatagggtggatttcacctgattgcaaaatagcaacaactttatcatccataaaagtggattacattcacacttttgaatagtattttacttacagttagttataaaacacataggtcaatataagtgaagtaaaaatttctgatgacttcaattctagaatttccaacacattctttgatttttaagttggttgttggaaatactgtttctctatatacattttataggtcttaattattttacttaatactttatatttctatctttatttctacttaataaaaatataagctgtaaagattcagtcaagctaagcactcatccacaggaataaaatattgtatgatattagctatatataaccatgagcagagagaggaaatatttttcaaccatttctcttaattcctctggctaagagtgagaaatagctcctcaattgccagtgagttataacatccaaatttgccaaagagctcttggtggagagttagtgtcaaatgatccctctccctttttagaaatgtacttagggtgacttggttccttttttcttttaatttgcactaaacctttaggaataattattatcctagtcaactactcaactccataatctcaagtaatataaatattcatatatcacttatagtaagtattaatgttttatatattaaatatggttatatattatattagtgtttataggtatacaggtattatataacatatagatacatatgtatttaatgtgattaaactgagttttatgctttattataatgtgcatttaaagtgtaattaaaatgataatgaccaatttttaaatataaagtgtatattttggcatctggataactcgtcaatctcctcaattaagatgttgttaaatattgaaagttgaacaaaagtaaatcatatctgcaaactataactagtgcaaccacaaaagaaaattgtccttagcttgggctgctataacaaaatgtcatatactgggtgactaaaacaacaacatttgtttctcatagtatagagcctggggagcccaagaaggacaggctgattcagttcctggtgagagccctcttcctggagcttgcagatagctgtcttctgtgtcctgacatagtggaaagagagcaagttctggtcttccaccttcttcctacagagaagatcccagcatggagtcactgcccttatgatctaactgaaatctaattacctcccaaaggcctcacttccaaataccctcacattggggaacacggattcaacatataaatttggggaggatacaaactttcagcccataatgagaatctttagacaaacttaatctaattatatggtgttcttttactggaaaagctgagttgctcaaagataagacagaaatcatataaactaggatttcattatttttcctggaaaattgtaaattaacaaaaaacatatgccctatgccactgaccatattctaaatctagcagtttaatatttgcattagtgagaatttccagatcagatttctcagatgaattaaaatcctgacttgtaaagcagaataccaagaaaaayatgcatttaaaatttgaagtgatgatgggagatattttaatgatacacattgtaaaaatattcacttcacatgttgggatttttttacatgcaactcttttttagaatccgtattcatgtgtgattctttggtcataacactcagtgacaaaaagcaggttaccatatttgaccataataataatttacagaaacagactccttaaaataatggtgaattattttgcaacagggcaaaaatgaatattcacgtcttttctactaactcctgcccatagtaaaactttttatattagcctacttgctaaataaggaaatatggaaaacagtgaagaaaagaaagagaaaagccagatgaggctgaactgaaagaagaatttaagaatttgacaattaaggtccttaggaataactacagaggacatagaaattgggaagggaaaaggttttcaaggaatgttacgggtgtaatgaataggattagtattctttgagagacttaagtacaaatgaaattccatttaaattattttagctgtaaatgtgtatctgtgcagaaattaatccacgcaataaaaacccttgctggtaaatggtttctttggaaataatttccatcttctacctccccactttgggaccaaaggtgttatagtcaccattatttctgatttaaaatgtttttggaataacatcaaaagatggctcttgaatagcatgaaaaagccaaacagataatgtagaaaatattctgatattggatttgcaaatttgggaataattgagtattagaaattgtatatactaagtacaaagtaaaagctatgtacagtataataaaaaaacttttctaaactgtcatcatctaaaacaatcctgctaaaaatgcaaaatgaaaatcagtttttaccaacttataaggaccctatattatttaaaaactgtgattatttggggatagtgagcaaaatcaatatcaggatttgttacattagttcaaaactatgcctgctctacaatcaaaccaaatagtcttatccttcagggattaaatcagctggtacaaactagttgcaattagtaacttgg

SEQ ID NO: 702186 - DNA, 2246 bp, Homo sapiens
tttctgatatctgtgggattaatgaatattaattatctgacattcattactctttaaaatttattttctattattgctcatgtcttgtactttgatttttcatattattcccaggctgtacttggtatcttcttcctgtacagcttttatctactataaaatgtattctggtcaatcaaggtggaagtgttttgatttctttttttttcttttggttttgtctttttgtttttgttttcttttatactttaaaacaaaatatctcatcatcggtctttacagaaccatatgaggaaaatattggttctctgattttctgtggtcctagtaaaataattaaagaaatgaaaataatraaaagcaaggtcaggcatggtggctcatgcatgtaatcccagcactttgggaggccgaggtcggcagatgacttgaggccaggagtttgagacaagcctggccaacatggtaaaaacccatctctactaaaaacacaaaaattagccaggcatggtggcacatgcctgtaatcccaggtactcgggagtctaaggcatgaaaatcacttgaacccaggaggcagaggtttcagtgagccaagattgcgccactgcactccagcctgggcgactgtgacatctcgaaaaaagagaaaaaggcaatatacctatcccatgatctttattaatgcatttatatgaatgcacttttgacaagatatctgccaactttctcagaagaacaaagaatgcattccttatttttagtggtactaggaaaatagtaacaatattgagaacacgtttcacatgtcctttgacgtaacctgatgtttttgagtatgctcattaagaggaagccaaacaaaacactaaataaagggaggccaaattgtgttgcaacatgactcctctcctctcccttactcacacacacaaggccagcctcattcactgtagtcatccttccttctcactgagcatggaaaagcctgcaatcctcttcactattagagtttgttataagttaaaaatgtcttttttactgagatctttttttaatgtactatataatatgtgtttaatattcttacatgcttgaagttcctcttgaagatacactaggggtcaaaatttttttttaatttttccgtgttcctagagacactaatatttctgtattttatagatgttgcataactttgcccttccctgctggcgtttccctggttctatttcatctatatattctatgaggcctttattaaacatttgtatatgtgtatacaggcctgtattaaatagatttgaattttcattagagatgttttatgcactcaagctgtttataaaaaactaaaaaatgtctgaaacattaatatcaaatgactaaaaaggaagttgctcatttatctggtatcctcaactaaagtgctataaaaatatctggttgatgaggaattctgacaaataatagctttggcttcacatttaagaaaaacttccagtcatttgattccaaggtttacagtcataagagaacaaactcacaaatgaatttcaccaacagttaatattctgacataccctgtatatccaataatcctctgtccatctgatagcccgcttcatattataagaagagagaaattgcaaatatttgctcctaagctcttgtgataggcagaatgatgatcccacaaaaatgtctttgtcctaatcctcagaacttgtgaatatattacctttcaaggcaaaaaagacgtctgtatagatgtgattaagaatcttgatatagggagagtgttctagcttatcagaatgggtacaatgtgatcattaaagtttttataagtggaagagggagacagcagtgtcagagagagatctgaaattgctaccctgctgactgaagatggacgaagaggtcatgaaccaaggaaggcaggtggcctccagaagctggaaaaaggataaattttccctaaaagctttcagcagaaacatggccaactccttaattatagctcggtgaagacttctgacctccagcactgtaagataaggagtgtgtgtgtgtgtgtgtgtgtgtgtgtgtgtgtgtgtgtgtgtgtttcagtgctgtgttacagtgttgtaacacttagtttgtggcaacagcaataagaaggcaatatatcatctcatacattccagagaaagcaaaaatagatggcattaactctatataaccctttacctaaaacataa

SEQ ID NO: 702187 - DNA, 2246 bp, Homo sapiens
tttctgatatctgtgggattaatgaatattaattatctgacattcattactctttaaaatttattttctattattgctcatgtcttgtactttgatttttcatattattcccaggctgtacttggtatcttcttcctgtacagcttttatctactataaaatgtattctggtcaatcaaggtggaagtgttttgatttctttttttttcttttggttttgtctttttgtttttgttttcttttatactttaaaacaaaatatctcatcatcggtctttacagaaccatatgaggaaaatattggttctctgattttctgtggtcctagtaaaataattaaagaaatgaaaataatgaaaagcaaggtcaggcatggtggctcatgcatgtaatcccagcactttgggaggccgaggtcggcagatgacttgaggccaggagtttgagacaagcctggccaacatggtaaaaacccatctctactaaaaacacaaaaattagccaggcatggtggcacatgcctgtaatcccaggtactcgggagtctaaggcatgaaaatcacttgaacccaggaggcagaggtttcagtgagccaagattgcgccactgcactccagcctgggcgactgtgacatctcgaaaaaagagaaaaaggcaatatacctatcccatgatctttattaatgcatttatatgaatgcacttttgacaagatatctgccaactttctcagaagaacaaagaatgcattccttatttttagtggtactaggaaaatagtaacaatattgagaacacgtttcacatgtcctttgacgtaacctgatgtttttgagtatgctcattaagaggaagccaaacaaaacactaaataaagggaggccaaattgtgttgcaacatgactcctctcctctcccttactcacacacacaaggccagcctcattcactgtagtcatccttccttctcactgagcatggaaaagcctgcaatcctcttcactattagagtttgttataagttaaaaatgtcttttttactgagatctttttttaatgtactatataatatgtgtttaatattcttacatgcttgaagttcctcttgaagatacactaggggtcaaaatwtttttttaatttttccgtgttcctagagacactaatatttctgtattttatagatgttgcataactttgcccttccctgctggcgtttccctggttctatttcatctatatattctatgaggcctttattaaacatttgtatatgtgtatacaggcctgtattaaatagatttgaattttcattagagatgttttatgcactcaagctgtttataaaaaactaaaaaatgtctgaaacattaatatcaaatgactaaaaaggaagttgctcatttatctggtatcctcaactaaagtgctataaaaatatctggttgatgaggaattctgacaaataatagctttggcttcacatttaagaaaaacttccagtcatttgattccaaggtttacagtcataagagaacaaactcacaaatgaatttcaccaacagttaatattctgacataccctgtatatccaataatcctctgtccatctgatagcccgcttcatattataagaagagagaaattgcaaatatttgctcctaagctcttgtgataggcagaatgatgatcccacaaaaatgtctttgtcctaatcctcagaacttgtgaatatattacctttcaaggcaaaaaagacgtctgtatagatgtgattaagaatcttgatatagggagagtgttctagcttatcagaatgggtacaatgtgatcattaaagtttttataagtggaagagggagacagcagtgtcagagagagatctgaaattgctaccctgctgactgaagatggacgaagaggtcatgaaccaaggaaggcaggtggcctccagaagctggaaaaaggataaattttccctaaaagctttcagcagaaacatggccaactccttaattatagctcggtgaagacttctgacctccagcactgtaagataaggagtgtgtgtgtgtgtgtgtgtgtgtgtgtgtgtgtgtgtgtgtgtgtttcagtgctgtgttacagtgttgtaacacttagtttgtggcaacagcaataagaaggcaatatatcatctcatacattccagagaaagcaaaaatagatggcattaactctatataaccctttacctaaaacataa

SEQ ID NO: 702188 - DNA, 2246 bp, Homo sapiens
tttctgatatctgtgggattaatgaatattaattatctgacattcattactctttaaaatttattttctattattgctcatgtcttgtactttgatttttcatattattcccaggctgtacttggtatcttcttcctgtacagcttttatctactataaaatgtattctggtcaatcaaggtggaagtgttttgatttctttttttttcttttggttttgtctttttgtttttgttttcttttatactttaaaacaaaatatctcatcatcggtctttacagaaccatatgaggaaaatattggttctctgattttctgtggtcctagtaaaataattaaagaaatgaaaataatgaaaagcaaggtcaggcatggtggctcatgcatgtaatcccagcactttgggaggccgaggtcggcagatgacttgaggccaggagtttgagacaagcctggccaacatggtaaaaacccatctctactaaaaacacaaaaattagccaggcatggtggcacatgcctgtaatcccaggtactcgggagtctaaggcatgaaaatcacttgaacccaggaggcagaggtttcagtgagccaagattgcgccactgcactccagcctgggcgactgtgacatctcgaaaaaagagaaaaaggcaatatacctatcccatgatctttattaatgcatttatatgaatgcacttttgacaagatatctgccaactttctcagaagaacaaagaatgcattccttatttttagtggtactaggaaaatagtaacaatattgagaacacgtttcacatgtcctttgacgtaacctgatgtttttgagtatgctcattaagaggaagccaaacaaaacactaaataaagggaggccaaattgtgttgcaacatgactcctctcctctcccttactcacacacacaaggccagcctcattcactgtagtcatccttccttctcactgagcatggaaaagcctgcaatcctcttcactattagagtttgttataagttaaaaatgtcttttttactgagatctttttttaatgtactatataatatgtgtttaatattcttacatgcttgaagttcctcttgaagatacactaggggtcaaaatttttttttaatttttccgtgttcctagagacactaatatttctgtattttatagatgttgcataactttgcccttccctgctggcgtttccctggttctatttcatctatatattctatgaggcctttattaaacatttgtatatgtgtatacaggcctgtattaaatagatttgaattttcattagagatgttttatgcactcaagctgtttataaaaaactaaaaaatgyctgaaacattaatatcaaatgactaaaaaggaagttgctcatttatctggtatcctcaactaaagtgctataaaaatatctggttgatgaggaattctgacaaataatagctttggcttcacatttaagaaaaacttccagtcatttgattccaaggtttacagtcataagagaacaaactcacaaatgaatttcaccaacagttaatattctgacataccctgtatatccaataatcctctgtccatctgatagcccgcttcatattataagaagagagaaattgcaaatatttgctcctaagctcttgtgataggcagaatgatgatcccacaaaaatgtctttgtcctaatcctcagaacttgtgaatatattacctttcaaggcaaaaaagacgtctgtatagatgtgattaagaatcttgatatagggagagtgttctagcttatcagaatgggtacaatgtgatcattaaagtttttataagtggaagagggagacagcagtgtcagagagagatctgaaattgctaccctgctgactgaagatggacgaagaggtcatgaaccaaggaaggcaggtggcctccagaagctggaaaaaggataaattttccctaaaagctttcagcagaaacatggccaactccttaattatagctcggtgaagacttctgacctccagcactgtaagataaggagtgtgtgtgtgtgtgtgtgtgtgtgtgtgtgtgtgtgtgtgtgtgtttcagtgctgtgttacagtgttgtaacacttagtttgtggcaacagcaataagaaggcaatatatcatctcatacattccagagaaagcaaaaatagatggcattaactctatataaccctttacctaaaacataa

SEQ ID NO: 702189 - DNA, 237 bp, Homo sapiens
cactccagctgggcgatagataaagactccatctcaaaaaaaaaaaaaagaagtctgttaatataagtccccataataacatagttgaagagaaaaaccacagaatcatcttcacaagtaatagataactgtattgatgggaacttttggaatttctcttatagttgcttcyagtttcccagtgaaataggaaacaaggtcatcagctgagagtgagaaatcaggaacggggaaaaa

SEQ ID NO: 702190 - DNA, 2770 bp, Homo sapiens
ggatgaacgaacaaaccaaatgtggtacatacattcaatgaatattattcagccatatcaaagaaggaaattctgcaatatgcaacccatggataagcctggaagatattatgccaagtgaaataagtcagccacaaaaagacaaatactttatgatgccacttacatgtggtatctagagtagtcaaaatcttaggaacagaatgtagaatgatggttaccaggcgcaggagaaagggggagacagagagttgccattcaatggatacagagtttcattcatggaagatgaaaaagttctagagatctgctgtacaactgtgcttacagttaacaatactttcccagacacttacaacttttaggagggtagatctcacattatatgttatttaccacaataaaaaatttaaaaaagcaaagagaccaaaagagaagccaagagaatagtcaggattcccaccagatacaatacacaagaaagaaaaggcagaagtttggaacatccacatttaggtagttggaggaaaagaatgaagaaatgaaacagagataagaaaacaacgttctcaaatcccttgagcgagagttaatctactccctcttttcttgttactccctgtactttgatcacagctctcactgaagtctaccttgtaccacagttgatggtacacgtctctgtctccctcactggacagaaaatttctttgagggccataatttttccaattcctctttcatccttggattttaatagaattttaggccaaagaaaccctgaaaaatgaatattttgcctgcagaatggatcaatcctagcatgacatcctctattttaataattccgaagtacataaatttggctcaaagaggcaaaaaaataaaataaaataataaaaatataactttgtatggctgctttttcaaaatgagttttacacttgagaagcaagacgagaatggttttggattcccaggtaactaaggctcggaaacagcccttcctaggtggaggtccttacatcgtacatgcggtgttgttgttgtagccctgcccacagaactgttcctgctgctcccttcaaccacggggatcacaggttgctcctggcctcaggtccttaagatatacttcctagtcttctcccacttctgctacttgttaaatccaagtgttttccctgaaacacatcatgtattctttgcttgactttatttgttgtcatccttgaagctcttcctgtgccttaccaccatccccacatgcatcacccaccccacacacacccctggggctcctcacactttgggaacactatgctggatgtttttcctcctcaaaggtgacagctcagtggggcttaaaaatcatgcagaggctcaacaagcttccctcacacacactggtcccactaatagaggtagacaccagagacaccttcacacaccacaaggtcagaattcaataggggagacagaagaaaaaccttagtccgtgcacagttctgcatatgcctctggcattgctctgttttcaaatcgccaaagactcattaatagcgtccactgacagtgcaatgtgcaagagccaacctgctctgattttaatcctgtgtgcacttgcttcacattctgtgttagtgggcacagagctctctagatgtcataagattgttctgcagagtcatggtttgttgagtgtttttctccaggcttcgctacctttccaatgtgatcttgcattccaaaactacaaagctaacctttggaaaactcacccaaccccacatactgcatttatttgctcaaaaacatcttccgtcttttcatttggtgctggctctgaaacagcagtgccctctggaggcagtctgatgtggtgattaggggcatgggccctcaggctatttcttagctgtgtgatcataggaaagctactgcaatctctgtgcttccatttgttttctcatccgtaaaatggagctggtcatgaaaactgtattagataatgcaacatatctgttcacaacaattgtatttattaggatacctttctatttttttaaaaagaaatctcaggcactatttcttgaaccaggtagcagggaaaggggtatagtttctccaatatttcaagtattttttgaccagagcttttacaatcttaccttagaactggctcttacatgttctctcagcaaaggggttcagcagagccaaaaaaagaggaagaaaaccaggggagaatgaggttatagaatgcagattagcacatttttcctacaaaagaccagagagtaaataatttaggctttgcaggccttagggtctctgttagaacataactctgctgtgtagtatgaaagcagccaaagacaaatgtaaatgaatgagtgtggctgtgtcctgataacatgttatttacaaaaacaggtggagggccagatttggcctgtggggctgcaatgtgataacccccatcatagaacataaggaaagagagtttcagggagagagaagtagacgcagtgtcaaatgtggcagaatggacaagtaaggtaaggacacaaaaatatctaytagatttggcaactagggaatcaccggggcaaggataatataagtggagagatggggacagatgctgagctgcagaatcttcgttgaccaggaaaaaagcctaggtagtaggcctcgaaaaaaaatgaagaagtaagattctataaatgcctctacttcctgagacagaagtattaggctctgagga

SEQ ID NO: 702191 - DNA, 2770 bp, Homo sapiens
ggatgaacgaacaaaccaaatgtggtacatacattcaatgaatattattcagccatatcaaagaaggaaattctgcaatatgcaacccatggataagcctggaagatattatgccaagtgaaataagtcagccacaaaaagacaaatactttatgatgccacttacatgtggtatctagagtagtcaaaatcttaggaacagaatgtagaatgatggttaccaggcgcaggagaaagggggagacagagagttgccattcaatggatacagagtttcattcatggaagatgaaaaagttctagagatctgctgtacaactgtgcttacagttaacaatactttcccagacacttacaacttttaggagggtagatctcacattatatgttatttaccacaataaaaaatttaaaaaagcaaagagaccaaaagagaagccaagagaatagtcaggattcccaccagatacaatacacaagaaagaaaaggcagaagtttggaacatccacatttaggtagttggaggaaaagaatgaagaaatgaaacagagataagaaaacaacgttctcaaatcccttgagcgagagttaatctactccctcttttcttgttactccctgtactttgatcacagctctcactgaagtctaccttgtaccacagttgatggtacacgtctctgtctccctcactggacagaaaatttctttgagggccataatttttccaattcctctttcatccttggattttaatagaattttaggccaaagaaaccctgaaaaatgaatattttgcctgcagaatggatcaatcctagcatgacatcctctattttaataattccgaagtacataaatttggctcaaagaggcaaaaaaataaaataaaataataaaaatataactttgtatggctgctttttcaaaatgagttttacacttgagaagcaagacgagaatggttttggattcccaggtaactaaggctcggaaacagcccttcctaggtggaggtccttacatcgtacatgcggtgttgttgttgtagccctgcccacagaactgttcctgctgctcccttcaaccacggggatcacaggttgctcctggcctcaggtccttaagatatacttcctagtcttctcccacttctgctacttgttaaatccaagtgttttccctgaaacacatcatgtattctttgcttgactttatttgttgtcatccttgaagctcttcctgtgccttaccaccatccccacatgcatcacccaccccacacacacccctggggctcctcacactttgggaacactatgctggatgtttttcctcctcaaaggtgacagctcagtggggcttaaaaatcatgcagaggctcaacaagcttccctcacacacactggtcccactaatagaggtagacaccagagacaccttcacacaccacaaggtcagaattcaataggggagacagaagaaaaaccttagtccgtgcacagttctgcatatgcctctggcattgctctgttttcaaatcgccaaagactcattaatagcgtccactgacagtgcaatgtgcaagagccaacctgctctgattttaatcctgtgtgcacttgcttcacattctgtgttagtgggcacagagctctctagatgtcataagattgttctgcagagtcatggtttgttgagtgtttttctccaggcttcgctacctttccaatgtgatcttgcattccaaaactacaaagctaacctttggaaaactcacccaaccccacatactgcatttatttgctcaaaaacatcttccgtcttttcatttggtgctggctctgaaacagcagtgccctctggaggcagtctgatgtggtgattaggggcatgggccctcaggctatttcttagctgtgtgatcataggaaagctactgcaatctctgtgcttccatttgttttctcatccgtaaaatggagctggtcatgaaaactgtattagataatgcaacatatctgttcacaacaattgtatttattaggatacctttctatttttttaaaaagaaatctcaggcactatttcttgaaccaggtagcagggaaaggggtatagtttctccaatatttcaagtattttttgaccagagcttttacaatcttaccttagaactggctcttacatgttctctcagcaaaggggttcagcagagccaaaaaaagaggaagaaaaccaggggagaatgaggttatagaatgcagattagcacatttttcctacaaaagaccagagagtaaataatttaggctttgcaggccttagggtctctgttagaacataactctgctgtgtagtatgaaagcagccaaagacaaatgtaaatgaatgagtgtggctgtgtcctgataacatgttatttacaaaaacaggtggagggccagatttggcctgtggggctgcaatgtgataacccccatcatagaacataaggaaagagagtttcagggagagagaagtagacgcagtgtcaaatgtggcagaatggacaagtaaggtaaggacacaaaaatatctattagatttggcaactagggaatcaccggggcaaggataatrtaagtggagagatggggacagatgctgagctgcagaatcttcgttgaccaggaaaaaagcctaggtagtaggcctcgaaaaaaaatgaagaagtaagattctataaatgcctctacttcctgagacagaagtattaggctctgagga

SEQ ID NO: 702192 - DNA, 1903 bp, Homo sapiens
cggagtctcactctgtcaccaggctggagtgcagtggtgtgaccttggctcgctgcaacctctgcctcctggttcaagcaattttcctgcctcagcctcctgagtagctgggactacaggcacacaccaccacacccagctaattattgtatttttagtagagacggggtttcaccatgttggccaggatggccttgatctcttgaccttgtgatccacctgcctaggcctcccaaagttctaggattacaggtgtgaggcattgcgcccagcctccacttacttaatttttaaaatgagcctgttaggtaacaatattaagcacaccactatatgtgtgtaatataatatttttatattgtaatatattatttgacttttacttgtaatcgttagcaaccatttgtaaaatacctaatttgatgctagcactatagtaagcaatttacatgcattagctactcaatctttaccataaccctatgagatatatgttataccattttacagatgagaaaagtgagtctattgcaacccaggtgtgactgatctcaaagcaggtagaattctctccatattccatgcaagaatcttgaaatrctaagtatcctgagtatttcacagtatttagagctgggactagcatcaacagtacatagcaaatagtcaagtcacattgagaagcttgattttctgaaacactcatgttggcattcttaattttcattatccaacattacatagttaccagtgttgcctttcattcatacaccaatcgatatcctaattggtctgcctcaaacctggaagcaaattgcctggcaaaggcagagggagagctgcagatggatatgtttaaaagggctgagtgtgtagagttgctgagcaaaggagagctctgcccctgtgtcccctccttgtgtctcacctgaagcttcatatttctgttgctgttcttcattcagcctctcattatttacagttgtcctctaagggaatcagagctcactctattccatcttttttacttttgaattaattttcctaattggtagagagaggccatttgggatacaaaaccactttagtgcctagccgggaaatttctgaaagctctgtcagtggaaggagtgtcgagggacttgtccaagttgatgttcaattctttcagcttctctaggtcagttcttttctctcgcatagcatgtctttcatttattatattctgatgccattataaactagccaagggaaaaaggacaatgtttaacctctgcttacatggactcacaatgcagactgtgcaaaacaagactgcagggctaatatcacagtcagagagttcaagaagctctgaaaaccatgggaaccagtgacctgttcaaaactgaactttaattctacaaggaagagagagcagaggagagagaacaagaaaacagaaagcagaaaaggacaaagcttcaagagaccaccctggccacctggtgccacttggggtctggggtgcttgatggcctcttaatgttttgaagcacagccggcagcatgaggaaggcgtgagatacagggcagcccccatgcacttggatcctttagtttcagcttccagcagggaagtgcttaattgcatccgtgattgagatgatcatttttattgtgttcagcccagagttaaggagagggggcccctccttaggcaagttttgaatttcaggttatttgtcatctcttagccattatcaatggtgctgttactgtcatcatcattatcatcagaagggaagtgttaagcctataattacatgtggcactgtgctaagtgtgatacagggaagcacttggttcttgccggccaggtgtgcataatcaaaacacactctgtgtcagggcagaccaaaag

SEQ ID NO: 702193 - DNA, 581 bp, Homo sapiens
cactagtttccttgctgaacaaagaccaagacctttgctgatatgcatctatttcccacattttgtacaactaaattaaataaccaagtgtagccgttctgggcyaaagtgtgtatccaaggtcaatagatttcccctgcagtgactgagtggatccaacatacttagactggtcacccattgactcatcaagtaagcattagtgttctggaacaggaaatatgtatccatttgagcagtgaaggcatttgtttacagagcaatcagctggatcccagtatcccttaaataatactgcagaaaacaggacttcacaatggagtactccaccctttcccatgtgacacctctttggatgtcagactttaagaaccccattccatcagtatccttttgcagaaaccctatcttccaaaggggagaagcaacccaaagcaaacagataatctgaaagagaaagaaactcaaagagggcagagcaggtggaaggaagtgctcaatgtctctccacccaccaaaaactgcctccaccactttgcccaccattccacccctggtcccagtggaatgacctcaactct

SEQ ID NO: 702194 - DNA, 1796 bp, Homo sapiens
tacttatagaccaaggaaagctttgggatattttctaaaataacaataacaccggcctggcaaagtggctcacgtctgtaatcccagcactttgggaggccaaggcgggcagatcacctgaagtcgggagtttgagaccagcctgaccaacatggagaaaccccatctctactaaaaatacaaaattagccaggtgtggtgacacatgtctgtaatcccarctactcgggaggctgaggcaggagaatcgcttgaacccgggaggcggaggttgcagtgagctgagattgtgccattgcactccagcctcggcaacaaaagtgaaacttaacaacatgagttcaactctgaaaagaccacagttataaaaattattatgatattaattaagttctgaggtactaagcatctgatctaaggcaatggcagtaaaaatggaaaaaaaaaaaaaaaggaatgggtataggagacattgccaaatacaatacaaagaggaatagaggaacaagaggtcacctcccaccatatcaaattctgaatatttagtcaagtttttcttccagggatcagaatttgttaaaccttgcatcctggttaaaaatcaagagctagacataacatgcaattcttacctatgttcttatcatcttagtgactaactttgtatattatctcataatatgtaactgctctttgcttttgttctgtctcccaacctactaaaataatagaagaattttgtgcataaagaacctgatctaaatatctttctacccccagcacctggtccagtgtccaaaagatagtagagactcacaaaatttgagaatagtattgatgatactatttacctgaaactaatggcatagatatcatccaaacagaagtcactggacttgattgcatcattcgtaacttctgcatacaattataaatatgaaaaaaattaacaatgcaggcaatgtactatctgacttatgtaatgtgccttctgtgataacaacttttttaaagatatacttaattgctaaaaaaaaaaaaaagctattgaaatatcaatttcatgaaaaatttgtcaaggtaatttggatgctgtatatacaaagccctatctatttttttctgaatgataactttccaaatctcttaaaaagagtaagaaaaaatgtgcttaaaaataccaaagtaatggagaaaggctaattaaaatgaaattttaaaccttgatgtttgtattactacctagccaaaagaactattttagagaacataagcgtaattttcccatgtttgacattttcaacagctggtggtcagcctctcattccagatacatctggaatgaggttactaatgtcctcttacaccttctccattttcattcgggataccccttaaccctgaggaaactggacttttgactaagctttatataacccttctcttagtctgaggaaattacaaagactcaattcaaaggatttaaggtggctcgtgcctgtaatcccagcactttgggaggccaaggcgggagggtcacttgagtccaggagttcgagaccagcctggacaacggggtgaaaccaagtctctagcgaaagatgggtgtggggcggtcacctgtaattccagttacttgggagggctgaggcatgaaaatcacttgaacgcggaccagggaggcagaagaaaaataaggatttattgagaattgctatgtgttaaggacatgaaggcaaataagatatggtccctgttctcaaggaatttacagtttaacaagagaaagatctcag

SEQ ID NO: 702195 - DNA, 527 bp, Homo sapiens
tgaactttaaagcaactcaggaccaatatgtctcactgccaagttatatttagtctttctggggtgaatagttttatctttttagataaatggaattataagmgttttaaattgctcttgtcttatgttaaatatgaataataatacctataacctgactattttagagagatataatgaggaggatttatgagatgcttgcaaagaactccaagcttcttggaacaaaagcttcacatatctacatttctggaaatataaaaatacttgagcatcaatcgtggcataaaagatgtgctggcattacagtacatattaaactctatgcacatctgatctgatttgaggattttgtatatcattttttctcataagaattctgtaccattttacaaatatttccagtcactgcaccatgatgaactataagctaattaccaatttacaggcaaatttatattataatttttggggagggtgggggttggaaataacaataaatagacatggctaaaattgtcttggcc

SEQ ID NO: 702196 - DNA, 546 bp, Homo sapiens
ccactgcgcccggccagttctgctttctttaaggccatggagtttggtgtttctctgtacaaattgcttttactaagctccttatggaactccataaggagctggctggcttcgtatcatttcaggtatctattcaaaagtgattcttaaaagaggccttcttggccatcttttcaaaatgatgtccccatcatctattatattaacttattttattattctgataatactaattagtatctaaatttttatactgttcattttttaaaatcgccaattactttattcatctcttcacattagaatgttagctttgtaagagacattgtctcatttatcaaggctattttactcacccatgtattccctgcatagaatagtgtctggtatatagcaggggtgacaaacaygtggaaaaatgagcaaatgaatgtgttgtctctgtgatttttctctcttgtcctgcttctcaagtatgagtgtaaatttgtccttaatttctcactgaggaagttgaaacttaaaacattttagaagagaagcaaa

SEQ ID NO: 702197 - DNA, 1670 bp, Homo sapiens
  misc_feature 1376: n = A,T,C or G
tttaaaagtctcagtactcatatccaacactggtaggtatcttaaaaatttccccattcatccttccactgaaactctggcctatcacatccttgctttcccagttcttttcacttctcagggaaacatgataaaaccatgctggggttctgtcatactgatagttaacaaatttccagaccattaggttgacactaatgtgtgacttctgcttgtaaaatttatgtaactggcaccaaaaaagccaaaactgttggtttaaaaaaaggaagtccttaattctactttttaaaaagtagtgaaaacaaacaattccatacacagtggcaccacaaaagcaaccttgcatggaagcatgcagttaaaagatcctcctcaaaattggactacattgatttaaactgtatgttgactccctacttggccattattaagtgctacacacttttttttttctttaagagactggatcttgctatgtcgcccaagctggggtgcagtggctattcacaggtaatcaggacacactacagcctccaactcttgggctcaagcaatcctcctgcctcaaggctcctgagtagctgggactacagaacacgccactgtgctcagctaaatgctacccctacgtatacttcttactttctctttaatctttgtagatgagaaggcaaaatataatggtgcctaggcctcagctaaatgctacccctacgtatacttcttactttctctttaatctttgtagatgagaaggcaaaatataatggtgcctaggccaaaaaatacatttccattgattttttttttttttttttttgagatggagtctcgctctgttgcccaggctagagtgcagtggcgcgatttctcggctcactaccagctccgcctcctgggttcacaccattctcctgcctcagcctcccaaatagctgggactacaggcgcctgccaccacacccggctaatttttgtatttttagtagacacggggtttcaccatgttagccaggatggtctcgatctcctaacctcgtgatccgcctgcctcggcctctcaaagtgctgggattacaggtgtgagccaacgcgcccggcctatttccattgattatagacatccatgaatcattcatgaaatagcaaacaaggcttagacaacctaatgcatggaattaagataaaaatcataatttgcaaagcttactgttaatttctctggttttctcccattatactgagtctcaagctagcaatacaagtcaaaataaatagaaatacctatatcctaatgctaaasaatcacagtaaaataaaaaaaacttaattgcatggctatggataattttataaatgcttaatttagaccncttgtatctagatgttataaatggttcaaaataacatgtatgaatctcagcttaaaaaaaaaacaaaactataaggtgtttgatggaaacagcctgactttacttgctattttatctttaaggggattctggcaaagttagctgactcaaattcagcacctgcctagaaaataacatacatctggcatttgccttccaaagtgaaagtgaacagcctagctaaaaatcctactaactgacccaaatctaatgccaagtatttcaaaagttactgtggtggcatttatgtgaaat

SEQ ID NO: 702198 - DNA, 1670 bp, Homo sapiens
  misc_feature 1376: n = A,T,C or G
tttaaaagtctcagtactcatatccaacactggtaggtatcttaaaaatttccccattcatccttccactgaaactctggcctatcacatccttgctttcccagttcttttcacttctcagggaaacatgataaaaccatgctggggttctgtcatactgatagttaacaaatttccagaccattaggttgacactaatgtgtgacttctgcttgtaaaatttatgtaactggcaccaaaaaagccaaaactgttggtttaaaaaaaggaagtccttaattctactttttaaaaagtagtgaaaacaaacaattccatacacagtggcaccacaaaagcaaccttgcatggaagcatgcagttaaaagatcctcctcaaaattggactacattgatttaaactgtatgttgactccctacttggccattattaagtgctacacacttttttttttctttaagagactggatcttgctatgtcgcccaagctggggtgcagtggctattcacaggtaatcaggacacactacagcctccaactcttgggctcaagcaatcctcctgcctcaaggctcctgagtagctgggactacagaacacgccactgtgctcagctaaatgctacccctacgtatacttcttactttctctttaatctttgtagatgagaaggcaaaatataatggtgcctaggcctcagctaaatgctacccctacgtatacttcttactttctctttaatctttgtagatgagaaggcaaaatataatggtgcctaggccaaaaaatacatttccattgattttttttttttttttttttgagatggagtctcgctctgttgcccaggctagagtgcagtggcgcgatttctcggctcactaccagctccgcctcctgggttcacaccattctcctgcctcagcctcccaaatagctgggactacaggcgcctgccaccacacccggctaatttttgtatttttagtagacacggggtttcaccatgttagccaggatggtctcgatctcctaacctcgtgatccgcctgcctcggcctctcaaagtgctgggattacaggtgtgagccaacgcgcccggcctatttccattgattatagacatccatgaatcattcatgaaatagcaaacaaggcttagacaacctaatgcatggaattaagataaaaatcataatttgcaaagcttactgttaatttctctggttttctcccattatactgagtctcaagctagcaatacaagtcaaaataaatagaaatacctatatcctaatgctaaagaatcacagtaaaataaaaaaaacttaattgcatggctatggataattttataaatgcttaatttagaccncttgtatctagatgttataaatggttcaaaataacatgtatgaatctcagcttaaaaaaaaaacaaaactataaggtgtttratggaaacagcctgactttacttgctattttatctttaaggggattctggcaaagttagctgactcaaattcagcacctgcctagaaaataacatacatctggcatttgccttccaaagtgaaagtgaacagcctagctaaaaatcctactaactgacccaaatctaatgccaagtatttcaaaagttactgtggtggcatttatgtgaaat

SEQ ID NO: 702199 - DNA, 2284 bp, Homo sapiens
aggttaaaagaaaagtcctatatttatttccatgctggctataagggaatgtttaatttttgaaaacacaccaatctgctcatttctcatacatctacttttctgtattcatgtcaacttcaataaataagttttaagtgttattctctccaggtaattctaacattcaatcaagggaaaaatatttcccaaggggcatcagattcaaatatacatacataagttgggattttaaggccctcataggaaaaataattgagcaccttttttgcatacagtagtattagaactacttttctatataaacctgaaaaaatgaaggattctcctctcctagaaatagcactataattattaggtccaccaacctagaaacttggtggcaagtacattggctacctgcctggaagtataagtagatgagaaatgaaaaattaaaacctctatcacttgtgagtgcagatccagatttttacagcctaagaagaaaccaatataaaaatgagccttgaatcagcaaaacctgtagaatccatgtagagacaattgtgraactgtgccatgtggaaatttctacgactcgtagctttctgagttggttttccatttttggggttttcagaaaaaaaccctgaaataaggaaagatcactaaaatatataagccatatagagaaaataaactatgatgaaatattatgcccagtgagaaaaaggcaatattgaagattcaatatatatatagatatatagatatatatatagatatagatatcacagatataacacagtattcaagtatctttaaaatacatatgtttacaatgttcgctgagtggggaaaaaaagaagcaagggaaaaagaagatattatgagagaaaacaaggtattaaaaataattaaatataaattctgtaaataagaaataatggtcatagaaattaataataaataggttaaacaatagtcaagaggaaattaatgagttggaaaacatttgagggaatcatttataatagagctcatagagatattcagatgaatgtatgaaaaagaaatgaagaatgaaggctagcttgaaaggctagcttgagaatatctaatttatgcctttctaggacatcaggagaaaaacactagagggactaagagagtcaatatttaaaggaaaaattgctaagaatatcccaggagtgaaggaaagtatgaattctaagcctgaatgaagatactgagtccctggtaaacgtttatgtctatacaactacataaatgtatatacttctatcaaatattagtcataaatgtaaaaaattcaaagacaaaaatattaaacataacatggtggggagattctttagtatgaaatgatgataaatagctgaattaatattagaaataatagacccagtagcaagttgaataatatagttaactcattagaaaatatatctcccaagccagacaggtacactgacttaactatctttgaagtgcgattgtacaataaaaatgccttcagatcataaaaatccaagtgagtttactacttctagatcctgagtgaaggaaaaatatatactacataattagaatgaaaccaagctcaatcagagtgtagtgaagcaagaggcaatcattatatcatggtggtaacagtaaatattgactataacatcctcaggcagagcagaaagaaaattctgcttaactagatcatgtatgttagaataggagacatttagaagtaaattttcctgtttgaagttaactgccttaatgagaaggaggataaagttcatcattaactttacattttcttagaaaaatgtaaatgtatatatgtgtggtatttgacttccttaaaagttctattacccaatcacagccaggattcttataggatgtagcttctgctaattcaatacaattatacttatctttggaatgcagtagagagacagagaccatttttctgcatgttccaatggaaaacagaaaacaaaacaggacaatagattaactaaaaatatgtcagtaatcttcatacaagtaaatagttatgatactaacatgctaacaattaagtttggctttaaaattcccagcaatatttaatgggctatttgaaaaagctcaagttgaaatacaagaaatcaataaaaaataagatagcagaagataagatctggaacatgtcagaacacttatgatagaaatcctattaaatcatgtgataaataaggcttagtttcaatataaattaaaattgatgctagagaaa

SEQ ID NO: 702200 - DNA, 1348 bp, Homo sapiens
tgaatcattgaactcctaggtatattgggatagttcagttattaaagagaagagaaattggaaaagcctccttaaagccacataatagcatcttttgaaaaatcgatggctataaggctgagtaaggtcaggtaagtcaacttttaattatgtttaacccttttctggtcttagaataggcattctgtggcattcaggagcaacaatgaagatatagaaagcaatcataaggaataaatatgttgttgtataagatacagtgatattgtattggaatgagtcttcattagacttgtgaaagtcttcttgaattttcactctttttcaacaataaccatttaaaataaaaatactattgagttgaactaaaagcgaagacattaccgtgtcactgagccaccatttcatccccacactgtccatgtctagcaatgtttattatgtgagacaaataagcaatttaattgtttaagccactgttgatcttttgttgtttccagctgaacacctaactcgctgttttgtgtacgtcgaatgaatatgtcaaatgaataaacttaggaaatgcagtattacttagtaaataaaatttatttgtcaaatatacaatttcatttcatgacttcatggaaaaaaggaaataaaggtcattttgctaagaactgagaaaacggattcgctatttctaaagttgagctagctttcttacaaattacttgccatctgaggtccaaatatgcctcctgctctttagaagtcattaatctggcgacctgagcacaaaagttctaactgaaatgtttaattcagtgacatgctatcagcgtgacagaggtagacaactttgtacaaattaagttttaaagtgtaggaccaccaacttttctctaaccagagatgtttttgattgggggcaaattatcgttttgtgaatgtatgacagctcaaattttgggaaaatgcaccaggcccacttaatttaaacttttataaatagcatgctcttagttacaaatccatgggagctagaataaaatgatacgatacaaagttagaaaattgacagtggtttcaaatttggaaaattaaaaataatagtcaatgataagtgcatattaatatttgtgamatattacagttaaaactgtactatttagtcttccctattctagacagtctcctgtctaaacagttatagcttttgtaaccagtcttataactactttgcctaaaaatttaattcatatcaccccttctggatttggaaaaccaaacaaagaattttatttcataaaacaattgtcatatacatagcatctatgtctgagttgaaaagagcaagcagaca

SEQ ID NO: 702201 - DNA, 1129 bp, Homo sapiens
gagaaaataaatttctgtgcttttaaaattacccagtctcaaatattttactatagcagcacataatggactaggacatgggcctttacagacatagacacattttgcacatatcttagtggtttacacttaaaagatgaaatccatcacacatgagaggattttgcttagattttgtggatctctttaatgtttgcgtgtgttttctaaatcctattgtattgtatcctctgtctttattaaaaacagcaatgtggcctggcgcagtggctcacgcctgtaatcccagcactttgggaggccgaggctggcggatcacaaggtcaggagatcaagatcatactarctaacacagtgaaaccccgtctttactaaaaatacaaaaaattagccaggtgtggtggtgcatccctgtagtcccagctactcgggaggctgaagcacaagaatcacttgaacccgggaggcagaggttacagtgagctgagatcttgccactgcactccggcctgggtgacagagtgacactccatctcaaaaacaaacaaaataacaacaacaacaaaaaacagcaatgtataaccaaatgtgtagattttgagaggctttgtaataatttaaacaagctaattggaccaggtattgacatgggagtgcactgcttggacataagtgttgcatttgtttagtatgagtagacagtgccacatgcttcttgaaagtggttgtaccaatggacatgctttcccaaaccactccactgaaactgtccttatcaagaacatgctgataaatccagtggcggttacttccttaatagtagtgctgccttcacttggtttccaggacaccacactcatctgctgtttctccaggggatgctcttcttcaggctcttttgctataaaatctttatattatttacctctaagcatggggataccccaggactccttccttgggcctcttctctgtgttacccagacttactccgttgttattctaatctatcctcccagcttaaaatccttgttttattccaatggtaccctacctaaatattaaaccaggacttctcctctgattctaatctcttgtattacctatctgttcaacttttctaatgaga

SEQ ID NO: 702202 - DNA, 1129 bp, Homo sapiens
gagaaaataaatttctgtgcttttaaaattacccagtctcaaatattttactatagcagcacataatggactaggacatgggcctttacagacatagacacattttgcacatatcttagtggtttacacttaaaagatgaaatccatcacacatgagaggattttgcttagattttgtggatctctttaatgtttgcgtgtgttttctaaatcctattgtattgtatcctctgtctttattaaaaacagcaatgtggcctggcgcagtggctcacgcctgtaatcccagcactttgggaggccgaggctggcggatcacaaggtcaggagatcaagatcatactagctaacacagtgaaaccccgtctttactaaaaatacaaaaaattagccaggtgtggtggtgcatccctgtagtcccagctactcgggaggctgaagcacaagaatcacttgaacccgggaggcagaggttacagtgagctgagatcttgccactgcactccggcctgggtgacagagtgacactccatctcaaaaacaaacaaaataacaacaacaacaaaaaacagcaatgtataaccaaatgtgtagattttgagagrctttgtaataatttaaacaagctaattggaccaggtattgacatgggagtgcactgcttggacataagtgttgcatttgtttagtatgagtagacagtgccacatgcttcttgaaagtggttgtaccaatggacatgctttcccaaaccactccactgaaactgtccttatcaagaacatgctgataaatccagtggcggttacttccttaatagtagtgctgccttcacttggtttccaggacaccacactcatctgctgtttctccaggggatgctcttcttcaggctcttttgctataaaatctttatattatttacctctaagcatggggataccccaggactccttccttgggcctcttctctgtgttacccagacttactccgttgttattctaatctatcctcccagcttaaaatccttgttttattccaatggtaccctacctaaatattaaaccaggacttctcctctgattctaatctcttgtattacctatctgttcaacttttctaatgaga

SEQ ID NO: 702203 - DNA, 1129 bp, Homo sapiens
gagaaaataaatttctgtgcttttaaaattacccagtctcaaatattttactatagcagcacataatggactaggacatgggcctttacagacatagacacattttgcacatatcttagtggtttacacttaaaagatgaaatccatcacacatgagaggattttgcttagattttgtggatctctttaatgtttgcgtgtgttttctaaatcctattgtattgtatcctctgtctttattaaaaacagcaatgtggcctggcgcagtggctcacgcctgtaatcccagcactttgggaggccgaggctggcggatcacaaggtcaggagatcaagatcatactagctaacacagtgaaaccccgtctttactaaaaatacaaaaaattagccaggtgtggtggtgcatccctgtagtcccagctactcgggaggctgaagcacaagaatcacttgaacccgggaggcagaggttacagtgagctgagatcttgccactgcactccggcctgggtgacagagtgacactccatctcaaaaacaaacaaaataacaacaacaacaaaaaacagcaatgtataaccaaatgtgtagattttgagaggctttgtaataatttaaacaagctaattggaccaggtattgacatgggagtgcactgcttggacataagtgttgcatttgtttagtatgagtagacagtgccacatgcttcttsaaagtggttgtaccaatggacatgctttcccaaaccactccactgaaactgtccttatcaagaacatgctgataaatccagtggcggttacttccttaatagtagtgctgccttcacttggtttccaggacaccacactcatctgctgtttctccaggggatgctcttcttcaggctcttttgctataaaatctttatattatttacctctaagcatggggataccccaggactccttccttgggcctcttctctgtgttacccagacttactccgttgttattctaatctatcctcccagcttaaaatccttgttttattccaatggtaccctacctaaatattaaaccaggacttctcctctgattctaatctcttgtattacctatctgttcaacttttctaatgaga

SEQ ID NO: 702204 - DNA, 1129 bp, Homo sapiens
gagaaaataaatttctgtgcttttaaaattacccagtctcaaatattttactatagcagcacataatggactaggacatgggcctttacagacatagacacattttgcacatatcttagtggtttacacttaaaagatgaaatccatcacacatgagaggattttgcttagattttgtggatctctttaatgtttgcgtgtgttttctaaatcctattgtattgtatcctctgtctttattaaaaacagcaatgtggcctggcgcagtggctcacgcctgtaatcccagcactttgggaggccgaggctggcggatcacaaggtcaggagatcaagatcatactagctaacacagtgaaaccccgtctttactaaaaatacaaaaaattagccaggtgtggtggtgcatccctgtagtcccagctactcgggaggctgaagcacaagaatcacttgaacccgggaggcagaggttacagtgagctgagatcttgccactgcactccggcctgggtgacagagtgacactccatctcaaaaacaaacaaaataacaacaacaacaaaaaacagcaatgtataaccaaatgtgtagattttgagaggctttgtaataatttaaacaagctaattggaccaggtattgacatgggagtgcactgcttggacataagtgttgcatttgtttagtatgagtagacagtgccacatgcttcttgaaagtggttgtaccaatggacatgctttcccaaaccactccactgaaactgtccttatcaagaacatgctgataaatccagtggcggttacttccttaatagtagtgctgccttcacttggtttccaggacaccacactcatctgctgtttctccaggggatgctcttcttcaggctcttttgctataaaatctttatattatttacctctaagcatggggataccccaggactccttccttgggcctcttctctgtgttacccagacttactccgttgttattctaatctatcctcccagcttaaaatccttgttttattccaatggtaccctacctaaatattaaaccaggacttctcctctgattctaatctcttgtrttacctatctgttcaacttttctaatgaga

SEQ ID NO: 702205 - DNA, 442 bp, Homo sapiens
ttttttggtagtgttaatgcaagatattactatgttaaatcctaatttgcatatatcctagttcattttaaaaaacatgattcttataattaagaatgtaatgaatgttacatcttcagttaaccatgctaaaatttgtgctggtctttaggaatgagcgaaaaattgtaaattaaaatgtttggttctrtatttgctagatttggataccagagcaagttacccacatactttctatatttttatagaaattactgatttatagtatgtatttatatttttcttcatgtgtgcaaaggtattactattttcaaaatgttaatgtttataaatgaaagaatatgtatactcatttcagaatgggtggaaataaaattcaagtttagacattggtattttaaacataatgatattagattctgtatttctctcaatgaaaaca

SEQ ID NO: 702206 - DNA, 664 bp, Homo sapiens
tctctatctttgttatacattttatacttttattatgttattrcatatagcatgttgtcttcttttcggggactttgtgctgattagaaaaacaaaaataaaagaatataatgcaatgcaatatatgttatattatctgtatggttgcaaaacatttatgaacaatggaatttcaatgattttccctggagattgatggggaaggcttgtttttgatctggaagagatcaaagaaaaagtaagctttaaaaggtaatttatggatggtaagggagattctcagctatttgggaaggaaatttgagcacgagcaaagacagcattatgaaagtcagagcaagcttaaagaattgaaagtggcttggaatgcccagagcaaaccatgtgtgaaggaaagtatgtgtgatgaggctgaaaagctcggatgtgtcagattgtgaagccatagaagcccttcggcctttagggtgtaaatatgagatgaatacaaacttttaaaataatggttaattttaataaaagttaataatataaagaatctcaataacagacattgggaaaataatttctatacataaaagtacctaacaatatattaatttcctatttaatctccaaatcatgacaagctgtacaattaaaattcagcaaagtaatttatacc

SEQ ID NO: 702207 - DNA, 664 bp, Homo sapiens
tctctatctttgttatacattttatacttttattatgttattacatatagcatgttgtcttcttttcggggactttgtgctgattagaaaaacaaaaataaaagaatataatgcaatgcaatatatgttatattatctgtatggttgcaaaacatttatgaacaatggaatttcaatgattttccctggagattgatggggaaggcttgtttttgatctggaagagatcaaagaaaaagtaagctttaaaaggtaatttatggatggtaagggagattctcagctatttgggaaggaaatttgagcacgagcaaagacagcattatgaaagtcagagcaagcttaaagaattgaaagtggcttggaatgcccagagcaaaccatgtgtgaaggaaagtatgtgtgatgaggctgaaaagctcggatgtgtcagattgtgaagccatagaagcccttcggcctttagggtgtaaatatgagatgaatacaaacttttaaaataatggttaattttaataaaagttaataatataaagawtctcaataacagacattgggaaaataatttctatacataaaagtacctaacaatatattaatttcctatttaatctccaaatcatgacaagctgtacaattaaaattcagcaaagtaatttatacc

SEQ ID NO: 702208 - DNA, 617 bp, Homo sapiens
tagaggcrtttaatcaacaagagttgagatcactttttaaatgagctcttctcatcctgacacatagattcgaaataccttatctgaacatgattttccaagtttatgcttttgattacacctgggtagaaactgtgtttcctccctctaatctgttgcctcatattcttttcagcaaatgaaacagcatatgttaaggcaataaggcatggccaccctctgggctttcatatgccagaataaagaaaatgaatgttaatgccaaaaataaagaagcatattaaaatgaagatgttttggaatagtatttccctctaacttatggtttaaagttaccattttatgtgattcagaaaactcagactggaataatgaatgttattttccgtggatttttgcaaaaaagaaaacatgactgacttcgttagaagaatttgctttgttaaatgtatacattcacttactctacacataatttgagtgccagcatgtgttagcatatcagtgctagatatagaaacaattcaatatttggttaataatactagtgcacttattaaaattttaaataatttaacactttacctataattactttttaaagtgcgttagttgtt

SEQ ID NO: 702209 - DNA, 830 bp, Homo sapiens
gtgaaggatgcttcttgccacctaatcataacagtaacaagcactctgtatcaagaatcgtctttatgtgcatttccctatttctttctcacacatctgttatcttcttagtattcttattttttaggtgaggaaacaaggtaacctacctatggtcatttccttaaatttggaatattccataactaaataaacttatgtgaccatagacctcagtgcatacaactctggctaataagccaagtttctgttttttgtttttttgagatggagtctctgtcacccatgctggagtatggtggcacgatctcagttcaytgcaacctccacctcctgggttcaagcgattctcctgcttcagcctcccaagtagctgggactataggcgcccgccaccatgcctggctaatttttttagtagagacggggtttggggtttcaccatgttagccaggatgatctcgatctcctgacctcttgatccgcccgcctcggcctcccagagtgctgggattacaggcgtgagccaccgcgcccagccaagtttctgtttttatcctttgttattatccaataatttgagagttttaccaccagtagtttatttcattagataaggtgatttggtagtgtgaccatgttaatgttaattctgatttcagaaagatggtgtttaacaaaggttgtcaattgcatttttgtggtgtaatgcgtaccccctaattttaattaaattttaaaatattttaatctagaatagagttataaccttgcagaggtttgagaatgttgtttatatacgaagtgcttctcaggctggaagtatacag

SEQ ID NO: 702210 - DNA, 830 bp, Homo sapiens
gtgaaggatgcttcttgccacctaatcataacagtaacaagcactctgtatcaagaatcgtctttatgtgcatttccctatttctttctcacacatctgttatcttcttagtattcttattttttaggtgaggaaacaaggtaacctacctatggtcatttccttaaatttggaatattccataactaaataaacttatgtgaccatagacctcagtgcatacaactctggctaataagccaagtttctgttttttgtttttttgagatggagtctctgtcacccatgctggagtatggtggcacgatctcagttcattgcaacctccacctcctgggttcaagcgattctcctgcttcagcctcccaagtagctgggactataggcgcccgccaccatgcctggctaatttttttagtagagacggggtttggggtttcaccatgttagccaggatgatctcgatctcctgacctcttgatccgcccgcctcggcctcccagagtgctgggattacaggcgtgagccaccgcgcccagccaagtttctgtttttatcctttgttattatccaataatttgagagttttaccaccagtagtttatttcattagataaggtgatttggtagtgtgaccatgttaatgttaattctgatttcagaaagatggtgtttaacaaaggttgtcaattgcatttttgtggtgtaatgcgtaccccctaattttaattaaattttaaaataktttaatctagaatagagttataaccttgcagaggtttgagaatgttgtttatatacgaagtgcttctcaggctggaagtatacag

SEQ ID NO: 702211 - DNA, 830 bp, Homo sapiens
gtgaaggatgcttcttgccacctaatcataacagtaacaagcactctgtatcaagaatcgtctttatgtgcatttccctatttctttctcacacatctgttatcttcttagtattcttattttttaggtgaggaaacaaggtaacctacctatggtcatttccttaaatttggaatattccataactaaataaacttatgtgaccatagacctcagtgcatacaactctggctaataagccaagtttctgttttttgtttttttgagatggagtctctgtcacccatgctggagtatggtggcacgatctcagttcattgcaacctccacctcctgggttcaagcgattctcctgcttcagcctcccaagtagctgggactataggcgcccgccaccatgcctggctaatttttttagtagagacggggtttggggtttcaccatgttagccaggatgatctcgatctcctgacctcttgatccgcccgcctcggcctcccagagtgctgggattacaggcgtgagccaccgcgcccagccaagtttctgtttttatcctttgttattatccaataatttgagagttttaccaccagtagtttatttcattagataaggtgatttggtagtgtgaccatgttaatgttaattctgatttcagaaagatggtgtttaacaaaggttgtcaattgcatttttgtggtgtaatgcgtaccccctaattttaattaaattttaaaatatwttaatctagaatagagttataaccttgcagaggtttgagaatgttgtttatatacgaagtgcttctcaggctggaagtatacag

SEQ ID NO: 702212 - DNA, 1154 bp, Homo sapiens
gatatgtgggggcaggcatgttgccaggcacaygtgggagcaagggcaagaggacaatggtgggaatcaacatgtttagatggaagtagcttctaatggcctgtatttgcatatcaaaggttgcctgactggctcttaagagccaggctttcctgctagacaagaaatgtttctggagctgctttgaaagagacaaaaactttccaagaaccgtttttccactctatctaggaaaaataatttcttaataactcctataacagcaagaaaaagaaaagaagtaaatccaggccacagtctcagttttatctgaatattgaaagccagaagtcttttttataaagttttgaaagaattagagagacctctatgttttacttcttcatttttagtaattggaaagacagaatagcacatcgtagacatcaataataattttattgagtgaataaatgaataaagattagctagttgcccatcatgtatgaaggcaaaatgcattgttaaaaatttaatatacatccatacacaccccttagaaaacaaaagaaatctcttaacattgtattgataaagagatgtattctaattaatattttgagcactgggaagtcaagtagaccattagttcagtcaatgacaagaggggctgaatagaatcacagctgcaggtcgccacactagagaacccagaagttagttcagatgttgcttcccaaagatgcttctggataaaacttcaaagaaaatcaatttgtcataactttttttttactcattacaggaataagctgtaactgccacacacacacatgcacatacacacaaattcctcctgaattgactctgagtttaaaaagtcagttttactattcctagacaaatgccccatccctcattccaacacacatggaatgaaaacatactaaaatatggttatcttagatccagaggtttgaggtcaattatctatattttattttctgtgttttctagtcttcatcaggtatttatattgaataattctttgttttcagaaaagatatataaaattattatctgtagtgctaatttctagattttgtcccctagtgattaaacatctttgaaatattcatatgaaaacaggaacccagttttttattctattgata

SEQ ID NO: 702213 - DNA, 1154 bp, Homo sapiens
gatatgtgggggcaggcatgttgccaggcacatgtgggagcaagggcaagaggacaatggtgggaatcaacatgtttagatggaagtagcttctaatggcctgtatttgcatatcaaaggttgcctgactgsctcttaagagccaggctttcctgctagacaagaaatgtttctggagctgctttgaaagagacaaaaactttccaagaaccgtttttccactctatctaggaaaaataatttcttaataactcctataacagcaagaaaaagaaaagaagtaaatccaggccacagtctcagttttatctgaatattgaaagccagaagtcttttttataaagttttgaaagaattagagagacctctatgttttacttcttcatttttagtaattggaaagacagaatagcacatcgtagacatcaataataattttattgagtgaataaatgaataaagattagctagttgcccatcatgtatgaaggcaaaatgcattgttaaaaatttaatatacatccatacacaccccttagaaaacaaaagaaatctcttaacattgtattgataaagagatgtattctaattaatattttgagcactgggaagtcaagtagaccattagttcagtcaatgacaagaggggctgaatagaatcacagctgcaggtcgccacactagagaacccagaagttagttcagatgttgcttcccaaagatgcttctggataaaacttcaaagaaaatcaatttgtcataactttttttttactcattacaggaataagctgtaactgccacacacacacatgcacatacacacaaattcctcctgaattgactctgagtttaaaaagtcagttttactattcctagacaaatgccccatccctcattccaacacacatggaatgaaaacatactaaaatatggttatcttagatccagaggtttgaggtcaattatctatattttattttctgtgttttctagtcttcatcaggtatttatattgaataattctttgttttcagaaaagatatataaaattattatctgtagtgctaatttctagattttgtcccctagtgattaaacatctttgaaatattcatatgaaaacaggaacccagttttttattctattgata

SEQ ID NO: 702214 - DNA, 1154 bp, Homo sapiens
gatatgtgggggcaggcatgttgccaggcacatgtgggagcaagggcaagaggacaatggtgggaatcaacatgtttagatggaagtagcttctaatggcctgtatttgcatatcaaaggttgcctgactggctcttaagagccaggctttcctgctagacaagaaatgtttctggagctgctttgaaagagacaaaaactttccaagaaccgtttttccactctatctaggaaaaataatttcttaataactcctataacagcaagaaaaagaaaagaagtaaatccaggccacagtctcagttttatctgaatattgaaagccagaagtcttttttataaagttttgaaagaattagagagacctctatgttttacttcttcatttttagtaattggaaagasagaatagcacatcgtagacatcaataataattttattgagtgaataaatgaataaagattagctagttgcccatcatgtatgaaggcaaaatgcattgttaaaaatttaatatacatccatacacaccccttagaaaacaaaagaaatctcttaacattgtattgataaagagatgtattctaattaatattttgagcactgggaagtcaagtagaccattagttcagtcaatgacaagaggggctgaatagaatcacagctgcaggtcgccacactagagaacccagaagttagttcagatgttgcttcccaaagatgcttctggataaaacttcaaagaaaatcaatttgtcataactttttttttactcattacaggaataagctgtaactgccacacacacacatgcacatacacacaaattcctcctgaattgactctgagtttaaaaagtcagttttactattcctagacaaatgccccatccctcattccaacacacatggaatgaaaacatactaaaatatggttatcttagatccagaggtttgaggtcaattatctatattttattttctgtgttttctagtcttcatcaggtatttatattgaataattctttgttttcagaaaagatatataaaattattatctgtagtgctaatttctagattttgtcccctagtgattaaacatctttgaaatattcatatgaaaacaggaacccagttttttattctattgata

SEQ ID NO: 702215 - DNA, 1154 bp, Homo sapiens
gatatgtgggggcaggcatgttgccaggcacatgtgggagcaagggcaagaggacaatggtgggaatcaacatgtttagatggaagtagcttctaatggcctgtatttgcatatcaaaggttgcctgactggctcttaagagccaggctttcctgctagacaagaaatgtttctggagctgctttgaaagagacaaaaactttccaagaaccgtttttccactctatctaggaaaaataatttcttaataactcctataacagcaagaaaaagaaaagaagtaaatccaggccacagtctcagttttatctgaatattgaaagccagaagtcttttttataaagttttgaaagaattagagagacctctatgttttacttcttcatttttagtaattggaaagacagaatagcacatcgtagacatcaataatwattttattgagtgaataaatgaataaagattagctagttgcccatcatgtatgaaggcaaaatgcattgttaaaaatttaatatacatccatacacaccccttagaaaacaaaagaaatctcttaacattgtattgataaagagatgtattctaattaatattttgagcactgggaagtcaagtagaccattagttcagtcaatgacaagaggggctgaatagaatcacagctgcaggtcgccacactagagaacccagaagttagttcagatgttgcttcccaaagatgcttctggataaaacttcaaagaaaatcaatttgtcataactttttttttactcattacaggaataagctgtaactgccacacacacacatgcacatacacacaaattcctcctgaattgactctgagtttaaaaagtcagttttactattcctagacaaatgccccatccctcattccaacacacatggaatgaaaacatactaaaatatggttatcttagatccagaggtttgaggtcaattatctatattttattttctgtgttttctagtcttcatcaggtatttatattgaataattctttgttttcagaaaagatatataaaattattatctgtagtgctaatttctagattttgtcccctagtgattaaacatctttgaaatattcatatgaaaacaggaacccagttttttattctattgata

SEQ ID NO: 702216 - DNA, 1417 bp, Homo sapiens
ctgttaatttttatgcaatgtttagaaacgccatacgtatacagctacacaaaataaacacacacaaaaaagaaaaacaatttaaagtaaacatgtatcacacaataaaaacaattataacaaaccaaaactgaatttaccaaaaattttcattaactactagaatcttcactacaaaaacatttaagttatttactagaaactaaaaattttaatgtaatataaatgatccatacattccacagtctgctgtaccttttccaccccgtttatacgcctcctgctaaatctgccataggaaggtactgtgaggataaaaaaatgtgatgttttacaaaatctcttaagttcaaaaacttagatgggaaacaaaagggagaagtttaagtattttagggaatgtgacctcaggtggtcagatctgtacacaggcttggcttactttcaaagtgcttgctttcaccccaggatatctaacccaaagtgtctttttgtttgttcagagtttgactctggagtcagactctttgctttggaatcatagcacttccacttactagttaagtgactttggggcagttacttaaccctctctatgcttcagttctctcatttgcaaaatggaaacaaagtaacagtgcctttctttcaaggtgactgtgaggattaagcaagatatacctaatgcatgtgaagtgcttagaagagcatcttacacctagaaaatgctcaaagttagctattaatgtcatcaatattattttcacctctccattgcctaaaattctacctagataatattggcttaaggagaatcctctttggaaaatataaatagctcatagaaggttcagggctatcagttattcacatttgaatatcagtaagactactttaacacctagctgagagcatttacaatgacaaaataagaaagatttgaagggggaaaagaagtagtaatttggaagcacagatcactttagyaggatgaggcaggcctagcaaggggccagaggctgccactgcaggctaattagaaaatatgatgatttcattcatccattcctgcactaatgtgttcattctttaaacaaagccatttgtagatactagttaatgaaataaaattacactctgtcataaaagccatcagtattgtagacaaacacatacctgtttatgagaacacgcagagggaacttggcctcctactgctgctttcagagagattcgaggcagagtggatgtttttgcaagatacagactgcctggctgtggaaagacgcgttgcctttgtttcttcttaattcgcatatcctgtatatctctggcattctgaagacttgtaattaaatctatcaaagaataaatacttagcaaaaataaaattgaaatttaaaaagcacaacccctg

SEQ ID NO: 702217 - DNA, 581 bp, Homo sapiens
caatgttccacataggaaagactaaacagagtgaactagcacattggcaaaaaggcccmagtcaggctgccattcagggcgtgctggtcaagatgcctccattatatgaataagttaggcctgaagtagcaggctgatggtttggggttgttcactgtttttggatttaggctacggaaagtaccatggtgggggtacagtgttatagtcccacagatgttcaggggagagagaatcttgaagaacatggagaacaggagtcattgtttccagagaaggaaatagagggcaaggaaaatgatgatgcagagataaagggaatcaaagttgggtccttcatctttgctaaggttttagatttcataataaaccaggaagcccaacacataactaataaattgcctcaggaagaaaatctgcatgagggtcttgaaaagacataagttgaaattccatagataagtccccaggagataacagagccagaggtacctctggaaagagcataaaggagacatcagaaggaatctgaaccaggagtatttgctacctctttagcttctccagacgagatagggaga

SEQ ID NO: 702218 - DNA, 613 bp, Homo sapiens
tggggacctgaagaaaggtgggtggaagtggaaggagaagtgggcaccaaaaaggaggttggggacactaaggtgatccacattttagctcagggcctgctctgagccagctgaaataaaccataaaagggcaagtgatttgtgatttttctgaccattccatccttggcctggtttttctttttaaaaaggtttatggaaaatggagacacacccagagggtgtagaggctttcacataaagatccaattggcctctctagtgtggaaagcaagtagggtagaatcaggagagagagaccccatcctgctattcataactcttccraatagccctccagggaaacaatggaaggagagaagccctttgaattccagtcactacattggaaaagcataattatgcaaaatatgtaaacaaaaattagccaactgagagggatgctggagagtggtttcactacagcttgaggtttagatgaacacccctaaacctctgaagactctgccttcagagcactgcaagaatgtccccccacccacacttcctctgtcctgacccttcctttcttgcctgtagccctaatttcctggcatctccttttgtttcccaa

SEQ ID NO: 702219 - DNA, 1325 bp, Homo sapiens
cctaatttatcaccaactaattctgaggagccaaggacaggagagagaatccagaaactaaagtacagagcaattaagaaatggattagyttccacttttgtaaatcaggagtaataacagtatctatttcatagggttgctgggaggtctaaatgaaataatacgtatgaggttcatactagacagctgttattgtttttcttgttatttgtactaatcccattatcttcatctggatatgtcctctctctcaacctagtaatgtagccaatgccaggctatctttgtatagatcctcaaaattctacctgccctacctggaagctgtcaacagatttcacaaatccaacagggctcaaacatggctgtgctctgtgaagggctgctcaaaatattgctttcccttccccctacatctcaaatcagaaggtccacacagtaacaaaccacatttgtttatggctgttcagggagcaacaaaccacatttttctggaaaccttttaaagtctctctcttctcctgagcccatgagttcgaggctacagtgagctatgatcatgccactgcactccagccttggcaatagagtgagaacctgtctcaaaaaaaaaaaataaataaataaataaaaataaagtctctctccctcaagaagcacctgagaagtaattccttatgcattcagactccctgagaagatgtctgaaaacagaggagaggtcaatccaagatgaaatatagaccttcccaacctagatcttctgggatagcctggaatcctggctcagttactcactatttgtatgacaggaaactgctctgagcctgtttcccatctgtaagatgggaatcttctttttttttttttttttttgagacggagtctcgctctgtcgctcagcctggagtgcaggggcacagtcttggctcgctgcaacctctgcctcccaggttcaagcgattctcccacctcagcctcagcctcatcctcctgagtagctgagactataggcatgtgccaccacgtcagctaattgttgtgtttttagtacacatggggtttcaccatgttggccaggttggtctcgaactcctgacgtcaagtgatccacccaccccagcctcccaaagtgctgggattacaggcgttagccatcgcacctggccaatgtaagacgggaatctaatgttacctacctcataaggatattgtgaggaataaatatgatatcatatactaaatgcttatcacagtaccagggacacagcaaagctctcaaaaatgctaactgctccagaaatacatttggattttttaaacc

SEQ ID NO: 702220 - DNA, 1325 bp, Homo sapiens
cctaatttatcaccaactaattctgaggagccaaggacaggagagagaatccagaaactaaagtacagagcaattaagaaatggattagcttccacttttgtaaatcaggagtaataacagtatctatttcatagggttgctgggaggtctaaatgaaataatacgtatgaggttcatactagacagctgttattgtttttcttgttatttgtactaatcccattatcttcatctggatatgtcctctctctcaacctagtaatgtagccaatgccaggctatctttgtatagatcctcaaaattctacctgccctacctggaagctgtcaacagatttcacaaatccaacagggctcaaacatggctgtgctctgtgaagggctgctcaaaatattgctttcccttccccctacatctcaaatcagaaggtccacacagtaacaaaccacatttgtttatggctgttcagggagcaacaaaccacatttttctggaaaccttttaaagtctctctcttctcctgagcccatgagttcgaggctacagtgagctatgatcatgccactgcactccagccttggcaatagagtgagaacctgtctcaaaaaaaaaaaataaataartaaataaaaataaagtctctctccctcaagaagcacctgagaagtaattccttatgcattcagactccctgagaagatgtctgaaaacagaggagaggtcaatccaagatgaaatatagaccttcccaacctagatcttctgggatagcctggaatcctggctcagttactcactatttgtatgacaggaaactgctctgagcctgtttcccatctgtaagatgggaatcttctttttttttttttttttttgagacggagtctcgctctgtcgctcagcctggagtgcaggggcacagtcttggctcgctgcaacctctgcctcccaggttcaagcgattctcccacctcagcctcagcctcatcctcctgagtagctgagactataggcatgtgccaccacgtcagctaattgttgtgtttttagtacacatggggtttcaccatgttggccaggttggtctcgaactcctgacgtcaagtgatccacccaccccagcctcccaaagtgctgggattacaggcgttagccatcgcacctggccaatgtaagacgggaatctaatgttacctacctcataaggatattgtgaggaataaatatgatatcatatactaaatgcttatcacagtaccagggacacagcaaagctctcaaaaatgctaactgctccagaaatacatttggattttttaaacc

SEQ ID NO: 702221 - DNA, 589 bp, Homo sapiens
cccttgkccggcgggaggagagaggcgcgccccacccgggctcctctacacctgccgccgcctgggccgattccgcgggcctcgcccggcgcttcagccgattcccgcccagctccgggctcatgggcgcggtcagcagggcgggccagggcggcggggcgcgacactgggaggaagtgcgggccgcctgcccgggcgcgttaaggaagttgcccaaaatgaggaagagccgcgggcccggcggctgaggccaccccggcggcggctggagagcgaggaggagcgggtggccccgcgctgcgcccgccctcgcctcacctggcgcaggtaggtgtggccgcgtcccctacccggccgggactttctggtaaggagaggaggttacggggaacgacgcgctgctttcatgccctttcttgttctaccttcatcggccgaggtaaaagtgctgaaaccatgtgaataaaatacaggtgggttccgccagcttcgctcctgaacctacccgcgctcgggatccagaagctgcgccgggagagaggggctcaggcctgggcggaggggacggaggtcagaccgtgcggaaagt

SEQ ID NO: 702222 - DNA, 980 bp, Homo sapiens
cccctcttgggctaggggcagcaaattttttctgtaaagggccagaaagtggtattttaggcttttgtgggcctcataccgtatctgtgtcctttgtttatttatttatttatccaaaacaacacctttaacagcatacaaaccattctcttcagggactacacagaaacaggctgagagccagagttggtctgtgggtttgcagatccctggtctacagtaaagaatattgaaatagggtattatggcaatcaccaactctccgtgaaatagcactggggccctggagttgggtagggtacagaagtaccttagaacgctgtcaagaaaaatcaatgaaatcatgcatgggaaattggaacgtattgctggcatttttgacgtagtttcctaaacacagtgcctagaaaatatacaatgaggaatatttaattagggatgaatgctatgatctaccaggggaatcaatacaaatagtaaagattcttgggaaggacattctcaataattagagatgcttaacactatggtgagtgctcagcctttgaaatggtgacagaacgccacacacataaaatgccctttcaggagaaggtgaatgaatggctgtttataagtgatggggcctgggaccttggagcattaagctggcatagaggactccaggtgcctttgcattccagaaggccacattccctactcacctccctgatgtgctttggggctttgagtgtagaaaggttaaatactctttcgaatcaatatcgttaaaagaaagaagcctgtggttaatgatgacaaatggcaatgagccacaaaatcaaaagacaatgtaaatgttgtgactaacattttttaatatgatcatatccagcattcaaaaaaggagtattttttttttccaattacagcactagaaagcaaatcacatttggaagtagtaastttaagtgctttaaaggggctaaggctctgtagtc

SEQ ID NO: 702223 - DNA, 2265 bp, Homo sapiens
tcttctgagtgcttcctctagctgcagaggatttgatggctggggttccagtagtcatcatgggccattaggatgcagcccacactcacaacctagaactatctagcatggggaagatgaattatctaaataatctggatagctcatgatttcgtggaaccatggactcctttcatggaacaaataatgaaaatctgttttttaagtaactattatttgatgtttttctgttgtactcagctagacttcatcacagataatgcactatccttaacagaagaaaaaccataatacctgtctgtcaaggtactcattgtgtctcaaaaatatgtcatttgatcatgctactgatattatcaataactaaaagaaaacagttttacccatctgtaacatcaaaaccatggtaagtgcctttcccttcaagggtcatcatgctcagtgctgaaaatcagggtgctcgatcaatcctctgcccctccacctgttttgctaaaaatagcagaccacaacatgttggtggacatgatttagttatgttcacaactttcactatttccttgaacaagaaataatacatcaagggcaggaggcatattgttaatcagcaattgctctgcaaaataaagcagcatgtgatctggcatttaagtaaaatcctcccttttcataccagtcatcatgagtccccgctggacctgaccccagtgtactttctcagcccatatcctctattaaaaaataaacactaattaaacaaataacaataacggaacatcttcttatgtggcgtggattctctgttgaccgctcatatgttccaccagcatatgatgagctgatccaagcatgaaacagaatcagctaacaccctattgctgtgctcttccacattgtgtgcttttaatgttacatgatatccaacaataaggaaaggaattttaactaaagaccaattgttctttctccctgagaaattttgcaaaaaactttgagtttggtttcataggtctctgttatattacttatgtctctttctgctacaaaatgtataacttgggttatttatcttcttttaaaaactcatttatttcaaattttgcacagtattactttgcatttgttctgttaaaaaataagatcttgattggtgtaccagtagtggtagaagtttaatgaattgataaactttcataaagatcaatgcattgtcatgaggaatccagacccaaaatatcaaatcttcagatatttgtgtcttatctcctatacacacttttttttttggcatgggggacatttaaaatttttctaaatttttatttcaataggttttgggggaacagatggtgtttggttagaagaataagttctttagtggtaatttctgaaattttggtatacccatcaccctaagcagtatccactgtacccaatgtgtagtcttttatcctttaacccccttccaccctatcccccgagtccccaaagtctactgtgtcattcttatgcttttgggtcctcatagcttagctcccacttaagagtgagaacataaaatgtctggttttccattcttaagttacttcacatagcataatggtctccaattctatccgggttgctgcaaatgccattattttgttcctttttatgactgagtagtatttcatggtgtatatatatacatatatatatatatatacacatatacatatatacgtatacacacacacacacacacacacacatacacataccacattttctttatcgactaattgattgataagtatttgggctggttccatatttttgcaattgcaaattgtgctgctataaatatgcatrtgcaggtatcttttttgtataatgacttcttttcctctggggagatacccagaagtgggattgctggatcaaatggtagatctactttttgttctttagggaatctccacactgttttcgactgtggtcgtgtactagtttacatttttttgacttagaaaattatcatacttacagactgacagatggactgtaggcacagaaagcttcacggtgctttatgacattataagtttagtattttgctactattttatctcgaccttcatgattcactgaaccatgagttaggaatataaaggaaaaatgcagtttaacaaacataagaaagtacatgcaacaaacatgaaaatacactagctgtcatgtcaaaaccctgctcacttcagtagggatggcaccaggttcaagaga

SEQ ID NO: 702224 - DNA, 590 bp, Homo sapiens
gactttcttgggccacattggaagaagaagaagaattgtcttgggccacacataaaatacactaacactaacaatagctgatgagctaaaaacaaaaacaaaaacaaaaaaacaaaaatcacaaacaaatctcacaaatgttttaggaaagtttgcagagttgtgttgggtcacattsaaagctgtcctgggccacacgcatcccacaggctgtgggttgtacaagcttgctctatcccctccttccataagtaaaatgtggattcagtgagtgctaacaaaagcctaacaagaatgtaaccacttcctcattgcctatactcttactctctttttgccttttgtcttttcccacctgctcactctttccccctttaaatactgaagtcctcaaaaccctctttggaagaatcacaagtcacaaaaccaaccgtaacttgtgtttcttttttcctaagtgtgtcctcaactttggcaaaataaacctcaaaaccagttgagacttggcctcagtctctttttgtttgtttggttggttggtttacaaacccttcactatgattaaaactctcagctcacatgtaacagat

SEQ ID NO: 702225 - DNA, 590 bp, Homo sapiens
gactttcttgggccacattggaagaagaagaagaattgtcttgggccacacataaaatacactaacactaacaatagctgatgagctaaaaacaaaaacaaaaacaaaaaaacaaaaatcacaaacaaatctcacaaatgttttaggaaagtttgcagagttgtgttgggtcacattgaaagctgtcctgggccacacgcatcccacaggctgtgggttgkacaagcttgctctatcccctccttccataagtaaaatgtggattcagtgagtgctaacaaaagcctaacaagaatgtaaccacttcctcattgcctatactcttactctctttttgccttttgtcttttcccacctgctcactctttccccctttaaatactgaagtcctcaaaaccctctttggaagaatcacaagtcacaaaaccaaccgtaacttgtgtttcttttttcctaagtgtgtcctcaactttggcaaaataaacctcaaaaccagttgagacttggcctcagtctctttttgtttgtttggttggttggtttacaaacccttcactatgattaaaactctcagctcacatgtaacagat

SEQ ID NO: 702226 - DNA, 590 bp, Homo sapiens
gactttcttgggccacattggaagaagaagaagaattgtcttgggccacacataaaatacactaacactaacaatagctgatgagctaaaaacaaaaacaaaaacaaaaaaacaaaaatcacaaacaaatctcacaaatgttttaggaaagtttgcagagttgtgttgggtcacattgaaagctgtcctgggccacacgcatcccacaggctgtgggttgtacaagcttgctctatcccctccttccataagtaaaatgtggattcagtgagtgctaacaaaagcctaacaagaatgtaaccacttcctcattgcctatactcttactctctttttgccttttgtcttttcccacctgctcactctttccccctttaaatactgaagtcctcaaaaccctctttggaagaatcamaagtcacaaaaccaaccgtaacttgtgtttcttttttcctaagtgtgtcctcaactttggcaaaataaacctcaaaaccagttgagacttggcctcagtctctttttgtttgtttggttggttggtttacaaacccttcactatgattaaaactctcagctcacatgtaacagat

SEQ ID NO: 702227 - DNA, 1411 bp, Homo sapiens
  misc_feature 777, 778, 779, 780, 781, 782, 783, 784, 785, 786, 787, 788,789, 790, 791, 792, 793, 794, 795, 796, 797, 798, 799, 800,801, 802, 803, 804, 805, 806, 807, 808, 809, 810, 811, 812,813, 814, 815, 816, 817, 818, 819, 820, 821, 822, 823: n = A,T,C or G
  misc_feature 824, 825, 826, 827, 828, 829, 830, 831, 832, 833, 834, 835,836, 837, 838, 839, 840, 841, 842, 843, 844, 845, 846, 847,848, 849, 850, 851, 852, 853, 854, 855, 856, 857, 858, 859,860, 861, 862, 863, 864, 865, 866, 867, 868, 869, 870: n = A,T,C or G
  misc_feature 871, 872, 873, 874, 875, 876: n = A,T,C or G
gcacgtgatctatcctgaagaatgttccctgtgcatttggggagaatgcatgctctgctggacttgaattgaatgttctgtatctatctgttaggtcaatttggtctctagtgctattcaggtctgctgtttccctactgattttctgtctgtatgttctatctattgatgaacgtggggtgttgaaatctcctaattgtattgtattgctttctgtgtctcctctctgatctgtaaatgatagttttatatgtctaggtacttygatgttggatgcatgtgtgtgtgtgcataactgtatctttctgataagtgaaactttgtatcacatataataattatataagacaaagatctttgtcttttgtgagagctttttacttaaaatctatttttttctgatatatatgtagatactcccacctcactctcttttggttaacatttacatgaaatgtcttctttcattccttcttttcagtttcagtgtatgtgtgtcctttagtctgacagtcttgagtgatcatccaggagcaagatggcggaataggactctccagtgatggttccctgccggaacattaatctgaacaactatccacgtccaaaaatccttcacaagagctaaggaagccaagtgagagatccccatacctggttacagcctaaaagtaagaaacgacacactgaagagaataagaacaacagttcagcatgacctgtgtcactcctgtcccaacgccaggtagcatagtgtgaggagcgatgccgtctagnnnnnnnnnnnnnnnnnnnnnnnnnnnnnnnnnnnnnnnnnnnnnnnnnnnnnnnnnnnnnnnnnnnnnnnnnnnnnnnnnnnnnnnnnnnnnnnnnnnnaatcagcaaaaatatgtgaaacattagttctcagacatgagacacccggagagggccccctctgtccttccctgagagctgatcagctcctgcatctgaagaaatgaccaaagaccaggagagaaccacacagaagcatcggagggacagcacctggggctctcatggggtcaggaatagtgtctgctcccaatagatggactaagtaaaaagtatcataattcacaagggttttacatagcacagaagaaaaagttaccctatatcaactgttgatcttgtgaatccaggaactctggattcaaggtggtcgggcacatcttgatttaggcatttcagggacacatgagacatcaatcaatataagtaagaaggacactagttccatccagaaaggctgagacaactcaaagcaagtcctccccacttagggcttccaggtcacaggtaggtgagagacagatggttgcattcttttgagtttctgataagtgtttgcaaaggaggtcatgagaatattcatctgtctctgtga

SEQ ID NO: 702228 - DNA, 1411 bp, Homo sapiens
  misc_feature 777, 778, 779, 780, 781, 782, 783, 784, 785, 786, 787, 788,789, 790, 791, 792, 793, 794, 795, 796, 797, 798, 799, 800,801, 802, 803, 804, 805, 806, 807, 808, 809, 810, 811, 812,813, 814, 815, 816, 817, 818, 819, 820, 821, 822, 823: n = A,T,C or G
  misc_feature 824, 825, 826, 827, 828, 829, 830, 831, 832, 833, 834, 835,836, 837, 838, 839, 840, 841, 842, 843, 844, 845, 846, 847,848, 849, 850, 851, 852, 853, 854, 855, 856, 857, 858, 859,860, 861, 862, 863, 864, 865, 866, 867, 868, 869, 870: n = A,T,C or G
  misc_feature 871, 872, 873, 874, 875, 876: n = A,T,C or G
gcacgtgatctatcctgaagaatgttccctgtgcatttggggagaatgcatgctctgctggacttgaattgaatgttctgtatctatctgttaggtcaatttggtctctagtgctattcaggtctgctgtttccctactgattttctgtctgtatgttctatctattgatgaacgtggggtgttgaaatctcctaattgtattgtattgctttctgtgtctcctctctgatctgtaaatgatagttttatatgtctaggtacttcgatgttggatgcatgtgtgtgtgtgcataactgtatctttctgataagtgaaactttgtatcacatataataattatataagacaaagatctttgtcttttgtgagagctttttacttaaaatctatttttttctgatatatatgtagatactcccacctcactctcttttggttaacatttacrtgaaatgtcttctttcattccttcttttcagtttcagtgtatgtgtgtcctttagtctgacagtcttgagtgatcatccaggagcaagatggcggaataggactctccagtgatggttccctgccggaacattaatctgaacaactatccacgtccaaaaatccttcacaagagctaaggaagccaagtgagagatccccatacctggttacagcctaaaagtaagaaacgacacactgaagagaataagaacaacagttcagcatgacctgtgtcactcctgtcccaacgccaggtagcatagtgtgaggagcgatgccgtctagnnnnnnnnnnnnnnnnnnnnnnnnnnnnnnnnnnnnnnnnnnnnnnnnnnnnnnnnnnnnnnnnnnnnnnnnnnnnnnnnnnnnnnnnnnnnnnnnnnnnaatcagcaaaaatatgtgaaacattagttctcagacatgagacacccggagagggccccctctgtccttccctgagagctgatcagctcctgcatctgaagaaatgaccaaagaccaggagagaaccacacagaagcatcggagggacagcacctggggctctcatggggtcaggaatagtgtctgctcccaatagatggactaagtaaaaagtatcataattcacaagggttttacatagcacagaagaaaaagttaccctatatcaactgttgatcttgtgaatccaggaactctggattcaaggtggtcgggcacatcttgatttaggcatttcagggacacatgagacatcaatcaatataagtaagaaggacactagttccatccagaaaggctgagacaactcaaagcaagtcctccccacttagggcttccaggtcacaggtaggtgagagacagatggttgcattcttttgagtttctgataagtgtttgcaaaggaggtcatgagaatattcatctgtctctgtga

SEQ ID NO: 702229 - DNA, 851 bp, Homo sapiens
tttttaaaaattttccttcagtcaaaaattcactgagtgaagatgagtactatatacaacctcttccaggatacccctttctggatattggtcatgcatacactgcatacactcaacaccattgccaaaattttgacaacttgccctcagaaagattagctactttgttaaattttgattcttccctttttttaatttagtttctacccttgaatcacaggatttcacacatacattgctatacatatcagagttcagtacaagatagaaaaacaactccaaatatyttaagcagaaagaaatttaacagggaattaatgcttgattaactctttttccttgttattcatagtcatccttagagaggtagcataattttaccacattaggataatctgcactttcggtgtcttgtctttcaatatcttaaatgtttcaaaatgttctgtactatacatttgatgatatttatcatacatggtatcattaattgattcaatccttgagtcaataaatatttgtgaaataactactattcaccagacacttttttcactcactcttgatatcacagtaaggaaatctgcctccaaaaagtaattaatttgtgacatagcaaaccccagaagggaaaatttgaggtaacacaatgagttcacttgtacacatggtcaactatgtgtcactgagatatccaagtaaagacaaccagtcagcgattggacagaaaagtctcaagctcaggagagggtaatagatatattagatattagaagctgctagcacagaaagggcatttggacctgaagtgggtatatacttcctaagaaatactgcctaagaaatatgta

SEQ ID NO: 702230 - DNA, 851 bp, Homo sapiens
tttttaaaaattttccttcagtcaaaaattcactgagtgaagatgagtactatatacaacctcttccaggatacccctttctggatattggtcatgcatacactgcatacactcaacaccattgccaaaattttgacaacttgccctcagaaagattagctactttgttaaattttgattcttccctttttttaatttagtttctacccttgaatcacaggatttcacacatacattgctatacatatcagagttcagtacaagatagaaaaacaactccaaatattttaagcagaaagaaatttaacagggaattaatgcttgattaactctttttccttgttattcatagtcatccttagagaggtagcataattttaccacattaggataatctgcactttcggtgtcttgtctttcaatatcttaaatgtttcaaaatgttctgtactatacatttgatgatatttatcatacatggtatcattaattgattcaatccttgagtcaataaatatttgtgaaataactactattcaccagacacttttttcactcactcttgatatcacagtaaggaaatctgcctccaaaaagtaattaatttgtgacatagcaaaccccagaagggaaaatttgaggtaacacaatgagttcacttgtacacatggtcaactatgtgtcactgagatatccaagtaaagacaaccagtcagcgattggacagaaaagtctcaagctcaggagagggtaatagatatattagatattagaagctgytagcacagaaagggcatttggacctgaagtgggtatatacttcctaagaaatactgcctaagaaatatgta

SEQ ID NO: 702231 - DNA, 1509 bp, Homo sapiens
tttgtgaattggggcctggacattccaggtagaacaattatttgctcctttgatgtaagacagtatcaagcttttagtcaatcttattagaactctgccatatctctcacttgtatagccgctgaggatctttcctgtttccatactcctttccagggtatatgacttttaagttacctgagttctgatcagcaaatggactcaggaagaacaggtagtcaaggcaggcaatatttccaccacagtttcagaactccctactttgtggtactaagttaatacatttgtgcagccactaccttttcaaaggtttcttcttacaacctcaaatactatgactggttcacaaccttttccatagtgctaaattatttgaccaaacaccgcatatataccatattttttcaaagccaaactgtatcccaaagagagagaaggagagagaaagaatagcagtaaaaatacagtgttatttcaggttgatatttaaaaacaattgtgctggttaatggtttcctcgggggaaatgacaattgaaagtcggtattttctactttcaaatacaagtcatggtgtttattcgctgcctttacaactgaatagatggaattcgctgaacaaactttgattctaccctcaattacaactaattccctcacaaagcaaaatttatttcacaactaaacattatgtacattcaagattactagaaaacttaggacataaggtgcaagtgcgacaatattaggagaaaagaaagagtgtgtatcagtttaacaggttttcacatgcaaattcaccaccacagggttcgctgtcttggcaacattgaaaataataataattaacgttttaagacacctattttgtgtcaggcaatgttccaagtcttttctatgtattattttatttcctacttatgaaacccaaagaaattgggttggtattattgtatctctaatttttgaagagtgaaacaggcagaaaaggtaacttgcctagttggagatggcatctgatctcaggcaggctaacaatggagcccacagtttttactactattaggggaaaagaccaacactatcgaatgaaatagattggatcaaatctaagtcactgattgtgtgagcttatgcaaattatttgacctttctgcctagatttgtttagactataaaatagaactaatgataatacttttgtcagacagtggatttgatgattaaatgcggtaaatcaaggtaggatcttacacatagtatttatggaatctatttcagttaatattattaatgtctttcatttgtagggctcttcagcatttcccaaacacttttmtatagttgttcagttcatcctcacaaattctgtcatcacacagttaaggtagacattcccatactcatttcactgatgagattcaaagaaatcaagtatactgtccaaggtcacccatagtaagtgaaggaaccagttcttctgacttcaagttcagtaagaattctgctg

SEQ ID NO: 702232 - DNA, 1218 bp, Homo sapiens
aatcttgaaagctaccgatttggacattgtattagacaacaaacatatctcagctaccaggcttgtacaggaatagataagttttgtggaggactgcagtgtaccaatgtgacccatcttccccagctgcaggaacatgtttcattccatcactcagtgagaggagggtttcagtgttttagactggatgaacaccatgcaacagacatgactgatgttgggcgtgtgatagatggcactccttgtgttcatggaaacttctgtaataacacccggtgcaatgcaactatcacttcactgggctacgactgtcgccttgagaagtgcagtcatagaggggtctgcaacaacagaaggaactgccattgccatataggctgggatcctccactgtgcctaagaagaggtgctggtgggagtgtcgacagcgggccacctccaaaaagaacatgttctctcagacaaagccaacaatcagagatgtatctgagagtggtctttggtcgtatttacgccttcataattgcactgctctttgggacagccacaaatgtgcaaacttatcaggaccaccaccgkttaggaagagacagttactaaccctgaataagactaattcagcctcccgatccctgtaaagatacagagaatataacagcaaaatctatgaaataggatcaggcgaagggatggcaaagctcaagtccacatttcttgaagtccacaggaggcacatggtcctgtctcacgtcacagggaaaggggaggcattggcttctatcccaggttcttgtaggtcgctgatgttcactctgaaataaatcttcaaaaacacacattggtgccttccacattttcttagactcctctgggagcccaaacttggccagaacctctggcctggagagacatgaatgagcatctggctcttgacctgaggtcgctggtcccggaattaacggaagttgccaccagctccttacagggcacgttcatgacatttctccagaagagagctccagagcaataagcttcctcattccccaggtaatcagtccttctctaaacccgaagtcagtttagggtgatccagggctactccctgttccctgtctgttccttacaggggtgctgtgggctttgcagtgagagggacttgggttcaaatcccccaccaagcaaatccccctacctggggccgagcttcccgtatgtggg

SEQ ID NO: 702233 - DNA, 622 bp, Homo sapiens
tccagtatcatctattttgtgggaaaacatagctatgttagtataaaaacatatatcaaggcttccaattatatttgatattctgattcaggcttaaggtcaactgattattcagattagacccaggcctcatcatctttccctttttccctraaggctgaaccaattaagatctcagttaaagaaacactttttgagatcttcccaaaactttctcactgttatccctagatgagtccacttggaaatgttggatgatccagaagggtcaaaaataaaccttggcacatttatttaaaaatgaagcaggtggagactggaggtcagcagtgaagactgagcgtacacacagcgtgctcttagtcaccactcctccaagaggagctgtccagggtatgatagccatggctcaaaatgtgtctgctacatactctcctaaagagtcaggtgtaatcggtgcttcctaaatcaggaaagactgcagtgccctttacatctgcttgtaaccacaatatggttattgggtgggctccaaataactgctgtacttgataatgttaccttccaacactgacccttttaaaggccttctaagaaattttggatgtgagcgccactgtgt

SEQ ID NO: 702234 - DNA, 622 bp, Homo sapiens
tccagtatcatctattttgtgggaaaacatagctatgttagtataaaaacatatatcaaggcttccaattatatttgatattctgattcaggcttaaggtcaactgattattcagattagacccaggcctcatcatctttccctttttccctgaaggctgaaccaattaagatctcagttaaagaaacactttttgagatcttcccaaaactttctcactgttatccctagatgagtccacttggaaatgttggatgatccagaagggtcaaaaataaaccttggcacatttatttaaaaatgaagcaggtggagactggaggtcagcagtgaagactgagygtacacacagcgtgctcttagtcaccactcctccaagaggagctgtccagggtatgatagccatggctcaaaatgtgtctgctacatactctcctaaagagtcaggtgtaatcggtgcttcctaaatcaggaaagactgcagtgccctttacatctgcttgtaaccacaatatggttattgggtgggctccaaataactgctgtacttgataatgttaccttccaacactgacccttttaaaggccttctaagaaattttggatgtgagcgccactgtgt

SEQ ID NO: 702235 - DNA, 1731 bp, Homo sapiens
tgaataatgagaagcaacacccaaatagtatgccatatgccttgggtgagactcaagacatactagcttcaggtgagacctagcacattcccagctgtggtgactacagtgacagactccttctgcttgagagaagcaaagagaaaggtcaaggggactttgtcttgtaccttaagtaccagcacagtcaaatgggcatagtgcatcaagggggctcttgaggttccctattctagcccatggctcttttatggcatttctggagcttctctgggccagaggggagcccatgtccatgaaaggtgattcccaggcatagcagcattcaccacaagctgactgaagagcctctgggccttaagtacacacaggtgggagtgtggcagttactcaccataggcctgtgatggtggtggccacagggtcattctcctctgcctgtggaaggaagagggaagagtgggaagggctgtgtcttgtggcttgagggccagctcagttgcagtataatagaacaccaggtagacgtctaaggtttttgactccagtccctgggtaccagaaaacacctctagacctacttggggcctggaggactcgctgcatggaagggaaggactcaaacctggcctcaggtgatgtatctaatgtaaactacataatctataagaaatatgtaaataatattttcctatgatatataacctcagttcctaacacagatgtccagaggcaaatctttcaaattcacaagcaaaaattagatagaagcaagttacatgtgaacaaatggaatcagatgcaatgagagaaaacagctagcacattatatacatagctgaaagctggacagaataaaaacttgaattttagattcaatgtatttagaagcacaatagaattcaaatggtacatttaaacatgtgagagtgtttttctactctaaaactggagaggagaggggaggaggatttaatgagataatgaacattatgtaactgtcacaataaacatttaatacatgacagtggttgttgttatgcttactatcttagaagtcaaatgttctttaaagaaagtgtccaaaagtagatttatgccataaatggtgccaagaattagggcaaagggcaggtcaaaggtgaataggggatatgatgtagcaattgtcagctttggttagtaacctggttaatgtcctcctttattataaatagggatctaattcaaaggaaggaacagtataatacatacacaatatacttttgcaaccatctgagctgacaaaaaaagcagggtcccacaatagcagaggcttatgagaaaaagtctgaactgaatatatgaacacctaagttttaggcctctttcttctaacagccaacataactttggatcattctaacctctctggtctcagtttctgtgatacgaggaaattgagcttaataagactagaggtcctttctgacactaacattctacactggtgtattcctctcacatttttamagttaaatttatggtttattttttaatataagataattcatcaccagtatagtaacaagatgagaaggcatctgagctaaggaaatagatgtttttccatctgcctcttgctgtttttctatcatagagcaagatcttcctagtaaagggttgaaggcaacttttctgtgtcaaattagctgttgctcagcaaatagaagttaaatgccactatacgga

SEQ ID NO: 702236 - DNA, 696 bp, Homo sapiens
aaataaatgaattaatgtatgatcaagcccctagcacgtaagagctgccccatgtatgctaacattgcgtgccgtagctactaccactaaaactaattattgttcctcaacacaaatatgagtctaagattgctctttgtgattcaggcctgaggtgggaagagggaagaggaagacagctgttcttgactgggaccatatttcctgagggcagatgtccctcttctgataacagattccctaccagtcctttctcaaggcccagactgatcaasagccaccattgggtttctccaaatggtggtgcccaggacacagggtgttttcagtatttatttatttatcttttgggagatgaagtctcactctggcacccaggctggagtgcagtggtgcaatctcggctcactgcaacctctgcctcccaggttcaagcgattctcctgcttccatctcctgaatagctggggttacaggcatgtgccaccatatccagctgatttttgtacagttagtagagatggggtttcaccatcttggacaggctggtctcgagctcctgacctcaagtgatccgcccatcttggcctcccaaagtgctgggattacaggcgtgagccaccgctcctggccctgttttcagtgtcctccagtgactccccttacttctccttgggagccaggtctcaccactta

SEQ ID NO: 702237 - DNA, 608 bp, Homo sapiens
gattaaaaagagatttaatggagctctctatctttactttgagttgaccagggaacagaaagcaaaaggccatatcattcctgcaaaaatagcttcttctatttagatactttgcactgtgaaagaaaaatcaacatatatatgtctcacaatatgtacccagaactgtagacattagacattgtagcttaaacaggataaagcagaagaggaaaaaggtgggaagcagtggggaaaaaccctcagataamcttgtatggggaaactgagagaaggggtaaaaaaatggaggctacagatgaaggttaaaatgtgggaaatttcttggactatttaaagctttattttctttgacctctcttctgttgttcttcgattagaatgtcattgtagggtgttcaagaatttgaaggccatatggatacattccacagaaaaaatatcttctcaaggataacatcgttagtgtttcattatgcacatgaaggaatttaaggttttctttttttgtaactctgttaaaagtatatctgatgagaactcaagaggcatatttcttttcctaaacatcttatgtcttattagtttgttcttactgtattaattga

SEQ ID NO: 702238 - DNA, 594 bp, Homo sapiens
gtcaggaggtgaagccacttcttcacagtggagtctgtctgcccagagagccagctctgccagcatacctcacttcgccctggctcagmaccagtgtttccgacctgaaggaggccctgaggtggctcctgtccaggagagggcctggaatggtctgagggcctgaaagctcttatcctccttgtccaccagtgaccagacctcccaggggctctctgctctgcttctcggttcccgcatcagctcccaggaacacttgagcccaaccctgcatctctgtccaattgcttagaactctgagccccttctcagtgctcccctggggactagaccattatgaaattgctctgatatctgttttctcacctcatacatatgacaaatgggtatgagggactgagaagaggctcagaagaatgaagtagtaactagaatttttgaatgtctaccatgggctgatcacagtggtaattattttatgtgcatgacatcaattaatgcttaccctgcagatggctggttctcatgataagcaggggcagagccaacactagaacccagggctcctgactcgcagagttcagtgttctttcc

SEQ ID NO: 702239 - DNA, 1591 bp, Homo sapiens
caaattccctgccttctgcaagttgaatgtcttgctgaatgtgtctaggggttcatcttcagtaatcgacattccactagtgccagttaacttctttttttttttttttttccagttaacttcatgacatgtagacattcaaaacttgagccttggatgttcctgtggacctgacagttaaaaatataaagaacctaagattcaaatccaactttctctgtttgccttgggttgaataacttatcttttggagaacagctttaagtgccttggacactgataaaattcagctatattgttgacactcatctcttttgtcttatgcttagccatatttaaatcttaaatttaatagagtctagtgaaaaaatgagtgggaagaatgaatataaaagtaataatataaggaaaaagggaaagtaaactatttagaatgtagttttgttatattcccagcatttcaatatttattagttacttgtaaattactgtggctgtgtagcttataaatgtctgtgcactatattaattagaagaccatagaacatgccagcaggttggctaatgctatgggggattttaccacagttgccattgtggaagaaattatttggtacattaataaaaaaagttggtaaaacatggttttatacctcagtgtataagatgtacaagacaaatatgcttatttctttttctagaatgtaagtgatattatttgcttatgacactaacactaggaatgacagaagtcaatcagcctttacagctatcaaaatataatgagatcccaatgatgattcttttttactttgaatgttaattagtttgggactttgattggctggcaaacattttatcattgtcagaatttaatttagatttcaaaaatagcttgcaggattttaaacatggtgtggtattctaaagcctttttttaaaaaaagagatctttttgagagaaacaaatgagsattgtaaagtttggggacttacctctgcagcactgtgaaaataaacttttattaagctgagaaacaaacaaacaaacaaaaaaacaaatagaacaagtacactaaaataataacaagccgagtatggtagatacataaacaagtacaatagtttgtttgatatcattattgataactatggactctagttagtaacaatgtaccaatattgattcatcaactataacaaatgtaacacaccaatgcaagatgctaattataaaggaagctgtggggaggtaggaagcagtataggtgggaattctctctactttccactcaatttttctataagcctaaaactgctctaaaaaataaattttattaatttatacatatatttgtaaatgtagatgatagatgcagactacctgagtttaaatcctggctttgttccttacttagttgggtgaactaggctagtgatttaatctcaactttcttgtgtataaattagaaatactgcagtgactactacattataagattgttttgaggattaatatgcataatttccttggaaacttgctatttaaaatatggttcttagacatgcaacattctcattcacctgggag

SEQ ID NO: 702240 - DNA, 580 bp, Homo sapiens
acacagtaataagtgaacaaaataaatctatcctcactccagctgatgactgtatagcaacaattcctcaaaccattcttttctggaagggtctgatttaagtctatgttggaaaaacatagccaagttccaattagaaaagttttcctgaaggtcagactgaccccagagtgagcagctaattttctagtggcctgtgggtcaatcgtaccttttattacttttccaaacatacgaaggaagcattaaacagcttggctgagtttcatctgtgaaaatggtccagctctggcccctggaataaagtagaacagagccccagtttaacattcagatcactgctgctattttccttctttacctttaagagtttctgaaycccatccaccctgagcaggaactgttacactacatataactatagttggaatgttcttttttgtttttgtttttgtttttgttttcactttatttattcctttgaaacaagtcacttaatacagcatttagatatttaaagttatatacctcataaataaaatcaatgcatcttgatgacaatggcaaaatcacataagag

SEQ ID NO: 702241 - DNA, 580 bp, Homo sapiens
acacagtaataagtgaacaaaataaatctatcctcactccagctgatgactgtatagcaacaattcctcaaaccattcttttctggaagggtctgatttaagtctatgttggaaaaacatagccaagttccaattagaaaagttttcctgaaggtcagactgaccccagagtgagcagctaattttctagtggcctgtgggtcaatcgtaccttttattacttttccaaacatacgaaggaagcattaaacagcttggctgagtttcatctgtgaaaatggtccagctctggcccctggaataaagtagaacagagccccagtttaacattcagatcactgctgctattttccttctttacctttaagagtttctgaatcccatccaccctgagcaggaactgttacactacatataactatagttggaatgttcttttttgtttttgtttttgtttttgttttcactttatttattcctttgaaacaagtcactyaatacagcatttagatatttaaagttatatacctcataaataaaatcaatgcatcttgatgacaatggcaaaatcacataagag

SEQ ID NO: 702242 - DNA, 672 bp, Homo sapiens
ttcaaatatattcccttttcttcttttcctttgccactgcttcagtccaagattttgtcgttttctgacttgactgctgtaatgacctcctctctattctcttctattccatccttcctctttcccaatccattcttcacactgatccagagtgattcatgatgaactcacgtgatgtcaagttattcaccattgcccttaaaatccagaatcttcaacatagtccacaaggtaccatctaacccttggctacctctcaagcttcacattcctcctgttctcagtgtgtcagccatgttgacctgaagactttgcatgctattcttttttctttgagatagagtctcgctctgttgcccaggagcacaatcatggctcactgcaacatycacctcccaggttcaagcgatccttctggctcagcctcccgagtaggtgggattacaggcacccaccaccacacctggctaattatttttgtattcttagtagagatggtatttcaccatgttggccaggctggtttcgaactcctgacctcagatgatctgcctgccttggcctcccagtgcatgctcttcattctgctatttcaccgtgtttgccaggctgctttcgaactcctgacctcagatgatctgcccaccttggcctcccagtgcgtgctcttca

SEQ ID NO: 702243 - DNA, 672 bp, Homo sapiens
ttcaaatatattcccttttcttcttttcctttgccactgcttcagtccaagattttgtcgttttctgacttgactgctgtaatgacctcctctctattctcttctattccatccttcctctttcccaatccattcttcacactgatccagagtgattcatgatgaactcacgtgatgtcaagttattcaccattgcccttaaaatccagaatcttcaacatagtccacaaggtaccatctaacccttggctacctctcaagcttcacattcctcctgttctcagtgtgtcagccatgttgacctgaagactttgcatgctattcttttttctttgagatagagtctcgctctgttgcccaggagcacaatcatggctcactgcaacattcacctcccaggttcaagcgatccttctggctcagcctcccgagtaggtgggattacaggcacccaccaccacacctggctaattatttttgtattcttagtagagatggtatttcaccatgttggccaggctrgtttcgaactcctgacctcagatgatctgcctgccttggcctcccagtgcatgctcttcattctgctatttcaccgtgtttgccaggctgctttcgaactcctgacctcagatgatctgcccaccttggcctcccagtgcgtgctcttca

SEQ ID NO: 702244 - DNA, 672 bp, Homo sapiens
ttcaaatatattcccttttcttcttttcctttgccactgcttcagtccaagattttgtcgttttctgacttgactgctgtaatgacctcctctctattctcttctattccatccttcctctttcccaatccattcttcacactgatccagagtgattcatgatgaactcacgtgatgtcaagttattcaccattgcccttaaaatccagaatcttcaacatagtccacaaggtaccatctaacccttggctacctctcaagcttcacattcctcctgttctcagtgtgtcagccatgttgacctgaagactttgcatgctattcttttttctttgagatagagtctcgctctgttgcccaggagcacaatcatggctcactgcaacattcacctcccaggttcaagcgatccttctggctcagcctcccgagtaggtgggattacaggcacccaccaccacacctggctaattatttttgtattcttagtagagatggtatttcaccatgttggccaggctggtttcgaactcctgacctcagatgatctgcctgccttggcctcccagtgcrtgctcttcattctgctatttcaccgtgtttgccaggctgctttcgaactcctgacctcagatgatctgcccaccttggcctcccagtgcgtgctcttca

SEQ ID NO: 702245 - DNA, 969 bp, Homo sapiens
tttttgggtatcttttcagcaacactccactcttggtacaaatttactatattatttcactttcacactgctgataaagacataccagagactgggcaatttacaaaagagagagatttaattggacttacagttccatgtggctagggaagcctcaaaattgtgggagaaggcaaggaggaacaagtcacatcttacatggatagcagcaggcaaagagaggaaaggaatatgcaaaagcggaaacccctgataaaaccatcagatcttgtgagacatgttcacyaccgtgagaacagtatggaggaaactgcccccatgattcatttatctcccaccaggtccctcccacaacacgtgggaattatgggagtaccattcaagatgagatttgggtggggacacagagccaaaccatatcagtttccaagatcatatagtcaatatgagcggaacctgctctctgaaacactctgacttcagatttcagatcctgtggtcacactatgagtcctctcctgctggtgcccaccatgcctagttctgcccccttcctagagactagtgtacccattgctgtgggagacacctacttctaaacaagcatctccatctctgacatttggtcatttccttgtccactctccatctactacttgagattttcccaattacattttacaactctaataaatatttcctgcaattcaatggccagaagcagttcatcctgtagatgaaccgtgatttacctaccagtccatagtggtgcacacataagtgattcattctttaactcattcagtaaacatttattgaattcctattatttaccaggcacttttctaagggctgaggatacagaagggaacaatacatggtcccagcttttgtgctagtgggtagaatagaaaatacacaataaatgtgtaacacattggtaaacaatggtaagtgaaacaaaaataa

SEQ ID NO: 702246 - DNA, 969 bp, Homo sapiens
tttttgggtatcttttcagcaacactccactcttggtacaaatttactatattatttcactttcacactgctgataaagacataccagagactgggcaatttacaaaagagagagatttaattggacttacagttccatgtggctagggaagcctcaaaattgtgggagaaggcaaggaggaacaagtcacatcttacatggatagcagcaggcaaagagaggaaaggaatatgcaaaagcggaaacccctgataaaaccatcagatcttgtgagacatgttcaccaccgtgagaacagtatggaggaaactgcccccatgattcatttatctcccaccaggtccctcccacaacacgtgggaattatgggagtaccattcaagatgagatttgggtggggacacagarccaaaccatatcagtttccaagatcatatagtcaatatgagcggaacctgctctctgaaacactctgacttcagatttcagatcctgtggtcacactatgagtcctctcctgctggtgcccaccatgcctagttctgcccccttcctagagactagtgtacccattgctgtgggagacacctacttctaaacaagcatctccatctctgacatttggtcatttccttgtccactctccatctactacttgagattttcccaattacattttacaactctaataaatatttcctgcaattcaatggccagaagcagttcatcctgtagatgaaccgtgatttacctaccagtccatagtggtgcacacataagtgattcattctttaactcattcagtaaacatttattgaattcctattatttaccaggcacttttctaagggctgaggatacagaagggaacaatacatggtcccagcttttgtgctagtgggtagaatagaaaatacacaataaatgtgtaacacattggtaaacaatggtaagtgaaacaaaaataa

SEQ ID NO: 702247 - DNA, 969 bp, Homo sapiens
tttttgggtatcttttcagcaacactccactcttggtacaaatttactatattatttcactttcacactgctgataaagacataccagagactgggcaatttacaaaagagagagatttaattggacttacagttccatgtggctagggaagcctcaaaattgtgggagaaggcaaggaggaacaagtcacatcttacatggatagcagcaggcaaagagaggaaaggaatatgcaaaagcggaaacccctgataaaaccatcagatcttgtgagacatgttcaccaccgtgagaacagtatggaggaaactgcccccatgattcatttatctcccaccaggtccctcccacaacacgtgggaattatgggagtaccattcaagatgagatttgggtggggacacagagccaaacyatatcagtttccaagatcatatagtcaatatgagcggaacctgctctctgaaacactctgacttcagatttcagatcctgtggtcacactatgagtcctctcctgctggtgcccaccatgcctagttctgcccccttcctagagactagtgtacccattgctgtgggagacacctacttctaaacaagcatctccatctctgacatttggtcatttccttgtccactctccatctactacttgagattttcccaattacattttacaactctaataaatatttcctgcaattcaatggccagaagcagttcatcctgtagatgaaccgtgatttacctaccagtccatagtggtgcacacataagtgattcattctttaactcattcagtaaacatttattgaattcctattatttaccaggcacttttctaagggctgaggatacagaagggaacaatacatggtcccagcttttgtgctagtgggtagaatagaaaatacacaataaatgtgtaacacattggtaaacaatggtaagtgaaacaaaaataa

SEQ ID NO: 702248 - DNA, 969 bp, Homo sapiens
tttttgggtatcttttcagcaacactccactcttggtacaaatttactatattatttcactttcacactgctgataaagacataccagagactgggcaatttacaaaagagagagatttaattggacttacagttccatgtggctagggaagcctcaaaattgtgggagaaggcaaggaggaacaagtcacatcttacatggatagcagcaggcaaagagaggaaaggaatatgcaaaagcggaaacccctgataaaaccatcagatcttgtgagacatgttcaccaccgtgagaacagtatggaggaaactgcccccatgattcatttatctcccaccaggtccctcccacaacacgtgggaattatgggagtaccattcaagatgagatttgggtggggacacagagccaaaccatatcagtttccaagatcatatagtcaatatgagyggaacctgctctctgaaacactctgacttcagatttcagatcctgtggtcacactatgagtcctctcctgctggtgcccaccatgcctagttctgcccccttcctagagactagtgtacccattgctgtgggagacacctacttctaaacaagcatctccatctctgacatttggtcatttccttgtccactctccatctactacttgagattttcccaattacattttacaactctaataaatatttcctgcaattcaatggccagaagcagttcatcctgtagatgaaccgtgatttacctaccagtccatagtggtgcacacataagtgattcattctttaactcattcagtaaacatttattgaattcctattatttaccaggcacttttctaagggctgaggatacagaagggaacaatacatggtcccagcttttgtgctagtgggtagaatagaaaatacacaataaatgtgtaacacattggtaaacaatggtaagtgaaacaaaaataa

SEQ ID NO: 702249 - DNA, 969 bp, Homo sapiens
tttttgggtatcttttcagcaacactccactcttggtacaaatttactatattatttcactttcacactgctgataaagacataccagagactgggcaatttacaaaagagagagatttaattggacttacagttccatgtggctagggaagcctcaaaattgtgggagaaggcaaggaggaacaagtcacatcttacatggatagcagcaggcaaagagaggaaaggaatatgcaaaagcggaaacccctgataaaaccatcagatcttgtgagacatgttcaccaccgtgagaacagtatggaggaaactgcccccatgattcatttatctcccaccaggtccctcccacaacacgtgggaattatgggagtaccattcaagatgagatttgggtggggacacagagccaaaccatatcagtttccaagatcatatagtcaatatgagcggaacctgctctctgaaacrctctgacttcagatttcagatcctgtggtcacactatgagtcctctcctgctggtgcccaccatgcctagttctgcccccttcctagagactagtgtacccattgctgtgggagacacctacttctaaacaagcatctccatctctgacatttggtcatttccttgtccactctccatctactacttgagattttcccaattacattttacaactctaataaatatttcctgcaattcaatggccagaagcagttcatcctgtagatgaaccgtgatttacctaccagtccatagtggtgcacacataagtgattcattctttaactcattcagtaaacatttattgaattcctattatttaccaggcacttttctaagggctgaggatacagaagggaacaatacatggtcccagcttttgtgctagtgggtagaatagaaaatacacaataaatgtgtaacacattggtaaacaatggtaagtgaaacaaaaataa

SEQ ID NO: 702250 - DNA, 969 bp, Homo sapiens
tttttgggtatcttttcagcaacactccactcttggtacaaatttactatattatttcactttcacactgctgataaagacataccagagactgggcaatttacaaaagagagagatttaattggacttacagttccatgtggctagggaagcctcaaaattgtgggagaaggcaaggaggaacaagtcacatcttacatggatagcagcaggcaaagagaggaaaggaatatgcaaaagcggaaacccctgataaaaccatcagatcttgtgagacatgttcaccaccgtgagaacagtatggaggaaactgcccccatgattcatttatctcccaccaggtccctcccacaacacgtgggaattatgggagtaccattcaagatgagatttgggtggggacacagagccaaaccatatcagtttccaagatcatatagtcaatatgagcggaacctgctctctgaaacactctgacttcagatttcagatcctgtggtcacactrtgagtcctctcctgctggtgcccaccatgcctagttctgcccccttcctagagactagtgtacccattgctgtgggagacacctacttctaaacaagcatctccatctctgacatttggtcatttccttgtccactctccatctactacttgagattttcccaattacattttacaactctaataaatatttcctgcaattcaatggccagaagcagttcatcctgtagatgaaccgtgatttacctaccagtccatagtggtgcacacataagtgattcattctttaactcattcagtaaacatttattgaattcctattatttaccaggcacttttctaagggctgaggatacagaagggaacaatacatggtcccagcttttgtgctagtgggtagaatagaaaatacacaataaatgtgtaacacattggtaaacaatggtaagtgaaacaaaaataa

SEQ ID NO: 702251 - DNA, 620 bp, Homo sapiens
tggggctgtatttattttaaaattttgaatttttaaaactatttataaaatgaaaacattaaaaatatatatatatatttctcataaaacagagcttcccatttcctgactttatttttgccagagcttcccatttcctgacttaatttttgcagactttctcaacttttcttagttgtgggtagacacacactttggaggaagyctgtcaaaagccagcaaactaatagtctgcacttataaccaaaatgtatgagtgtggttaacttgcagttgctgatgacttattggacacattagtttaatcctatttttttcttccatagtttggaattatcaagacagctcttatctctgttagattgtgagagctatttcatattgaattgcaagttttcaaaatcttggttttatattttatcaatattatgtctctcaatgtgtcttaaaggtatctgaagatgcaagccaaattacactaaatgtattgtttcttcaaatttgaaactgtttcataataactgagcagcacaggggagtaagataaggtttggacccagtagcctggggtcagttttcagcaacctaaggaaaatctgatatctctgagtcggcttcct

SEQ ID NO: 702252 - DNA, 620 bp, Homo sapiens
tggggctgtatttattttaaaattttgaatttttaaaactatttataaaatgaaaacattaaaaatatatatatatatttctcataaaacagagcttcccatttcctgactttatttttgccagagcttcccatttcctgacttaatttttgcagactttctcaacttttcttagttgtgggtagacacacactttggaggaagcctgtcaaaagccagcaaactaatagtctgcacttataaccaaaatgtatgagtgtggttaacttgcagttgctgatgacttattggacacattagtttaatcctatttttttcttccatagtttggaattatcaagacagctcttatctctgttagattgtgagagctatttcatattgaattrcaagttttcaaaatcttggttttatattttatcaatattatgtctctcaatgtgtcttaaaggtatctgaagatgcaagccaaattacactaaatgtattgtttcttcaaatttgaaactgtttcataataactgagcagcacaggggagtaagataaggtttggacccagtagcctggggtcagttttcagcaacctaaggaaaatctgatatctctgagtcggcttcct

SEQ ID NO: 702253 - DNA, 2997 bp, Homo sapiens
cagctacctgccaaaacccctactagtgttttgttctaccactttagaaggaaacacacacacacacacacacacacgcacgcacacacacacgccagcacaaaccagtttatttcagctagttagtttattttttgcatctttcccaattctcatgatctctcccacagttcctcaggaaacagtgccctgttggtcatttgaaataaattataatgaaaatctttaaaccatagaaatttgcaaatgctacacatcaggactttttttttttttttttttttttttttaacccaagaaccattttactagcatacagctgcccagcgttcaactaaaagcaatggactagattgccaattacagcatggccacaatattagggtggaatggacagagccaagaacactgctctgtagtgttagaaagtgagagtgtgctcagtgcccacttcaggtcccctacctctttcatctacggccacagaagctactcaaaatttaatcataatattgaaaggggcagggaatttccttcagatttcccaaggtctgaaatgggaagataaagttaccttctccacagaactaatggaaaatcaagagggaaggtaattttaaaacttctctcaagttattttgaaatataaaccttcctgggatacttctggctcctggaatattttgcaaaatagctattgaccttccatcctgctcctcaagcaactgggactgactggctcacaagccctctgcctggactttcaacacagcaacgatgtctctccattgccctctacccataccataggagagagatgattgactttcacaatttcattctaggacccttatctcgggagcaatcagctagcatggttgttgattatttattttgtgtcttataatagttttattcctagtttgcttcaggaaaatgcaataaatatgttaaccatgggaaaactgataaagttgcggaagctctcatgatcagtttttagggactttcatggtaatatatatggagtaaggctaacctcttttacactaatttattttattcgttctcatgttgagaaacagtagtctagattcactttctctgtacctcttttttcatttctaggatttatcaaccaaatgggttcaaatagttttagtctatgaacattaagtcttctttttggtaaatgttgagcaaccaaccgagatactgtcacgttgttgagctgtacgttagctcagatctaccacccaactgttgttctttctttctttgatagattttctgaaattttatccgtatccaatcccatcgctataaaaatgcataactttttatttcaaaatttactagtcatgttttactcctcagtatgtgtgatgcctctgtttcatttggtacagttcctcattccttcaaggactatgtacttactgccgtctaaaaagttattccccaggtctgtgcatggcttctcatcatttggatgtgaactccttagcaacgtcttccctgacttcccctattaaagtaatttctcatcaccctctattacattacctatgttttactgtctttggggcatgtcagcattgaaagttttctgaactgttgatgtctwtgtttactttttgttgttgttgttgatctctcagcaggagaaagtaagcagtaggaaagggaccttttgtaactcatttcctccctatcttcagaaaccagaatacagtgtgtcacatattgccagaaaatgaaataattatctctttaataccctctttcttggacttccataattctgttttctcctttttttctcctacttctctacatatttttcataatctcttttttaaaatatatatttttgcttttaaaataactctgtgtaatataaatagctaaaggaaagatgctatggccaattatgttatatttttaaatgttgaccaaataatacgaaaggacagctatataatctctaaggtactatttattaaattctggaaaatgtttaaagttttgcctttctgacaatctacaattttttactctagcctgaaatattagattaaacttgcattattttgtctgttgactttggagactatagatgtaaagtatggaaatgaaatcctgacaaaacggttttgctttagccaaatttctatcacaataattttaactttttttgtcctttggatgtgcattatatgttagattgtaaaactgaagacattttgcaaatgtattaaacaactactgtatgccaaggcaagtagcaactctggtttatctatgttatttgtgctattgaaacatagtcactgtgccattaagcactgcatttagtgtatcactgtagcaagtattttttcagcaagtgtacatactgcagtaaagaagaagtgataaaattgagaagtcacccctttatctggttctttgcaacaaagacagcaaaattgattgtatatcttacgcttaattctgaattctgcaggaatgcaccagtctagtccactagctagtgtcccttctaatggattggaggtccattttaactgactagaacttgtgctgtactagttaccaaatattttaaatacctctcctcttatgccaacccttgtctaattggtcttaactggaacactattttgataaagagtttgaaaacatgatgattgcttagttatgtctgccacaggagtgggggaaggcagtgttggttttcatccttcaatacattgtggtcttcatgataatgaccatgatggaaagccactgagtgaacctaaaacagaagcaccaatataattctaacagtctttgaattttgaaatctttatcaatgctaagattctaatgatttttagaaagaaagaaggtaaacgtggataatcactgtgattttgcaagtttttaataaatataaccactttaatttgaagtaaattcaaagctagatttatatatgatagtaggaaa

SEQ ID NO: 702254 - DNA, 2997 bp, Homo sapiens
cagctacctgccaaaacccctactagtgttttgttctaccactttagaaggaaacacacacacacacacacacacacgcacgcacacacacacgccagcacaaaccagtttatttcagctagttagtttattttttgcatctttcccaattctcatgatctctcccacagttcctcaggaaacagtgccctgttggtcatttgaaataaattataatgaaaatctttaaaccatagaaatttgcaaatgctacacatcaggactttttttttttttttttttttttttttaacccaagaaccattttactagcatacagctgcccagcgttcaactaaaagcaatggactagattgccaattacagcatggccacaatattagggtggaatggacagagccaagaacactgctctgtagtgttagaaagtgagagtgtgctcagtgcccacttcaggtcccctacctctttcatctacggccacagaagctactcaaaatttaatcataatattgaaaggggcagggaatttccttcagatttcccaaggtctgaaatgggaagataaagttaccttctccacagaactaatggaaaatcaagagggaaggtaattttaaaacttctctcaagttattttgaaatataaaccttcctgggatacttctggctcctggaatattttgcaaaatagctattgaccttccatcctgctcctcaagcaactgggactgactggctcacaagccctctgcctggactttcaacacagcaacgatgtctctccattgccctctacccataccataggagagagatgattgactttcacaatttcattctaggacccttatctcgggagcaatcagctagcatggttgttgattatttattttgtgtcttataatagttttattcctagtttgcttcaggaaaatgcaataaatatgttaaccatgggaaaactgataaagttgcggaagctctcatgatcagtttttagggactttcatggtaatatatatggagtaaggctaacctcttttacactaatttattttattcgttctcatgttgagaaacagtagtctagattcactttctctgtacctcttttttcatttctaggatttatcaaccaaatgggttcaaatagttttagtctatgaacattaagtcttctttttggtaaatgttgagcaaccaaccgagatactgtcacgttgttgagctgtacgttagctcagatctaccacccaactgttgttctttctttctttgatagattttctgaaattttatccgtatccaatcccatcgctataaaaatgcataactttttatttcaaaatttactagtcatgttttactcctcagtatgtgtgatgcctctgtttcatttggtacagttcctcattccttcaaggactatgtacttactgccgtctaaaaagttattccccaggtctgtgcatggcttctcatcatttggatgtgaactccttagcaacgtcttccctgacttcccctattaaagtaatttctcatcaccctctattacattacctatgttttactgtctttggggcatgtcagcattgaaagttttctgaactgttgatgtctatgtttactttttgttgttgttgttgatctctcagcaggagaaagtaagcagtakgaaagggaccttttgtaactcatttcctccctatcttcagaaaccagaatacagtgtgtcacatattgccagaaaatgaaataattatctctttaataccctctttcttggacttccataattctgttttctcctttttttctcctacttctctacatatttttcataatctcttttttaaaatatatatttttgcttttaaaataactctgtgtaatataaatagctaaaggaaagatgctatggccaattatgttatatttttaaatgttgaccaaataatacgaaaggacagctatataatctctaaggtactatttattaaattctggaaaatgtttaaagttttgcctttctgacaatctacaattttttactctagcctgaaatattagattaaacttgcattattttgtctgttgactttggagactatagatgtaaagtatggaaatgaaatcctgacaaaacggttttgctttagccaaatttctatcacaataattttaactttttttgtcctttggatgtgcattatatgttagattgtaaaactgaagacattttgcaaatgtattaaacaactactgtatgccaaggcaagtagcaactctggtttatctatgttatttgtgctattgaaacatagtcactgtgccattaagcactgcatttagtgtatcactgtagcaagtattttttcagcaagtgtacatactgcagtaaagaagaagtgataaaattgagaagtcacccctttatctggttctttgcaacaaagacagcaaaattgattgtatatcttacgcttaattctgaattctgcaggaatgcaccagtctagtccactagctagtgtcccttctaatggattggaggtccattttaactgactagaacttgtgctgtactagttaccaaatattttaaatacctctcctcttatgccaacccttgtctaattggtcttaactggaacactattttgataaagagtttgaaaacatgatgattgcttagttatgtctgccacaggagtgggggaaggcagtgttggttttcatccttcaatacattgtggtcttcatgataatgaccatgatggaaagccactgagtgaacctaaaacagaagcaccaatataattctaacagtctttgaattttgaaatctttatcaatgctaagattctaatgatttttagaaagaaagaaggtaaacgtggataatcactgtgattttgcaagtttttaataaatataaccactttaatttgaagtaaattcaaagctagatttatatatgatagtaggaaa

SEQ ID NO: 702255 - DNA, 575 bp, Homo sapiens
atgaactggcaacattaccgaatggacatttttccaatcttctctgcaatgatgagaatacagaacaaaatcaaataaatgaaatctcagcaggccataggattgcctactaaaaacacaaaagagaaaaaaarggtaaattgaagaaatgatactaatcaaatggtcctttgttctttgaagtagctaatccttaattattgaaaattaaatcatttattacaaatgttgaaaaattagacaaccatgatcttcaaatatgtaagaattcaaaaacctttacctttaccttacatttttctttctaaagaaagattgaaattaattttaatcacaagcactttcttcacaattaaaaatgctttaaataaaatatagttaatagcattaattttctaaactattatccaagatgctcctgtatttatattttgccttccaataacactgtaattcttccaggagagaaatcttgacaaccttctatattacttaaccaagagatgataacattcatagatgtgtacacttcatacaaaatatatttctattcatgtgttttgtataattataaa

SEQ ID NO: 702256 - DNA, 1140 bp, Homo sapiens
tgagtaattctccttccctgtaaacaaacacctctcacaacatgaggattacggggcaagggtgtgcagggggcaccttgtgcagcctgaaaaccatgttaatcttaaagctttactatcagcacagcccagccctgctgatctacccccagtggaagctggaatgctctcattttccatgcccttcacctccctagaactgagcttccaatacaccttgcccattttcccttgcctacctatcctctgccaactctggtaagtgcctcactttactttccaggagaacgtggttttagttattaatttttcacccctattgcctagtagctgcccatctttgacttggaaggaaggttacacttgctttgttgattgttatggcccccatccacctccatcaaaaagacccttgtggctgggcatggtggctcatgcctataatgaaagtgttttgggaggccgaggtgaggtaagaggattgcttgagggaaggagcttgagaccagcctgggcaacatagcaagatcccgtctctacaaaaaaatgaaaaaactagtggattgtggtggtacaggtgtcccagctacgcaggaggatcacctgagcccaggagctccaggctgcagtgagttatgatcaccccactgcactccagcctcggcaatagagtgagaccctgtccctacaaaatttttttttaaaaattagctaggtacctgcagttttagctacttgggagggtgaggtgggatgatttcttgagccaaggaatttgaggctgcagtgagctctgatcgcaccactgcactccagcctccatgacagagtgagactctgtctcttaacaaaaaagacccctgtggtttctcagcacttctggaggccctatcttcagcatgctctgaaacaaaccaccctggttctttgtctctggcctttgtatctcactattatggccttgccacctcttcagtggctgctgaccctggagaggtcacctcccctgccccagcactgtgactttcccagtgtggattcaggaaaasggacgctgctttttctcccctgcatgactctgtcctaagagtccacagccttgccctaatttcccaaaacacagctgaggccagtggaaaa

SEQ ID NO: 702257 - DNA, 792 bp, Homo sapiens
ccaagtagctgggactacaggcatgcacaccatgcccagctaaaaaatagtattttttaaaagtgagagagtagagtttgcaaagtagttggctcatggaactggagtctagaccatctcaaactacctgtagctaaggaaaaaaaatggtacctagaatattcaagaaaagattagtaaaggttaaaaggcggtagtcctgggttaagacatgacatgaaatcatttaatgcaaattaaatttgtatttaatttagatgaattgaggacctaaactatataggtgaattgctagctaacctaggaggactagaagccatttctctgtccatggtgctggaccaacaacaaagattttctttaaattcaatacaagtatatcmtaattaaaatcacaccttggaccattgtaaaaagtatgacttaatcatattttcctttagaaagtcatgctgctgacctgaaattgcatgaaaggcagtaacagcagaatttacaagtgaaagttagaaacacaaggaaatctcttccaaaaaaacattgtttttttcactgatataattttttcttcgattgaagaattgtttttacagaatatcaaactgtttactcagtcatttcaacaccaacctgaagtggggaagaaaaaaatagcaatgcccttcttcctaatctcagtcacattttcaatttgggaaaaatttgaagaatcaactttctttttcctgggtttgggggagggaagtaaggtaagaagaagagagtactatgagagtggacaaaaatatcaca

SEQ ID NO: 702258 - DNA, 583 bp, Homo sapiens
ctaggtgagagaggcttgggtgcagaatattaggaaggactcatcttcaaggttgtgccagggaagggtgggcactggagtgaatgcctcgttaaattttacatcgtaggcccctcatttctctcactctaggtctggttctgctcctgggaggcgatttcctttgttttgacttcctttcaccttctattacttgaattttaatgctatgtctaccactaatattgctatttccagtatgaaagtccacaagagttctaaaaacctgtccactattgcatttattatgaaggtataatacatagttttcctaaaggaaccctaaaattaataatagtaaggatctatcacaggttttatttcaccttaggaagggttagttaacaataatagacaattcaggcatttgccattaattttgtttcctcttatattgaaataaatattagtagcccatggagttattttccgagctgagytccagtaaactgcacaaatttgaactctcattcaaaggtgaagaataaaatatcttgtgggtggagggtcaactgtttttccagaacagaaaaacaaggataaa

SEQ ID NO: 702259 - DNA, 977 bp, Homo sapiens
cagaaaaaattccatcttaagtacatatttattttcaaagtgaagcttttctattaattttttgtcttggctatttttattcattgttttcccccaagaaattttaggtatattataattcttactctcaataaatgggagctctgattaactctcatttaattaaagttcatgacaatttctatttttgacacatatcatcagtttgaaagtatatacgttctttcttctttaatggctattaaattaatatagcatatttgtacacagttgcccataactgaagagcaagtctaaaaaraaatagcaatgtgtgatgacaaagatttacttatttacttatgggcaaaaccattatgctgtctaaagccagtctggcatatattgtgctctaaggatcccatttatcaatgactcctgtggcatttcaggggggattttcatgtaattcgcttctaaagtccatgtaatatgcctcttctgagtgaattacatacattgttattcatcattattgattcctgtctccagcagtaagcaacagatacaaatctgcttatgaaagggaagaaaagctgggagtgtgcattattaaacataactggaagcacaggttttaccttatttgtcttataaatcatcatatggattttgaaaaacaagcacaaagttgataatgttgtttactatgctctcaatatcaaataaaattccaaatttattattaaattaataaaaaactcaagcagtaagctaaaataattcgtgtttttagaatcaataagtcatgatgatgtcttctgtaatgaaaaattagcaaaagtaaattctaaatagctttacatagaacccatggatataagatttgaaatttgaaagtagcccagtgtggaatattttaaatgagagagacagtccaaaattgattttataaattaatttataaatatatttgtttatagaggcataagaaaata

SEQ ID NO: 702260 - DNA, 977 bp, Homo sapiens
cagaaaaaattccatcttaagtacatatttattttcaaagtgaagcttttctattaattttttgtcttggctatttttattcattgttttcccccaagaaattttaggtatattataattcttactctcaataaatgggagctctgattaactctcatttaattaaagttcatgacaatttctatttttgacacatatcatcagtttgaaagtatatacgttctttcttctttaatggctattaaattaatatagcatatttgtacacagttgcccataactgaagagcaagtctaaaaagaaatagcaatgtgtgatgacaaagatttacttatttacttatgggcaaaaccattatgctgtctaaagccagtctggcatatattgtgctctaaggatcccatttatcaatgactcctgtggcatttcaggggggattttcatgtaattcgcttctaaagtccatgtaatatgcctcttctgagtgaattacatacattgttattcatcattattgattcctgtctccagcagtaagcaacagatacaaatctgcttatgaaagggaagaaaagctgggagtgtgcattattaaacataactggaagcacaggttttaccttatttgtcttataaatcatcatatggattttgaaaaacaagcacaaagttgataatgttgtttactatgctctcaatatcaaayaaaattccaaatttattattaaattaataaaaaactcaagcagtaagctaaaataattcgtgtttttagaatcaataagtcatgatgatgtcttctgtaatgaaaaattagcaaaagtaaattctaaatagctttacatagaacccatggatataagatttgaaatttgaaagtagcccagtgtggaatattttaaatgagagagacagtccaaaattgattttataaattaatttataaatatatttgtttatagaggcataagaaaata

SEQ ID NO: 702261 - DNA, 1077 bp, Homo sapiens
aggaagccgactctcccctacaacctccagaaggaacacaaacctgcccacaccttgattttaggccactgagatttctaactcccacaactgtaagataacaaaatttgtattatttaaatcactgtggttctttgttacagtggcaacaggaagtgaatacaccatagagtccagcaattgtattcttgggtatttacttcagagaaatgaaacctgctcacacaaaaacttgtacacaaatttcacagtggctttactcataayacttaacaaccagaagtaatccaaatgtcctttaaggggtgaatggttaaacaaaccatggtataaatacaccatgtttctcagtaatagaaagcagcacactatttatacaatcaacttagattattcttaatggattatactgagttaataaaagccagttttaatagatcatataatatatgatttcatttcaataacatttttgaaatgaaaaaaatttagaatggagaacaaaataatgttttctaggtttgggaatggtaaaggaggtgaaagttggtgtgaaattttggtggtgagaaatttggtaaatgattaaaaggaattctattggtagaatgatttaaagttttagtccaactgatgaaagttacataattctccctcagctaatcaattagaatacaaaataatcacactgccagttgtactatttcaatctatttttattttcttcttcatgacaggtccactaatacttgcaaataggtggaaagccttcagaaataataaataaatggaagtattatctatttacctattaatggggtagctgtcttaggaagtcaatttataaaatgtatagcccagcaaatttattaagataccataaaatggtcccaacaaattctcaatagaagcttgtgaaacagaaagttaaagattgccttattaaaataccattcattatagagatttatatctaatgcctacctttctacgacacacatctacaacaagatttggcatgtattaacaggaaattttatattagtgcatgtgctcatcagtgattcaaacagtata

SEQ ID NO: 702262 - DNA, 1099 bp, Homo sapiens
tgtagcatacataaatactacataaatacaccatatttactcattaaaaaaacaaggctgcaaacattgtctcatctttttcccaaattaactgcagttagcagaaagtttagtaactctgggttagtttgccttcctattaattattccagctacttcagagtttatagccctaaaagggatcagtttgattccctcacccatgcagagggaacactcaaaytcccccttgcatccctgctaatgattccttctatcctgcagcgtgtatcattcatgcttagttatgcgagtccaacagatccttgatgttaccttgctgatctggctcattgtacagattcactctgtccctgaaggatggtgatacccaacttcagggctcatttcagacaatggcttctcagactatgtctgttaatattgcaacttttggtcctaaccttctttagtccctatacattttcctgaaatgaggtggtccctggagtgctgatttggactagctcgtaggtacaccacattaaaacactttccccttctcttgagcttacccacacctgcaagtcaagcagattaatattgtcattttagtcctcaaaacacaaataatttatgtaaagctcttttctgccatttgtttatggaagagcaaacttaaattattctactggtcctggactcttcatttggagatctctatcttcaataaaatgatttttttgtcatctcactaaagaagagaaaaagaaaacaatctacaaatatcatttctggtatagactctgaaatattacataccccttaatattgttgtaccttgttttattgttgttgtttacatatactaatgtatgtagacatggcaagggaattctgaaaagcaaaattcctggaataaccaatgatttatttgagcacagtttagtactctattagactatgttgagagatcaaataatattcacattcatattatgaaaaatacactattttaaaatgaaaaacagatacctaactatgtcatgaaaagttacattcaagtaaaatagaaaatcttgaagtttcgtgttcccaaccaaagacgagaagaagaaaa

SEQ ID NO: 702263 - DNA, 626 bp, Homo sapiens
ccatcccattacttatctttttttgtagtgagacatttgaaatttagttattttgaaatacataatacattatcattaattatagtcaccctgctgtacagcagatctcaaaatttatttcatctgcaactcaagctttataaccttggaccagcaacaactcattctctccccatcctcgtgtgctgtttcatcttaatgaatatttttataattataagaactttcatagatgacatctagccttgctgttttcctcataacgatctcaaccacacattctcttaacaaaagggcttttggttcactgatactaattctatgtagtcactgcagaattaaagacctggtggcagtccagggggatctggctcctaagcaaagattcaagattttaaaaagaatcattcagtgcmacactataaaaacaactgcatgttggcacttatgtttagacattactagttgtctatgctgatttgagtttaatacttcattctaaaaggcataacgcagtaatttttaaatacttgttggatataaaaaagtactatagaaaataatatagtatatagcaatatccatacctgtatgttttgtgaatgaaacaatgcatattaatttgt

SEQ ID NO: 702264 - DNA, 626 bp, Homo sapiens
ccatcccattacttatctttttttgtagtgagacatttgaaatttagttattttgaaatacataatacattatcattaattatagtcaccctgctgtacagcagatctcaaaatttatttcatctgcaactcaagctttataaccttggaccagcaacaactcattctctccccatcctcgtgtgctgtttcatcttaatgaatatttttataattataagaactttcatagatgacatctagccttgctgttttcctcataacgatctcaaccacacattctcttaacaaaagggcttttggttcactgatactaattctatgtagtcactgcagaattaaagacctggtggcagtccagggggatctggctcctaagcaaagattcaagattttaaaaagaatcattcagtgccacactataaaaacaactgcatgttggcacttatgtttagacattactagttgtctatgctgwtttgagtttaatacttcattctaaaaggcataacgcagtaatttttaaatacttgttggatataaaaaagtactatagaaaataatatagtatatagcaatatccatacctgtatgttttgtgaatgaaacaatgcatattaatttgt

SEQ ID NO: 702265 - DNA, 955 bp, Homo sapiens
tgcacaaattaatcatagattttagagctttttagagctttcagccctgttgttactctaaaattctttcttatatgcctatattttgttttttgaaattcatctgcctatttgagttcttgtccagtttcccactaaggtaaccctgtgtgasagtaatttatgggtgcaaaataaactgaaattcctaatttgaaatgttggtgaggttagaaacgatctcagaagaagcatttaggctgaagaatacatgcttgtaaagagatatgaaagttatcggaatcttatcccaaattcactcttaattttgtgcttagggtggtttccacttaaaatcgttttatctctgaaactataaagttgggtgatctctgtgtggtgttagaattttacatcttcatatcagctcaggcccatttggagatggggaggtttcaacttttgaaaacatcttttaagttggccaaatatatttggacaactgtacgtgtgtttagtctgtaatttatatgaaagtatatctctaattttgttggcattgtatgttgcatcagcatttagagaagacaggttttaagtggtatttctgattccttcagcagaatgaagtgctgccaattattagtctattctgagttgatcttaaatgaggtctaaaaggaaaggcaatttaaaaccctgaaagcactcaacacacccatgcattaagttctgggtaatgataaaagaatagccaaactatttaatatgaatgatatttgaaaaaattctttctgtgtacaacacttatactgctgctgtgaagaaatattagatatagttctcaacaacattgggtctagaaactagttgctgaaataaaaacttacgtatggtgccatgggcatgaaatttcattaaactgacaaaagaatcaggttctgattccaggtccataaagtcataattgaagaat

SEQ ID NO: 702266 - DNA, 955 bp, Homo sapiens
tgcacaaattaatcatagattttagagctttttagagctttcagccctgttgttactctaaaattctttcttatatgcctatattttgttttttgaaattcatctgcctatttgagttcttgtccagtttcccactaaggtaaccctgtgtgacrgtaatttatgggtgcaaaataaactgaaattcctaatttgaaatgttggtgaggttagaaacgatctcagaagaagcatttaggctgaagaatacatgcttgtaaagagatatgaaagttatcggaatcttatcccaaattcactcttaattttgtgcttagggtggtttccacttaaaatcgttttatctctgaaactataaagttgggtgatctctgtgtggtgttagaattttacatcttcatatcagctcaggcccatttggagatggggaggtttcaacttttgaaaacatcttttaagttggccaaatatatttggacaactgtacgtgtgtttagtctgtaatttatatgaaagtatatctctaattttgttggcattgtatgttgcatcagcatttagagaagacaggttttaagtggtatttctgattccttcagcagaatgaagtgctgccaattattagtctattctgagttgatcttaaatgaggtctaaaaggaaaggcaatttaaaaccctgaaagcactcaacacacccatgcattaagttctgggtaatgataaaagaatagccaaactatttaatatgaatgatatttgaaaaaattctttctgtgtacaacacttatactgctgctgtgaagaaatattagatatagttctcaacaacattgggtctagaaactagttgctgaaataaaaacttacgtatggtgccatgggcatgaaatttcattaaactgacaaaagaatcaggttctgattccaggtccataaagtcataattgaagaat

SEQ ID NO: 702267 - DNA, 955 bp, Homo sapiens
tgcacaaattaatcatagattttagagctttttagagctttcagccctgttgttactctaaaattctttcttatatgcctatattttgttttttgaaattcatctgcctatttgagttcttgtccagtttcccactaaggtaaccctgtgtgacagtaatttatgkgtgcaaaataaactgaaattcctaatttgaaatgttggtgaggttagaaacgatctcagaagaagcatttaggctgaagaatacatgcttgtaaagagatatgaaagttatcggaatcttatcccaaattcactcttaattttgtgcttagggtggtttccacttaaaatcgttttatctctgaaactataaagttgggtgatctctgtgtggtgttagaattttacatcttcatatcagctcaggcccatttggagatggggaggtttcaacttttgaaaacatcttttaagttggccaaatatatttggacaactgtacgtgtgtttagtctgtaatttatatgaaagtatatctctaattttgttggcattgtatgttgcatcagcatttagagaagacaggttttaagtggtatttctgattccttcagcagaatgaagtgctgccaattattagtctattctgagttgatcttaaatgaggtctaaaaggaaaggcaatttaaaaccctgaaagcactcaacacacccatgcattaagttctgggtaatgataaaagaatagccaaactatttaatatgaatgatatttgaaaaaattctttctgtgtacaacacttatactgctgctgtgaagaaatattagatatagttctcaacaacattgggtctagaaactagttgctgaaataaaaacttacgtatggtgccatgggcatgaaatttcattaaactgacaaaagaatcaggttctgattccaggtccataaagtcataattgaagaat

SEQ ID NO: 702268 - DNA, 955 bp, Homo sapiens
tgcacaaattaatcatagattttagagctttttagagctttcagccctgttgttactctaaaattctttcttatatgcctatattttgttttttgaaattcatctgcctatttgagttcttgtccagtttcccactaaggtaaccctgtgtgacagtaatttatgggtgcaaaataaactgaaattcctaatttgaaatgttggtgaggttagaaacgatctcagaagaagcatttaggctgaagaatacatgyttgtaaagagatatgaaagttatcggaatcttatcccaaattcactcttaattttgtgcttagggtggtttccacttaaaatcgttttatctctgaaactataaagttgggtgatctctgtgtggtgttagaattttacatcttcatatcagctcaggcccatttggagatggggaggtttcaacttttgaaaacatcttttaagttggccaaatatatttggacaactgtacgtgtgtttagtctgtaatttatatgaaagtatatctctaattttgttggcattgtatgttgcatcagcatttagagaagacaggttttaagtggtatttctgattccttcagcagaatgaagtgctgccaattattagtctattctgagttgatcttaaatgaggtctaaaaggaaaggcaatttaaaaccctgaaagcactcaacacacccatgcattaagttctgggtaatgataaaagaatagccaaactatttaatatgaatgatatttgaaaaaattctttctgtgtacaacacttatactgctgctgtgaagaaatattagatatagttctcaacaacattgggtctagaaactagttgctgaaataaaaacttacgtatggtgccatgggcatgaaatttcattaaactgacaaaagaatcaggttctgattccaggtccataaagtcataattgaagaat

SEQ ID NO: 702269 - DNA, 955 bp, Homo sapiens
tgcacaaattaatcatagattttagagctttttagagctttcagccctgttgttactctaaaattctttcttatatgcctatattttgttttttgaaattcatctgcctatttgagttcttgtccagtttcccactaaggtaaccctgtgtgacagtaatttatgggtgcaaaataaactgaaattcctaatttgaaatgttggtgaggttagaaacgatctcagaagaagcatttaggctgaagaatacatgcttgtaaagagatatgaaagttatcrgaatcttatcccaaattcactcttaattttgtgcttagggtggtttccacttaaaatcgttttatctctgaaactataaagttgggtgatctctgtgtggtgttagaattttacatcttcatatcagctcaggcccatttggagatggggaggtttcaacttttgaaaacatcttttaagttggccaaatatatttggacaactgtacgtgtgtttagtctgtaatttatatgaaagtatatctctaattttgttggcattgtatgttgcatcagcatttagagaagacaggttttaagtggtatttctgattccttcagcagaatgaagtgctgccaattattagtctattctgagttgatcttaaatgaggtctaaaaggaaaggcaatttaaaaccctgaaagcactcaacacacccatgcattaagttctgggtaatgataaaagaatagccaaactatttaatatgaatgatatttgaaaaaattctttctgtgtacaacacttatactgctgctgtgaagaaatattagatatagttctcaacaacattgggtctagaaactagttgctgaaataaaaacttacgtatggtgccatgggcatgaaatttcattaaactgacaaaagaatcaggttctgattccaggtccataaagtcataattgaagaat

SEQ ID NO: 702270 - DNA, 609 bp, Homo sapiens
ttagaggatggaaaacaaaataggttgatatcttgtattgaggacagagaccaggtcaaccttagatagggcggtgccatcaagataggcaatcctgtgtaagtgttaaggagtatggagtaaggtatggtatttcttattattggttttttttttttttgcctttacacatatatcacagcagaatttatgaattcaaaaagagatgattcatcctgtcatctccttgaacaccactgtacctttagtgaacaaagctgtcaacagttttaacagccctgtaaactcaggcaaaagtcattcaataccatttcagcctgattctaatcatttgtaaaaagcttactgttcataatgaacacctataaaatgaaagctrgtgttttcagaggagactttagttttcactgtgtttgtttatctccgtttccccatgatgtaaacacaacctgtttttaagatgtcaaaaacctataatgatcaacagtgttatgtgcattaaaacacttagtttccacagaccttaaataatatattgctacaaggcagagtgttcgtgctgttgaattgcattagatgtattacattttcccaatatatggatttaca

SEQ ID NO: 702271 - DNA, 1046 bp, Homo sapiens
gtgttgggattacaggcgtgagccactgcgcccggctggggaacagatttctaagcaaagataggaattaactttcaaacttaatgggttagagaagcccattgtgtgtcccacctattatcaggtgcaacaacctattgtgtctttttctttcccccttttttaaaaatgagttttctagactgataggcatatcatgaaaatgaatgactttgacagagtatgtctaacttttgatgaagaatgtaatgaagctttacatgttctcagatgactggatagagaaatgtagactaaacagaaggccagttagctgtgctcaaggttttgcataggatttgtgatagtttggccctgtgtattattattgttaaaattaaaactttagcaaaattaagtttaacggtttaattaagcaaataactatttgtgagccaagcaaccttcagaaccagaaattaccaatgagatacagagacagtttgattggtgacatcttggtgtttgcctcatttgaatatggcctaattaattggctgcctgtaactgactgaagcttggctgctgtgataggctgagactcagctatttgtttaaaaagtatactcctaaattaggcttttggttaatttatgcactaagttaggttgcagttcattacatgaggactcaaagtacagagacatcctyatgccaaatttaacactaccaaacagcaaagatgtctgtaatatttaaaatgaattttgttagagtttttatatagtaggtggtaagaaagagtttgtgtattagtgttcacagcagataataatagctaacatttagttctctcggtgctagactatgttataaattctattgcactatcttattttaataaacacaatgactctttgaaataagtattgttacgatgccagtttcacaactgtgatactgtgatacttgtattataagaaatacatatttagtctctgtccctggttcctggcacacagctcgtaaaactcttgggatctctggagtgttaagggtatctttta

SEQ ID NO: 702272 - DNA, 1698 bp, Homo sapiens
atttaaaaaagaaagaggtttcatggacatacagttccacatggctggggaaaccttgcaatcatggtggtaggcaaggaggagcaagtcatgtcttacgtggatgacagcaggcaaagagagaacttgtgcagggaaactctgctttttaaaaccatcagatctcatgaaacccactcgctatcatgagaaccgtatgggagaaactgcccccatgattcaattatctccaaccaggtccctctcacaatatgtgggaattatgggagmtacaagataacatttgggtggggacacagagccaaaccgtatcaccattgcacatccacacagtgcaatacggcacagctggatgaaagaacaaggaagattactatttatgggtatggaaaagtccccaggatattctgggaagtgtaaaaagcaaagttcagaacagtgtatgtagtatgctaccatttgtttaaaaaaggagaaaagggataagatatattttcacatgtactctcaactgcatgaagaaattctgtgtttgaggagagctgaaaaaggagaagataggcacagaagtgagaggagggtttcttaacctataccttattatatcattattttaatctgttaattaattgcttattaaaatacaattaaatcaaaaataaaatggaaaaaactacagagcctatccccattgggttttacacaaaatggcagagaagcaggaattactagctaaatcaatgttaaaaaactatttgttattaaagaaaagacaaacttctctttggaatgattgctgtagaattacagctatgcttctgtctgttccagctgggtcagtttattgcattcattgacttttgttttcaactctaatcatttacttgattgaatgttgctttcctgccttccttacatcactgatgcgtttcaataaataataaattttgctcccataaccttatttgtttaaacttctttccctttgtagttcctaagaactataaagtctcccacctgtcagatgctatgtttggagctggagatacaaagacaataagacatggccctaagagatcataattacaggagagtgagagataaatatctttttatgggcgaaattgtgttcccccaaaattgatatgttgaaatcctaactcctagtaaatcagaatgtgatttactgtatttggagagagcatctttgaaaagataattaaggttaaatgaggtcattagggtaggcccaatccaataggactggtgtctttataagaagagacgattaagacacagacatgcggggaggaaagaccatgtgaagaaaaagggagaagactatctttgaaaaagctgaggacaggtgcctcaggatgaaacaaattctgctaacaccttgatcttggatttcctgcttccagaactgtgatgaaataaattactgttgttaaaatcactcaacttgtggtacttagcaaactaataacatctctaatgcatttcagttagaggtgtgatgagggataaagaagcacagaatggggaccactactttaacagttcggacaagcagaaagttggcacctgaacagaatctatgaggcaactctgttgccatcctactttacaggcgaggaaactgaagcacagaactgttatgtaaattgcccaagattacaagactaagaagtaata

SEQ ID NO: 702273 - DNA, 962 bp, Homo sapiens
aaataaggtcacctattctgaggttccaggtagacacaaattttgaggaacactcttcaccccactatattggggaacatgtactttagtgagacaaatggccattacctacaatacacagtagcacagaaattccatgagagacctgcaatgagttctgggtatataaaggaagtgatgttcccattcatcagatttgggggaaatggatggataaggtcatttgaaaggtaggtcttgaaggatgggagacgttttacaggacagggcattcctggaagaggaaaaaatatgagtacaaaaacagagagaatagcagggctgttcgggaatcataggattctattattgtattattctgaataataagtattggctactttatatgtggctaggcaacttgattacaagtgtctagcacggcaccttgcacacaccacagagctggttaatatttgttgactgatactaagaaaaagcaaaagtgtaactctgcctyctccattcaaattctcgaattgctaagctaaactttgcgggcgcagacattatccctcaccaactggcactaaataatataatcaatgtaatgatgacaaaaattaattctaataaacagctaattaaaattgagtctagaagggtaacatggccctaattactacattggcgaattgttttccctattcctggaacaaattcctacttcattatcctccttttgtgcaagaaattgagcttttccaaagtgcgaggcatggattatagacagtgttgatggcagcccgacctggcccctgctgtgtccagctcagaggtgaacatgcaactcaaatgcccacgtgctacctgccagtgactacatcctgaagtcacatttcctttcatacccaaattacagtgactctgggctcccacctgccaccttagcaagagtttccttcaacaaatgttcctaaata

SEQ ID NO: 702274 - DNA, 962 bp, Homo sapiens
aaataaggtcacctattctgaggttccaggtagacacaaattttgaggaacactcttcaccccactatattggggaacatgtactttagtgagacaaatggccattacctacaatacacagtagcacagaaattccatgagagacctgcaatgagttctgggtatataaaggaagtgatgttcccattcatcagatttgggggaaatggatggataaggtcatttgaaaggtaggtcttgaaggatgggagacgttttacaggacagggcattcctggaagaggaaaaaatatgagtacaaaaacagagagaatagcagggctgttcgggaatcataggattctattattgtattattctgaataataagtattggctactttatatgtggctaggcaacttgattacaagtgtctagcacggcaccttgcacacaccacagagctggttaatatttgttgactgatactaagaaaaagcaaaagtgtaactctgccttctccattcaaattctcgaattgctaagctaarctttgcgggcgcagacattatccctcaccaactggcactaaataatataatcaatgtaatgatgacaaaaattaattctaataaacagctaattaaaattgagtctagaagggtaacatggccctaattactacattggcgaattgttttccctattcctggaacaaattcctacttcattatcctccttttgtgcaagaaattgagcttttccaaagtgcgaggcatggattatagacagtgttgatggcagcccgacctggcccctgctgtgtccagctcagaggtgaacatgcaactcaaatgcccacgtgctacctgccagtgactacatcctgaagtcacatttcctttcatacccaaattacagtgactctgggctcccacctgccaccttagcaagagtttccttcaacaaatgttcctaaata

SEQ ID NO: 702275 - DNA, 962 bp, Homo sapiens
aaataaggtcacctattctgaggttccaggtagacacaaattttgaggaacactcttcaccccactatattggggaacatgtactttagtgagacaaatggccattacctacaatacacagtagcacagaaattccatgagagacctgcaatgagttctgggtatataaaggaagtgatgttcccattcatcagatttgggggaaatggatggataaggtcatttgaaaggtaggtcttgaaggatgggagacgttttacaggacagggcattcctggaagaggaaaaaatatgagtacaaaaacagagagaatagcagggctgttcgggaatcataggattctattattgtattattctgaataataagtattggctactttatatgtggctaggcaacttgattacaagtgtctagcacggcaccttgcacacaccacagagctggttaatatttgttgactgatactaagaaaaagcaaaagtgtaactctgccttctccattcaaattctcgaattgctaagctaaactttgcgggcgcagacattatccctcaccaactggcactaaataatataatcaatgtaatgatgacaaaaattaattctaataaacagctaattaaaattgagtctagaagggtaacatggccctaattactacattggcgaattgttttccctattcctggaacaaattcctacttcattatcctccttttgtgcaagaaattgagcttttccaaagtgcraggcatggattatagacagtgttgatggcagcccgacctggcccctgctgtgtccagctcagaggtgaacatgcaactcaaatgcccacgtgctacctgccagtgactacatcctgaagtcacatttcctttcatacccaaattacagtgactctgggctcccacctgccaccttagcaagagtttccttcaacaaatgttcctaaata

SEQ ID NO: 702276 - DNA, 721 bp, Homo sapiens
aatggatcaatatgtcagaattttataaaatcacagaatgctttacctgcaagggatttcactaaccacttgctccaaagtcttcattttacagaggttaaaagattttccccaaggccatacacacaacaacttaattttattgatgtacctaagtttattattgatctgttgtcttagctggctagggctgccataacaaaacacgacaggtggttggcttgaacagcagaagtggatcgtctcacagttctagaggctggaagtctgagatcaaggtgtcggcagggttggctccttctgaaggctgtgagaaagagtctgttccatgcctgtccctggcttctggtgacttggtgggaatctttggtgttccttggcttgcagatgatgcaccactgtaatgtctgctttcatcttcatatggtrtcttccctgtgtgagagtgtctatgtccaaatttcctcttttcgtaaggacaccagtcagattagattaagttcccaccctattccagtaagttaagacctcatcttaattaattacatctgcaatgaccctatttccaaacaaagccacattctgagatacaatggggttaggactttaagacaggaattctcagtggggggatataattcaatggataacatctgtccccactctgattgaagggtgggtgggatggcaaggtcatctccacacgtgattggagactgtc

SEQ ID NO: 702277 - DNA, 721 bp, Homo sapiens
aatggatcaatatgtcagaattttataaaatcacagaatgctttacctgcaagggatttcactaaccacttgctccaaagtcttcattttacagaggttaaaagattttccccaaggccatacacacaacaacttaattttattgatgtacctaagtttattattgatctgttgtcttagctggctagggctgccataacaaaacacgacaggtggttggcttgaacagcagaagtggatcgtctcacagttctagaggctggaagtctgagatcaaggtgtcggcagggttggctccttctgaaggctgtgagaaagagtctgttccatgcctgtccctggcttctggtgacttggtgggaatctttggtgttccttggcttgcagatgatgcaccactgtaatgtctgctttcatcttcatatggtatcttccctgtgtgagagtgtctatgtccaaatttcctcttttcgtaaggacaccagtcagattagattaagktcccaccctattccagtaagttaagacctcatcttaattaattacatctgcaatgaccctatttccaaacaaagccacattctgagatacaatggggttaggactttaagacaggaattctcagtggggggatataattcaatggataacatctgtccccactctgattgaagggtgggtgggatggcaaggtcatctccacacgtgattggagactgtc

SEQ ID NO: 702278 - DNA, 1421 bp, Homo sapiens
ttcattcccacwttagagttttgtacttgtgctggtctctctacccagtatactctgcccaccaacattggcatgctggcttcttcttgtcattcagatctctgtttaaacatcatattcccagagctaattccttgagcattttgtctaaaatagcccttccctctcagtcacttacatcttataaagctaattgtcttcagacatttaagatcattgacaatgactgatgctatatgtgctatctcttttcctccaatagtagaatatggattctatgagtagaaaccttgtctgacattttccctgctatatccctaacaccatggaatgtatatggcacttgacggttgctctataaatacttgttggatgactcaatgagtgaacaaactagaaatatttgttatggactataagaggttgacagtgaacttcaccttgcaaacctcatagtctttagtattggcactagaagtctcatcttgatcccatgctcaactggtagaaggtcatagtgttgggtctgggctgggttgcagtgtcccactcacctaggctttgtggagcttagctgtggctagtagaacaaggtaccaagggtcagccaagaagcaatctccaaacttatcagaaagtccaacctggccactacttcttgtaggataggcaaagtgggaagaccttggtatgaagcataggatataaactggggaagccaaaccagagttcaagtctggaggaattcccagagctatgggaacgtgactgtagaaggcccctatagttttgggtgagctggtgaaggagcagttagacttacttggtttaggcacacaatgatcttcagtccttctcttgaaggcatgagctggctgcagttgcactttgccctactggaaaggatctgatgccagagactgacaatgggtcaagggcttggtggagagtattcactgctgattaagtctttcttgatactgaatagagagtagatttagtggaggggaagggaagaccacaggaagaccaccaaagagattattctacagtccagtaaagagaggacaagagccagtgatggcagaagggaggaagagaaagagattcatgcaagagaattactcatgcaaaatgtgcaaaatttaaattcaatcagattagaccaatggaaaaagaaaaagaaggatgccatgaagactaggaggatctgagcttgctcagcattgtagagggtgttacgggcattgattaagttaaagacagcaagggagaggcgtgtgagggcagagaaatgtgctttacctctgggcaggctgatgtgacaagctcattgagcctccagagagattttttccaaaagtagctggaaatataggcctacagcacaaaagccctaggagccaggtgaacgcctggaa

SEQ ID NO: 702279 - DNA, 1421 bp, Homo sapiens
ttcattcccactttagagttttgtacttgtgctggtctctctacccagtatactctgcccaccaacattggcatgctggcttcttcttgtcattcagatctctgtttaaacatcatattcccagagctaattccttgagcattttgtctaaaayagcccttccctctcagtcacttacatcttataaagctaattgtcttcagacatttaagatcattgacaatgactgatgctatatgtgctatctcttttcctccaatagtagaatatggattctatgagtagaaaccttgtctgacattttccctgctatatccctaacaccatggaatgtatatggcacttgacggttgctctataaatacttgttggatgactcaatgagtgaacaaactagaaatatttgttatggactataagaggttgacagtgaacttcaccttgcaaacctcatagtctttagtattggcactagaagtctcatcttgatcccatgctcaactggtagaaggtcatagtgttgggtctgggctgggttgcagtgtcccactcacctaggctttgtggagcttagctgtggctagtagaacaaggtaccaagggtcagccaagaagcaatctccaaacttatcagaaagtccaacctggccactacttcttgtaggataggcaaagtgggaagaccttggtatgaagcataggatataaactggggaagccaaaccagagttcaagtctggaggaattcccagagctatgggaacgtgactgtagaaggcccctatagttttgggtgagctggtgaaggagcagttagacttacttggtttaggcacacaatgatcttcagtccttctcttgaaggcatgagctggctgcagttgcactttgccctactggaaaggatctgatgccagagactgacaatgggtcaagggcttggtggagagtattcactgctgattaagtctttcttgatactgaatagagagtagatttagtggaggggaagggaagaccacaggaagaccaccaaagagattattctacagtccagtaaagagaggacaagagccagtgatggcagaagggaggaagagaaagagattcatgcaagagaattactcatgcaaaatgtgcaaaatttaaattcaatcagattagaccaatggaaaaagaaaaagaaggatgccatgaagactaggaggatctgagcttgctcagcattgtagagggtgttacgggcattgattaagttaaagacagcaagggagaggcgtgtgagggcagagaaatgtgctttacctctgggcaggctgatgtgacaagctcattgagcctccagagagattttttccaaaagtagctggaaatataggcctacagcacaaaagccctaggagccaggtgaacgcctggaa

SEQ ID NO: 702280 - DNA, 1421 bp, Homo sapiens
ttcattcccactttagagttttgtacttgtgctggtctctctacccagtatactctgcccaccaacattggcatgctggcttcttcttgtcattcagatctctgtttaaacatcatattcccagagctaattccttgagcattttgtctaaaatagcccttccctctcagtcacttacatcttataaagctaattgtcttcagacatttargatcattgacaatgactgatgctatatgtgctatctcttttcctccaatagtagaatatggattctatgagtagaaaccttgtctgacattttccctgctatatccctaacaccatggaatgtatatggcacttgacggttgctctataaatacttgttggatgactcaatgagtgaacaaactagaaatatttgttatggactataagaggttgacagtgaacttcaccttgcaaacctcatagtctttagtattggcactagaagtctcatcttgatcccatgctcaactggtagaaggtcatagtgttgggtctgggctgggttgcagtgtcccactcacctaggctttgtggagcttagctgtggctagtagaacaaggtaccaagggtcagccaagaagcaatctccaaacttatcagaaagtccaacctggccactacttcttgtaggataggcaaagtgggaagaccttggtatgaagcataggatataaactggggaagccaaaccagagttcaagtctggaggaattcccagagctatgggaacgtgactgtagaaggcccctatagttttgggtgagctggtgaaggagcagttagacttacttggtttaggcacacaatgatcttcagtccttctcttgaaggcatgagctggctgcagttgcactttgccctactggaaaggatctgatgccagagactgacaatgggtcaagggcttggtggagagtattcactgctgattaagtctttcttgatactgaatagagagtagatttagtggaggggaagggaagaccacaggaagaccaccaaagagattattctacagtccagtaaagagaggacaagagccagtgatggcagaagggaggaagagaaagagattcatgcaagagaattactcatgcaaaatgtgcaaaatttaaattcaatcagattagaccaatggaaaaagaaaaagaaggatgccatgaagactaggaggatctgagcttgctcagcattgtagagggtgttacgggcattgattaagttaaagacagcaagggagaggcgtgtgagggcagagaaatgtgctttacctctgggcaggctgatgtgacaagctcattgagcctccagagagattttttccaaaagtagctggaaatataggcctacagcacaaaagccctaggagccaggtgaacgcctggaa

SEQ ID NO: 702281 - DNA, 1421 bp, Homo sapiens
ttcattcccactttagagttttgtacttgtgctggtctctctacccagtatactctgcccaccaacattggcatgctggcttcttcttgtcattcagatctctgtttaaacatcatattcccagagctaattccttgagcattttgtctaaaatagcccttccctctcagtcacttacatcttataaagctaattgtcttcagacatttaagatcattgacaatgactgatgctatatgtgctatctcttttcctccaatagtagaatatggattctatgagtagaaaccttgtctgacattttccctgctatatccctaacaccatggaatgtatatggcacttgacggttgctctataaatacttgttggatgactcaatgagtgaacaaactagaaatatttgttatggmctataagaggttgacagtgaacttcaccttgcaaacctcatagtctttagtattggcactagaagtctcatcttgatcccatgctcaactggtagaaggtcatagtgttgggtctgggctgggttgcagtgtcccactcacctaggctttgtggagcttagctgtggctagtagaacaaggtaccaagggtcagccaagaagcaatctccaaacttatcagaaagtccaacctggccactacttcttgtaggataggcaaagtgggaagaccttggtatgaagcataggatataaactggggaagccaaaccagagttcaagtctggaggaattcccagagctatgggaacgtgactgtagaaggcccctatagttttgggtgagctggtgaaggagcagttagacttacttggtttaggcacacaatgatcttcagtccttctcttgaaggcatgagctggctgcagttgcactttgccctactggaaaggatctgatgccagagactgacaatgggtcaagggcttggtggagagtattcactgctgattaagtctttcttgatactgaatagagagtagatttagtggaggggaagggaagaccacaggaagaccaccaaagagattattctacagtccagtaaagagaggacaagagccagtgatggcagaagggaggaagagaaagagattcatgcaagagaattactcatgcaaaatgtgcaaaatttaaattcaatcagattagaccaatggaaaaagaaaaagaaggatgccatgaagactaggaggatctgagcttgctcagcattgtagagggtgttacgggcattgattaagttaaagacagcaagggagaggcgtgtgagggcagagaaatgtgctttacctctgggcaggctgatgtgacaagctcattgagcctccagagagattttttccaaaagtagctggaaatataggcctacagcacaaaagccctaggagccaggtgaacgcctggaa

SEQ ID NO: 702282 - DNA, 606 bp, Homo sapiens
tgtcctactgtgtattacctctgaataataatgtaagcatatattttatattacatccattttagaaagtatgtcttgattttcacctcaattagatgaagacatgagggcccctcttcttcctcccatacctttctcactttctgacagctggaatttgcttttacactgggaagctgatcatatcacattttcttctataaccgtatttaatcttctgtgtcctacgagactgattctcaaggttaaaaaccaatagacactatttctgttattataaatctgaagtcattgatatatgagtccttttcatagatattgaggcaggtgctgagcttggattaccagacaggggtcatgaggcaggagtcatgtgccctaggtgcagcggcttctcttcatcacattccggcagtgtcccggcagcatgtcaccatctggcagcgcttcactttrgcttaagcagacagaggaatctggccaggacaccacttacacagggatctagaagccccaattctcagaaagaatgtttgtctctacggaagggagctccgtttttgcctggagatggctgccacacctccaaactcagggatgtgtgag

SEQ ID NO: 702283 - DNA, 657 bp, Homo sapiens
tcttggaccctgtaaggcaggattgagactgctggcctctgttgtgacataatatatttcttattgcaccattttgcagtgatttgtttgtgtcttttttcttttctggttgttgttgttgttgttttgagatggagtctcactttgtcacccaggctggagtgcagtggggcgatctcggctcactgcaacctccacctccagggttcaagcaattctcctgcctctcaacttcctgagtagctgggattacaggtgcgtgtcaccacgcccagcaaattttttgtgtatttttagtagagaccgggtttcaccattttggccaggctggtctcaaactcctgacttcgtgatccgcccgccttggcctcccaaagkgctgggattacaggcgtgagccaccacgcctggcctatgtctttcttgcctattataatttgaacctcattgagagtagagacctttacctgtttttgtgctctatcattgagtacagcaccttacacctataaggtaaaaaatggtctatgaagtgagaaaatgaatgattaaatgacgtacggatcataggcttttcttcccaatacatatgtccacaaaaaaaattttgcctcacattattctaggtgaagtaagtcaggaatagaaaactaaata

SEQ ID NO: 702284 - DNA, 1359 bp, Homo sapiens
ttttattctaactcttattgggcatttaattattaaaaatatcacaaaatccttaaagtatattaacaaattaaatctttttaaaacaattagtatctgataaaaataaattgccttttagatcaaagaaaaactcgattcaacttgaaagcttgaaacaacagaataataaaaatcagagtttctaaagtttttctcttataaatatgtataggatctatatttttaaagggattcacactcatatatatatcaattcaaatttatttttcatttttctgatagtttcttgttgtttttgaaacatcatgaacatatgtctaaaataaaactgtactgctttgtagaaaacatattagtgtaaaagatgtataaagatggtaacattttattctgattataaattttaggtatcactttattttttattgtattaaacatactccatacagcagctaatagtaacagatacgaacgtaaagaagaaaatgaaaaaactatcttatatcaacataggatgaataccaaagtctgagaaaaasaattttaaagtactaatcggaatacatgttaggatagtaaattaaaaggtggctacattggacatttataattatttctgtgtctgtgtgtgtagagtcagtaatacagatacctgacaataaaaatcagtataggcagtaatatggaatccaacattttcagtgcatgttctagttcaaacacaaatgttagatcaatagaactgaaagtcagcattggtctggtgaaaggaaaaaaaaaatatgaggtatatccacaaacaattgcagctttttttttaagtaagtgctgttataggtgtctcctatataatgctgactgcagcatgttaaggaatatgctgatttccattcagtcatgtattggcattgtgtactaattctgttacaatcatgtgaaaaacagaatcttgggtttggcttttttaaaagagctgtctttgaactcaacatataatgatcacattcattaataacactttcacaatatatttgtggatataatttctcttgggttctgtttctctattattaagattagacaactgattagatgaattatgtgagcccctctgatttattaaaacatatgcatgcagtctgtgaaatttagtacacatacaaatatacatacacacatatatactcatatatatctgaatatcattttttctagttcaaagttaacaacaaactagaatcaatattccatagatatgaagggaaaaataatgtgttataagccattaccactaacacataaatgtagtgtgttacagaaaaagagaggaaaaaaagagcaaaatgatagtaaaga

SEQ ID NO: 702285 - DNA, 649 bp, Homo sapiens
catgaagcaataattacaaaactttcggatgggattacactgtatttatgtgtgtgtgtatttgtgaatatatatgtaattcatatatatcatatatgatataatactgtacaaattatgtatatcatgtataaaattaatatgatttatrtggcaacaatagcacaaaagagggtggaggtaatggatgtattttggaacaaaatttttatatacttaagttagtataacccaaactactttattttaagctaaaaagccaattttaatcctatattaaccagtaagaaaataacttaaaaaatatatcaaaagaaacaagataattaaaatgctacactagaaaatatctaactcaaggcagtaataaaagaatagataactaggttgggcacagtggttcatgcctataattccaacactttgggaggccagggtgggcagatcacttgaggccagcagttcaagaccagcctgcacaacatggtgaaaccccaactctactaaaaatataaaaattagccaggtgtggtggcatacgcttgtaatttcagctaatcaggaggctgaggcagaagaatcgcttaaaccccagaggcgaagtttgcagtaagtcgagattgtgccaccgcactccagcctgggcaat

SEQ ID NO: 702286 - DNA, 649 bp, Homo sapiens
catgaagcaataattacaaaactttcggatgggattacactgtatttatgtgtgtgtgtatttgtgaatatatatgtaattcatatatatcatatatgatataatactgtacaaattatgtatatcatgtataaaattaatatgatttatatggcaacaatagcacaaaagagggtggaggtaatggatgtattttggaacaaaatttttatatacttaagttagtataacccaaactactttattttaagctaaaaagccaattttaatcctatattaaccagtaagaaaataacttaaaaaatatatcaaaagaaacaagataattaaaatgctacactagaaaatatctaactcaaggcagtaataaaagaatagataactaggttgggcacagtggttcatgcctataattccaacactttgggaggccagggtgggcagatcacttgaggccagcagttcaagaccagcctgcacaacatggtgaaaccccaactctactaaaaatataaaaattagccaggtgtggtggcatacgcttgtaatttcagctaatcaggaggctgaggcagaagaatcgcttaaaccccagaggcgaagtttgcagtaagtcgagattgtgccacygcactccagcctgggcaat

SEQ ID NO: 702287 - DNA, 931 bp, Homo sapiens
agttctgggggtggagatagttgaaactgatgatgtttatactgcaactgttttaattctatagtttattgtagggatattcgtaactttataatgttgagattgcttaatcaagaacatagtatgcctttccacttcttccagtcaacttttgtattttgttaagtttcatctaggtactttatatctacttgtctttctatctatttatttattactatagtgatgaactcttttcttccattacatcatctaaccaattttgttgcatatatgaatgctattaatttttgtatgttgtgttttataactagttatattttaaattctcacaatatttgagataagtttttcatttttttaggttttctgtgtatttccaatttgaaagtactccattggccaataagatcactgaaagacagacaattatatattacataccacctactagaaatacacatcacaatctacgacatgtactaggtaaaaaaaaaatcaaattcaaatcagataaagcctctatatccaattactaatyggaaagaaccatagggcatagcaatatgacaatacaagatgcaattagcaaaattttaactaaggaactactacagagaagcaaacactttttttcaatgaaagggtgagaaaactgataggaacttagttgaaaattttattgaaagtagaaaaataatattttatattaactatattttatattaatttaaatatatattagattttataatatctatatactaactcaaaaaacgcattttatattctttacaatatctacttaaaataatagtaaaagaatgcctaacttttctctttaacttttttctttaacgggaaatgtcatataataaaactaacttaattcaacaataggcaaaatggagagaaaaagagaatattaaaa

SEQ ID NO: 702288 - DNA, 931 bp, Homo sapiens
agttctgggggtggagatagttgaaactgatgatgtttatactgcaactgttttaattctatagtttattgtagggatattcgtaactttataatgttgagattgcttaatcaagaacatagtatgcctttccacttcttccagtcaacttttgtattttgttaagtttcatctaggtactttatatctacttgtctttctatctatttatttattactatagtgatgaactcttttcttccattacatcatctaaccaattttgttgcatatatgaatgctattaatttttgtatgttgtgttttataactagttatattttaaattctcacaatatttgagataagtttttcatttttttaggttttctgtgtatttccaatttgaaagtactccattggccaataagatcactgaaagacagacaattatatattacataccacctactagaaatacacatcacaatctacgacatgtactaggtaaaaaaaaaatcaaattcaaatcagataaagcctctatatccaattactaattggaaagaaccatagggcatagcaatatgacaatacaagatgcaatyagcaaaattttaactaaggaactactacagagaagcaaacactttttttcaatgaaagggtgagaaaactgataggaacttagttgaaaattttattgaaagtagaaaaataatattttatattaactatattttatattaatttaaatatatattagattttataatatctatatactaactcaaaaaacgcattttatattctttacaatatctacttaaaataatagtaaaagaatgcctaacttttctctttaacttttttctttaacgggaaatgtcatataataaaactaacttaattcaacaataggcaaaatggagagaaaaagagaatattaaaa

SEQ ID NO: 702289 - DNA, 653 bp, Homo sapiens
tcaattaaaacattctttgtatattatatgtattatacactatattcttacaataaagtaagctagaggaaagaaactattattaagaaagtcacaaggaagaaaaaacatatttactattcattaagtggaagtgaattatcataaaggccttcgttcttcttatcttcaagttaagtagcctgagagggaggaggaagaggaagagttgatcttgctgtattaggsgtggcagaggcaagcagaaaaaaaaatccacctataagtgttcaaaactgtgttcttcaaacgtcaactgtacaatcataggtattttagaaattctagcttcattgactattattctataactaaatgaaagtaaataccactttaaattgttgtgggttgtaaaaagagcctgagttgaacctaagtattcctgcacaaatgttggcagcaagttcaaatatatatttacctatgtatgtttcaccaggctgtgacaaattgctttaaaattatatttttagaaagtaataattccttccacatgtatgttaattgattataatcattatgtaatcacaataaatacatctttggctaattcaagaagagataaagggaaacacaacaacgaggaaaaagtcagcagagagtatttcaggggg

SEQ ID NO: 702290 - DNA, 611 bp, Homo sapiens
ttaattacttactattgcacgaatcttgcaaagatttctggaacttgggaatacacatactgccttgactctatgacttgccaggtataaagctttctttatggggtttggggtgcttgtctttacatcagttttcaatccttcaaaatgtagacttctttatagaagaaatgtttctcaatattggtctgaatgttgatagagtactttaacatgtttgtgaactatgcagagtcaagaagcagcattttgtctcagttttgtcgttttgggattgtatttcatcttggtgatgaaatggttaagcattggattgtccacccaagygggtgtacctagttatagacttggttttaaatattttgtcctcaatagtaagggtgaacatatcaaggtgccacgtttaaggtcacaaaccaacgccaacacactttttaaaaatcaacacacttttgggcctcaatattttgtccaaattatgatcaataacagtgacagttggctgattggggattttagtcacaataaatgcagcaattaagcaagtgtcttcataacactggaaagttactaacgtcggtgattctgtgacaacaactatgataggcttc

SEQ ID NO: 702291 - DNA, 601 bp, Homo sapiens
ggcagaatacacttgggctaataacaacagagtccaaaggtccaaatggactaggtgaaggtacggctactctaaacaagaaagaaagatagaaggtgtaatattgaaaggagtattgattttcaattataagatacagccagtcagaagtgaccccacaaaaagttaccctgggaatcaatactctaaaataccctgacccattttccaaacttcctcacataacctaggtgggctacttgttgaatgaacataaccagacatcagatggcaaaggagctcagagcaagtatcaggatataaaatcgatctgcaggggcaacccaaagttatctggcacataatgcctaaatgagtggcttccartacatgtggaatcactacttaaagttactgcaaaaagtatctgttcgcttctcaataaattctgatgcctttgtagcagaggacaatttcagtttcaagaggatcaaactaagagttaaagtgaagtcatcatttacatctaatgtatcctcactgtatgtgcgtttatgatcggagagagggtacgtacaaaagaaatcatttttaaatgtaagaccaaggtatgggtaccatt

SEQ ID NO: 702292 - DNA, 634 bp, Homo sapiens
catgaggattacttgagaccaggggttcaaaccagcctgggcaacataatgggaccaagtctccacaaaataaaataaaaaaaaaaatagccaggtgtaatgccttgtacctgtagccctagttactctggaggctgaggcaggagatcacttgagtccaggaatttgaggctgcagtcagctatcgtcctgccactgcacttcagcctgagcaacagagcgagatcttgtctctaaaatataaataaataaatggatttggggcatcagctgtaatctacattaatacacaaggagctatggatgaagaggaaaaataccaatggaaaatraactaaggcatactgataggcaaggaagaatttatgataagctggagatcttcatgggtgtaattggtgtgatcttcttaaggtataaatagatcttcttatatttgcattattaatcactcagcttccacctgcttatgttaataggcacttcagcgtcttccttttaaggcccaccatcaggtttccaagcatccaacttactcagattatctgtggtcagtaccatttcctaacagagtagaaaatactcagctcaaaaaatcctctgatagggctaagttttagttttcatggtgtca

SEQ ID NO: 702293 - DNA, 634 bp, Homo sapiens
catgaggattacttgagaccaggggttcaaaccagcctgggcaacataatgggaccaagtctccacaaaataaaataaaaaaaaaaatagccaggtgtaatgccttgtacctgtagccctagttactctggaggctgaggcaggagatcacttgagtccaggaatttgaggctgcagtcagctatcgtcctgccactgcacttcagcctgagcaacagagcgagatcttgtctctaaaatataaataaataaatggatttggggcatcagctgtaatctacattaatacacaaggagctatggatgaagaggaaaaataccaatggaaaataaactaaggcatactgataggcaaggaagaatttatgataagctggagatcttcatgkgtgtaattggtgtgatcttcttaaggtataaatagatcttcttatatttgcattattaatcactcagcttccacctgcttatgttaataggcacttcagcgtcttccttttaaggcccaccatcaggtttccaagcatccaacttactcagattatctgtggtcagtaccatttcctaacagagtagaaaatactcagctcaaaaaatcctctgatagggctaagttttagttttcatggtgtca

SEQ ID NO: 702294 - DNA, 634 bp, Homo sapiens
catgaggattacttgagaccaggggttcaaaccagcctgggcaacataatgggaccaagtctccacaaaataaaataaaaaaaaaaatagccaggtgtaatgccttgtacctgtagccctagttactctggaggctgaggcaggagatcacttgagtccaggaatttgaggctgcagtcagctatcgtcctgccactgcacttcagcctgagcaacagagcgagatcttgtctctaaaatataaataaataaatggatttggggcatcagctgtaatctacattaatacacaaggagctatggatgaagaggaaaaataccaatggaaaataaactaaggcatactgataggcaaggaagaatttatgataagctggagatcttcatgggtgtaattggtgtgatcttcttaaggtataaatagatcttcttatatttgmattattaatcactcagcttccacctgcttatgttaataggcacttcagcgtcttccttttaaggcccaccatcaggtttccaagcatccaacttactcagattatctgtggtcagtaccatttcctaacagagtagaaaatactcagctcaaaaaatcctctgatagggctaagttttagttttcatggtgtca

SEQ ID NO: 702295 - DNA, 2643 bp, Homo sapiens
ctttacaggactcaaatttatcatcttaaaatgagtaattttacctattcctctcaacgttacgtaaattttaatactggtacttaccactattctttgtgctttgctgttttctataattggaggtacaaaattctgactgacttttcacttcaccttgagagatgtttattccttattctctattgagatacattagaaatatgagatgaggctatttataatttttgtaaatttgataaaagttaaggatgttcgaatatagtatttctgatgtaaaaacaagcacgaaaattaaatttaggcaatttataattaggtctccttcccaattaaaataaatattaatgcttcttataggtattcaccatttaataattattaaagtaattgctttaatggcataatttctttttttctattttgtgcattaccataaaataattataaatcaagctgtgatagtgtccaagttacattttatgtgaaagacggaagtaactccctgttccactgtacacaaaagccagcaatattattgcatataatacatggtaaagcagtattttttattctcacaaataaagcataccattactttctccaagtcaggcagcgatgagcctaatctcatctttacaaaacacattcacagtttcwcctgattcaatatgaagggcaggtgaatgtatctgagatctgaggaaatcttcccagtattgcaaaagcatactagagttccccttcatcatctgtcaccagcatcttcatccccttttagggtacatcgaaggtcttccacaaggtgcttcgtctaagattgtcaaccctgagcagagccatggacacttaagtttccttctttcatcaagacaaccttgccctgcatttcactcccctgagccctgctctctgattacaggcagctagacattctgatgaattcccttgaacgatggaattttcttcctctcagaatgctatttaagttaatggttcagaccatcaactcaaaggaccctttttgtgaccctcaattgacatcaactcaagggaccctttttgtgaccctcaattgacatcaagtagtctagattttccctgtctggaaaaacaaaagagtggaagggaaggacaggagcactgtgtgcctgatagacctgaattcagctaatgacaccgctgtttctcttagcttttggaaggtgggagagttattcgagcattctaaacttagttttctcagctttgaaatgagaacagtgtgacctattccttagcaacattgcttgagttacataaagctatacaccttgaaggtgtcctgattactgatagttctcactgttcaagcatcctttcctcctagatgtgaactccgtaaggttcttttcacttttgtcactaaaggcctatcttataaccatttattcataacgtggccagcctttggccaacaattatagaactttattttgttgaataaagaagctgaggcaaaattaatatagagtgtttatttggggtaaggttgaggacagctgtcctggacacacttccaagttgccttggggagtgctctgggagaacaaagaaaaggctcaagatttttattttttttaaaaactgaggaatcagaaaaggaagtaattacaaagggtgcttgtcagaaattcttcctccccccagaaataacattatttattggatatgcattgttaaactacagagtctgagttataatgtccagcattgatgttttatggctacctggtgttggttagactagagctcacatagcaggtggctttgaggtgattatttagctcaaggtgggagtgagacatggctgctgtttcattccagtgtttctttgggcctgataatttaaaggggcttgcattcttccgttacaattttcttttctttttaaatttcaacaagtgtaaatgttccttgaaataaccttacttgaaattattaacaatttttcctaaagggaacatttctttttccaagctacagatctctcaggcctgttaagttcagaaaccaaacgtgatcattattattttgagagctgaaaagaaagtggcactcccattgtttttgctgagcagaaaggcatttcagaatttaaaatattgttgtgtatctttcatcagattattttcctgttaagtgtcagggttccttggagtcctttttattgagatttttgtataatacttattgtttgtcacaaaataatctgtgaccataattgcttagatgactagtaaatccaatttcacttcttaccagttttcatcttaccagtagaatctgacaggcctgggcatccacttgctcttcaatagtgcctgccatggatttattcagtgatgctcaatcacacttgacaggctggacttctgttttttaaaatgtctttctcatggtttgatttatttatgcctggatatataggttctttctcgcttcacagatgatttgttaaagaaaaaaaagtcccagtctttcttcctggaaattagaatcattttcctttagacagacattctgcagtatgtttttttcagtattttgcaaatgcaaaattgtgtgccctttattcaactgtataatgaatatttgaaaaga

SEQ ID NO: 702296 - DNA, 2643 bp, Homo sapiens
ctttacaggactcaaatttatcatcttaaaatgagtaattttacctattcctctcaacgttacgtaaattttaatactggtacttaccactattctttgtgctttgctgttttctataattggaggtacaaaattctgactgacttttcacttcaccttgagagatgtttattccttattctctattgagatacattagaaatatgagatgaggctatttataatttttgtaaatttgataaaagttaaggatgttcgaatatagtatttctgatgtaaaaacaagcacgaaaattaaatttaggcaatttataattaggtctccttcccaattaaaataaatattaatgcttcttataggtattcaccatttaataattattaaagtaattgctttaatggcataatttctttttttctattttgtgcattaccataaaataattataaatcaagctgtgatagtgtccaagttacattttatgtgaaagacggaagtaactccctgttccactgtacacaaaagccagcaatattattgcatataatacatggtaaagcagtattttttattctcacaaataaagcataccattactttctccaagtcaggcagcgatgagcctaatctcatctttacaaaacacattcacagtttcacctgattcaatatgaagggcaggtgaatgtatctgagatctgaggaaatcttcccagtattgcaaaagcatactagagttccccttcatcatctgtcaccagcatcttcatccccttttagggtacatcgaaggtcttccacaaggtgcttcgtctaagattgtcaaccctgagcagagccatggacacttaagtttccttctttcatcaagacaaccttgccctgcatttcactcccctgagccctgctctctgattacaggcagctagacattctgatgaattcccttgaacgatggaattttcttcctctcagaatgctatttaagttaatggttcagaccatcaactcaaaggaccctttttgtgaccctcaattgacatcaactcaagggaccctttttgtgaccctcaattgacatcaagtagtstagattttccctgtctggaaaaacaaaagagtggaagggaaggacaggagcactgtgtgcctgatagacctgaattcagctaatgacaccgctgtttctcttagcttttggaaggtgggagagttattcgagcattctaaacttagttttctcagctttgaaatgagaacagtgtgacctattccttagcaacattgcttgagttacataaagctatacaccttgaaggtgtcctgattactgatagttctcactgttcaagcatcctttcctcctagatgtgaactccgtaaggttcttttcacttttgtcactaaaggcctatcttataaccatttattcataacgtggccagcctttggccaacaattatagaactttattttgttgaataaagaagctgaggcaaaattaatatagagtgtttatttggggtaaggttgaggacagctgtcctggacacacttccaagttgccttggggagtgctctgggagaacaaagaaaaggctcaagatttttattttttttaaaaactgaggaatcagaaaaggaagtaattacaaagggtgcttgtcagaaattcttcctccccccagaaataacattatttattggatatgcattgttaaactacagagtctgagttataatgtccagcattgatgttttatggctacctggtgttggttagactagagctcacatagcaggtggctttgaggtgattatttagctcaaggtgggagtgagacatggctgctgtttcattccagtgtttctttgggcctgataatttaaaggggcttgcattcttccgttacaattttcttttctttttaaatttcaacaagtgtaaatgttccttgaaataaccttacttgaaattattaacaatttttcctaaagggaacatttctttttccaagctacagatctctcaggcctgttaagttcagaaaccaaacgtgatcattattattttgagagctgaaaagaaagtggcactcccattgtttttgctgagcagaaaggcatttcagaatttaaaatattgttgtgtatctttcatcagattattttcctgttaagtgtcagggttccttggagtcctttttattgagatttttgtataatacttattgtttgtcacaaaataatctgtgaccataattgcttagatgactagtaaatccaatttcacttcttaccagttttcatcttaccagtagaatctgacaggcctgggcatccacttgctcttcaatagtgcctgccatggatttattcagtgatgctcaatcacacttgacaggctggacttctgttttttaaaatgtctttctcatggtttgatttatttatgcctggatatataggttctttctcgcttcacagatgatttgttaaagaaaaaaaagtcccagtctttcttcctggaaattagaatcattttcctttagacagacattctgcagtatgtttttttcagtattttgcaaatgcaaaattgtgtgccctttattcaactgtataatgaatatttgaaaaga

SEQ ID NO: 702297 - DNA, 639 bp, Homo sapiens
tgcagacactggagaatgagtaaggcagagtagaattttattgagcaacaggaagaatgctctcagcaccgagaggggacccgaaagtggattgccagttaagaggctgaatctggggtttttatgggcttagaatggggaaacgtatgctgatwggtttatgaataggcttggaaaaagcaacatttagaaagaggtatgatagtgtaaagaaccaatgcagggctgaagtgaagatcccggtactaatcaggggctgagtataccaaacaagaatggaagttctcagtctggtccatggactccatctggagctcgtagtttggtgttcagacttcacactgtccttgacttgaaggtcaagtttcaccaggaacccctccctgtccacctgggaacttgtctgcctcctatcgctatcatttgtgtacctgtagtagagcctcacttacctattatgatcaagcaatggatttttccatataagtgaattgtcctgataatttatcactacaagaactattaaaaatcattcttttttaaaagagatgtggtgtcactatttggctcatgtcggacttgagcttctgggctaaagggatggtccagcctcagcctccagaatagatggggctataa

SEQ ID NO: 702298 - DNA, 639 bp, Homo sapiens
tgcagacactggagaatgagtaaggcagagtagaattttattgagcaacaggaagaatgctctcagcaccgagaggggacccgaaagtggattgccagttaagaggctgaatctggggtttttatgggcttagaatggggaaacgtatgctgataggtttatgaataggcttggaaaaagcaacatttagaaagaggtatgatagtgtaaagaaccaatgcagggctgaagtgaagatcccggtactaatcaggggctgagtataccaaacaagaatggaagttctcagtctggtccatggactcyatctggagctcgtagtttggtgttcagacttcacactgtccttgacttgaaggtcaagtttcaccaggaacccctccctgtccacctgggaacttgtctgcctcctatcgctatcatttgtgtacctgtagtagagcctcacttacctattatgatcaagcaatggatttttccatataagtgaattgtcctgataatttatcactacaagaactattaaaaatcattcttttttaaaagagatgtggtgtcactatttggctcatgtcggacttgagcttctgggctaaagggatggtccagcctcagcctccagaatagatggggctataa

SEQ ID NO: 702299 - DNA, 639 bp, Homo sapiens
tgcagacactggagaatgagtaaggcagagtagaattttattgagcaacaggaagaatgctctcagcaccgagaggggacccgaaagtggattgccagttaagaggctgaatctggggtttttatgggcttagaatggggaaacgtatgctgataggtttatgaataggcttggaaaaagcaacatttagaaagaggtatgatagtgtaaagaaccaatgcagggctgaagtgaagatcccggtactaatcaggggctgagtataccaaacaagaatggaagttctcagtctggtccatggactccatctggagctcgtagtttggtgttcagacttcacactgtccttgacttgaaggtcaagtttcaccaggaacccctccctgtccacctgggaacttgtctgcctcctatcgctatcatttgtgtacctgtagtagagcctcwcttacctattatgatcaagcaatggatttttccatataagtgaattgtcctgataatttatcactacaagaactattaaaaatcattcttttttaaaagagatgtggtgtcactatttggctcatgtcggacttgagcttctgggctaaagggatggtccagcctcagcctccagaatagatggggctataa

SEQ ID NO: 702300 - DNA, 794 bp, Homo sapiens
gagaggagaagagaagagaaaaaaagaagaaaagaaaaaagaaaagaaaagaaaagaaaagaaaaaaattctaacagcctcttcttcagttgagactcaggatgagagtgcagccctatgagaactgagtagaagacagctaagctaactgtgagatgataaatgtatgttgttttaagatgttaagtttgtggtcctttgttacatagcaatagagaaactatttcaattatgttgtgaawatgtttgaaaataattgctctagataaatcttaattgcctataggcaaaccatgttcatcaataccaataaaatcttctatgagtatagctaatttcactagggttcagccctcatctactaattacataaaatgtcagcagttagtaagacaatgttcatccaagtatttgttggcatcccttaggttgatattttcatagtttatgcatctgtcctgacttcttttttcaatgatttctgtaacctgaagttctatcactctttctgtcactaaagcatcctgtattccaaacacatctgtgtcatattagattatttttattgatctgagcaataccaatactataaccacttgtgtttcctaccccaacacaaagatcactgaagattgtggcaaatttctcatgcatgttttctaccttgaggttgcaataaacaagcaatcgcctaggcgtcacttaattcagaagcaagatgactctttgttgttatttttagataaggaaatcccacaatctagctctcttggctattaagttttaagaaaata

SEQ ID NO: 702301 - DNA, 741 bp, Homo sapiens
aggttaaacatctggtatatatgcattggaatattattcatccttaaaaagaaggaaattctgtcttttcaataacttggatgcatctagaggtkgtgctaagtgaaataagctaggctcattaaggcagtcactgcatgctctcacttatatgtgtgtcaaaaagtcatcaaactcctaaaaacagagaatatattgctgtcaagggtaggggaaatgaggagatgttggtcaaaggatgcaaagttttacttacgcaggataaattttttgtggagatctaatgtacagcatggtgactatagttaattattatgtgttttatacttaaaatttgctaggagaatagatcataaatattctcaacacacacacaaaattgacaactgtctgaggtgaagaatatgttaattagctttactgtagtattatttaactctgtaaatgtatgtcaaaacatcatgttggatatattaaatttatccaatttttatgtgtcaattatacctcaataaatctaaaacaagaaattctaacaaaaatgtcttaaagtagaaatttttcttatttaataatttaacaatttttttttacttcaaaggcaatttttgcttaatgcaaaaccttgagaatcagggataagtatggaaaaagaatagcatcataatttatcacaaacaaagcacatctaaactataaccatatttagagatacaaagataaatatagttggtcctttat

SEQ ID NO: 702302 - DNA, 741 bp, Homo sapiens
aggttaaacatctggtatatatgcattggaatattattcatccttaaaaagaaggaaattctgtcttttcaataacttggatgcatctagaggttgtgctaagtgaaataagctaggctcattaaggcagtcactgcatgctctcacttatatgtgtgtyaaaaagtcatcaaactcctaaaaacagagaatatattgctgtcaagggtaggggaaatgaggagatgttggtcaaaggatgcaaagttttacttacgcaggataaattttttgtggagatctaatgtacagcatggtgactatagttaattattatgtgttttatacttaaaatttgctaggagaatagatcataaatattctcaacacacacacaaaattgacaactgtctgaggtgaagaatatgttaattagctttactgtagtattatttaactctgtaaatgtatgtcaaaacatcatgttggatatattaaatttatccaatttttatgtgtcaattatacctcaataaatctaaaacaagaaattctaacaaaaatgtcttaaagtagaaatttttcttatttaataatttaacaatttttttttacttcaaaggcaatttttgcttaatgcaaaaccttgagaatcagggataagtatggaaaaagaatagcatcataatttatcacaaacaaagcacatctaaactataaccatatttagagatacaaagataaatatagttggtcctttat

SEQ ID NO: 702303 - DNA, 1836 bp, Homo sapiens
  misc_feature 431, 432, 433, 434, 435, 436, 437, 438, 439, 440, 441, 442,443, 444, 445, 446, 447, 448, 449, 450, 451, 452, 453, 454,455, 456, 457, 458, 459, 460, 461, 462, 463, 464, 465, 466,467, 468, 469, 470, 471, 472, 473, 474, 475, 476, 477: n = A,T,C or G
  misc_feature 478, 479, 480, 481, 482, 483, 484, 485, 486, 487, 488, 489,490, 491, 492, 493, 494, 495, 496, 497, 498, 499, 500, 501,502, 503, 504, 505, 506, 507, 508, 509, 510, 511, 512, 513,514, 515, 516, 517, 518, 519, 520, 521, 522, 523, 524: n = A,T,C or G
  misc_feature 525, 526, 527, 528, 529, 530: n = A,T,C or G
ggtacccccatcctttctcaagctccctcccactacacaacagccagagtgttttgaagcacacgtcctgttcagtaggatcccgttgctcccaggataaagaccaaagctcttcacatggcccacagcccatgcatggtcttgccccatgctcccccacccatttggctccagctattgcggtcttcttccggttccatgtgctttaccaaaaggcatttgcacatgctactccctgtgtctagaattttgttcctttccacctttggtctagttagctcctagtcatccttaagccccaagcacaatcactttttccttaggaaatccttccattaaccaacaggcaaaggagagttccaccatcaaatactcttacagctccatgcctctctccttactaatacttagcatggttataattgcatccnnnnnnnnnnnnnnnnnnnnnnnnnnnnnnnnnnnnnnnnnnnnnnnnnnnnnnnnnnnnnnnnnnnnnnnnnnnnnnnnnnnnnnnnnnnnnnnnnnnncaaatacacgaaaaccctctgatgtgtctattcacgaggtgaactgttcataggatggactattcccagggaaacagttgctgtctccacttccatcccacctctcctgaactttgcacttaccatggtgaaaaattaactgggctaatgtttccctcccaaggacaacctctgcaaaagcaggtatggctgggccccaaaagaccaggtgccagaacagagttgtacccatccagagcagcccacccattcactgcccaaagtcaagatcaagagaacatgcagggtcttctcagcactggaagaatcagttcctcagccctcctcagagctttctgaaactggacttagtcccccagtggagggacttctcttggagaaacaggcctgaggagaaagaactagcccagaaatggcacttattagacttgtaggtgggtccagcactatttttctgcatgcacagctgttcttgtcacacggatgccagcagggaagcatggttctgccacactaactagctggctgcctagttatttcctcccctcaggaaaatgagagggctgaatgagggccccttcccataccatgattttacagggtgaagtacctgtcaggtccttctactacatgtaatcctcaaatctctctgacgctcttcctctacagtgcaaatcactctccttcagcagacattgctctctctgtaacataaaggacttgaactacaggaggacagttacaatgctctttctggatccaccactctgcacagtgagaaccgcttgctccattcttacagcggagagaacggacgctgcccaaggggaagaagagaaagagccgggattggaagccaggccagtcactgatggatcctgagcccctcttactttctttggctacctctcaatggttggacttgttcaggttaagattaacactttactggacgatgatgactgcaaggcccctgcccatctttgcccactcagtcacatcatcctcatccccaccctttgatgcttctctaggctgtgaacgccttgaaaaccttagtcttttattttggaagttcaggaactgaataggagggctgcaactcagagctgctccgtcaatgtgtgttaaacttatttgacctccctccaccacttttcatggcattagcaatgcaaaccttttcacatgagcttcccacagccaccctaggagatcgcgagggaagcyacctctagccccattttacaggtgagcaaataatccttgcagtgttacaacagtgtgcccgtgtagagaactgttt

SEQ ID NO: 702304 - DNA, 1596 bp, Homo sapiens
taaagttattttatctcaatagtgctggcaagaaatgatctgggtctaaataagggagggaacaagaaaagtgaaagcaagcagagatgaaggaagaacaaataaagcttctgtagagggtaaaagagaggaagggagtcactgatgaccatcaacatataagagagattgccttggagaacactgttgccaaagagatgtaggttagtcatacaggaatacaatttgtttagagagatgaaagatactgtctgacatatcaaaaatatacagaatatcaagaaagaactatataccacgtagctggggatataagaaagaggtacagagaaaagttgagacaagaaatgttgacgtgggggtctttttcaggttgtaagtaatggccaaagccatggctgcagatgaactcttcaagagaataagggaaattaacagagatgtcagagacccttcaaaatgcttctaaaatatggccctgggcattgcctctacctttgacccagctaaggaccccttcctcctctagcctgatgatcacagcatctttttaataacttcagtctgagtccaattcacatttgaatgtcaaaggaatcctcacattatactgagaagtttcagcaactttcatttgcaaacttaaacccacatttatattgtactatggaaatatgaactttggtcatccagaattcagtatcacttttaagagaggggatcatttaaccatagggtatggccaggcgtggtggctcaagcctgtaatcccagcactttgggaggctgaggcgggcggatcatgaggtcaggagatcaagaccatcctggctaacatggtgaaaccccgtctctactaaaaatacaattagccggggcatggtggggggcgcctgtagtcccagctactccggaggctgagtcaggagaatggcgtgaacccgggaggcggagcttgcagtgagccgagattgtgccactgtaccccagcctgggcaacagagcaagactaggtctcaaaacaaaacaaaaacaaacaaacaaagaaaaacccatagggtatgaatttatcaatgcctaaacctttttcttagatatgcttggacaactaacttactgtacttacccattgtaaatgtgaagcttctaagaaaacattcagcatcaacaatccgtggctatttgaaagcttcttcccagttacagagctttggttcactgatggtagttgcatgtggtgataggtccaatataaatatatcatttatatttgggcatgaaggagatggagtagtctgtggtgaccattttataagaataaattgctaaaaatgatgataatggtgatttctttttttcttttttcttttttttttttaaaaaaaccctggctgaatggtctagaattacctagactgacacttttaggtatatcatggtcatcctccaagctctcttgaaattcagcatcacttaagatcataccacaagtcgtcgagctgttccactaaaaaccaaagccaagaaaggctgtgtagaaataacctttctgggaactatcacaaaggyaatgaagttgaaacttttgtattaata

SEQ ID NO: 702305 - DNA, 1062 bp, Homo sapiens
tttattgatgttgcctttgctgaaaatatctggaaatatctctttaggaattgctctccaagtttatagcacattctttggtaccttatccatcactaatcttacctgttagtgttaagctggatttttcaaaatagacaaaagttatttgatgccaaaactaatgaataggctgggtacggtggttcatgcctgtaatcccagcactttgggaggctgaggcgggctgatcacctgaggtcaggagttcaagaccagcctggccaacatggtgaaaccctgtctctactaaaaatacaaaaattagtcgggtgtggtggcacacgcctataatctcagctacttgggaggctgaggctggagaatcgcttgatcccaagaggcggaggttgcagtgagcagagatcacatcactgcactccagcctgggcgacaagagtgaaactctgcctcaaaaaaaaaaattaaaaattctaatgaataaagtgaataattaaactgggaaatttcagttggggtgaaaaaaatctcaggttatgactatgaggcagatttcttccataacttttattggctcaaaagacaattccaatttaaatatccaaatggttatgagtcatggcagtgttatttgaagcaccaagtgggaaggaactttaagaatcaaattgtcctccatttccttgtaggataaaacagatagtagttgtcagatcttcagagcagatgccacccattcctccatatcatggtttttgccagttctcattgtgatgtcctggcatttaaaaacttatgtctaaccctatttctgtcactttttaaactgtaaatttcttattgtcctgaaaggctaagtcatctcccagcctccttttcttaagacaaaacaacaagcacagttgttggataccaacaaaaagtctggttamttgctctctgaggactgagtgaaactgtttcacatcagtagaaaaaaatgaaaatggtcattttgaaattcagatgactattaatgaccaacaaaatcagcatgttctccatctgcatttaaagtcccca

SEQ ID NO: 702306 - DNA, 651 bp, Homo sapiens
tacaccagagcaaatgtctaatggtgagaagccgcttcaccaccctacagatccgcggtgcagagatttccctgctaaggtcctaactcctgaatgggtacggcgagtacacccgaagaatcgaaaggtacttatcccccactcagttctagaggaagcagcgaggtgggccaagatgcgtggtaaggcccagggactctttgtcaacgaagtccgttaaactttccgccctcccgggggcctcagcgggccaattccactcacttctcggaggctccggcccagcatggtcctcgtgcccagcctgccaccacaggagccaggcaagggggaaaaagaggtyaccggtcgctagtgatgttacatgggcgcagccatctttaattgtcactgagcccttcaacaccgagtacttggattggttgaattgcagcccgaggaaatgatctttgtaggcgattggttggcgccgcaaagccatcccggcggctaaggagagcgggcaggcaaggagattccgggccagggtcgcggcggcagtcggcaagcgttcgattctctggcgttggatcgcgagcggtgtctgcttgtcccgccgagggctcccaggacagggcagggatctagggggtttgcgcacctgctttttaa

SEQ ID NO: 702307 - DNA, 583 bp, Homo sapiens
tgagtgggagtctcttggactatatattaggagtagaattactggatttcacatgtaagaacaggcagtttcattcagtactgccagatcccaccacttgagactcccaccagcagtacacattgttgccatyactgaatattctctcattctaatttttgtcaacttgatagaatgagcagaaagcagtatgtcgtcattgggttaatttgtatttcactattagtgaggctggtatctcttatttataatttgcattttctattcaaggaattgtgtattgtatcctttgcaatttggcttcctctacctttggttgttattattgaagaaattccttataggtttttagtctattattattctgtgttttagagatttgcaatcaaatgacttctcccagtttgccactatgtgctaatccagattatagtgccctcttttggacagaaatctttcagtttgatgtagtggaagtaatattcaatagaacaaaactgcaagatcatgttcagatattaaagtctggaagtatctgtcgtttctgacatttttattagtttttggtaactgctttctcata

SEQ ID NO: 702308 - DNA, 1798 bp, Homo sapiens
  misc_feature 698, 699, 700, 701, 702, 703, 704, 705, 706, 707, 708, 709,710, 711, 712, 713, 714, 715, 716, 717, 718, 719, 720, 721,722, 723, 724, 725, 726, 727, 728, 729, 730, 731, 732, 733,734, 735, 736, 737, 738, 739, 740, 741, 742, 743, 744: n = A,T,C or G
  misc_feature 745, 746, 747, 748, 749, 750, 751, 752, 753, 754, 755, 756,757, 758, 759, 760, 761, 762, 763, 764, 765, 766, 767, 768,769, 770, 771, 772, 773, 774, 775, 776, 777, 778, 779, 780,781, 782, 783, 784, 785, 786, 787, 788, 789, 790, 791: n = A,T,C or G
  misc_feature 792, 793, 794, 795, 796, 797: n = A,T,C or G
tgctatatatttatggtctctttgtggtttcctctgagtttatgagtataggacagtgtaggttttgaggagagctttgagaaatggaaagttttagaccttattaggtgatgatatcttgtattgagttgggtctgtttattgatttagccaatgttaaccaatctagagtgaaacccattgcaaagagtctcaacaattcacatcatggacttctgctgcattcacatgttgtgatctgtaggacacatttgtcctgagtgactcagtgagcacagtgagaccttgctgtcttagtctgttcaggctattatcacaaaataccataaactggtagcttaaaaacaagagaaatttatttctcacagttgtggaggctgggaagcctgagatcaaggtgacatcaggttttgtgtctggtgaggaccaactttctggttctttaacagtgctttctcgcttgtcctcatattctggaaggggtgaggatatctctggggtctctctctcttataagagcacaaatcccattcatgagggttccgcttgcatgacctaatcaccccacctcctaataccatcaccctgggggttaggatttcaacatacgaattttggtgggacacaaacattacaaacattcagaccatagcacttggtacttgctgctctcagaaatttcggtttactgaaattannnnnnnnnnnnnnnnnnnnnnnnnnnnnnnnnnnnnnnnnnnnnnnnnnnnnnnnnnnnnnnnnnnnnnnnnnnnnnnnnnnnnnnnnnnnnnnnnnnngaattctccagtccctacaaattattgttgctttccctttttatttaatgtgaatggtaataccattcttccagctgcgaacatttcataggataaaaataacttttctttccctccattctcccctatcctctaatccaattaaggtctacattcttctaattttcactttctagtgcttcacttcttttaccattagcaccaccttaattctgcaccaattacctggcatccaagtggccatttccacggagaaatgaagtgctatcgctaagaagataatttgcacataatttgaaaaaaaatagatttttttcttacatgcttgtctatagaactgttctgatagagcaccgtattagaattagaatatccttggttattctaagtcttcaaactctgaattccagcctcacttccttttagttggtatgttaattacttgaaagcagttttggataatttagatgtatatgcccccatcrtagataacagaaagataagtattctaaactatgactggcctctatagacaattggccctgctaagtgaactatggtaaaattgccgattataattttggcagatatctgccaccaactttatcatattattcattgacctgcaggcccattttgcaactaacttattatggaagattcaccaaggagtgaagttgcttacaattagatgactcatgggtccttcgttaacttattttccctgaggaatgtactaattggctgctggtaacatttaccttaaaattttcccatgttaaaggaattgcactgaagatacagttattttggagcctcgattatgtctatatgttagaatggaactgctttttatgaggaagaatttggttctgtcaaaaacactttccccataggaatatgggttgaccattttgggggaaccttcattctttttgtttgtttgtttgtttgtttgtttgtttgagatggagtctcgctctgtcgcccaggctggagtg

SEQ ID NO: 702309 - DNA, 612 bp, Homo sapiens
gatgggagtttaaatttgagaatcaaacattctatgtgtttggaagacaactctgcttgctcatccaaggattaaatctggtcagcaggtggaatgtgtataaaatgctacttaacaaagtaaacaaaagattttttttttctttttttttctttcttttttgktttgctctttcagaacaaacattaaatggtgcctccaaggaaactttgccaaatataatctcacctgcttccttccagacagtgtcgctaagtgcatttcacagtttttggatctggcaggcatatgtctctatgtagaaaataagttggttggaggccagagaacaataaatcacattgagaaaatacaaatttaagtatgcattataattaacataagcttagcaatagtataagatgcccccacacacagacatttgcaaagcacatgagaaaatctttaagggtgtcaatattattgaaagacttggccctacttgctaacatctgaaaacaccagagcatgttcagcagcaatgctgttatgaggtattctgggggctctgtgattgaggaaggatggggaaggccaggttcgggtcccgttgatgccaccatacttattggg

SEQ ID NO: 702310 - DNA, 612 bp, Homo sapiens
gatgggagtttaaatttgagaatcaaacattctatgtgtttggaagacaactctgcttgctcatccaaggattaaatctggtcagcaggtggaatgtgtataaaatgctacttaacaaagtaaacaaaagattttttttttctttttttttctttcttttttgttttgctctttcagaacaaacattaaatggtgcctccaaggaaactttgccaaatataatctcacctgcttccttccagacagtgtcgctaagtgcatttcacagtttttggatctggcaggcatatgtctctatgtagaaaataagttggttggaggccagagaacaataaatcacattgagaaaatacaaatttaagtatgcattataattaacataagcttagcaatagtataagatgcccccacacacagacatttgcaaagcacatgagaaaatctttaagggtgtcaatattattgaaagacttggccctacttgctaacatctgaaaacaccagagcatgttcagcagcaatgctgttatgaggtattctgggggctctktgattgaggaaggatggggaaggccaggttcgggtcccgttgatgccaccatacttattggg

SEQ ID NO: 702311 - DNA, 620 bp, Homo sapiens
tgaaagaagattgttcatgtgttgataattgtccaacctgggtgatggaagttcattatatcgattagtttgtttgcttatatatattttaatttttcaataattaaatttataaaaatggaattaacacaaatttaagaagaatttcaccccatgcaactactagaactagaatcacttaagatttgcacaaacaaaaatacacattttacatacrctcaagcacacaatgaagtagagctatacatatggtatggttgaattctcaattatagaatgagggaaaaatgcccaaatatagagaaactccagaccctagaaacctgctaaaatgacagtgagtaacaaatttattttccactgcaataagggccatgtataaaacaatgctgttgttgggtgatacaataatagaaaagagctaataaattgagatagagggcttaaaggggtcattcatgtgggcagactccactgcggcttttgtctgatggaaaatctttcccactgctaaatctgaacactcccaaatggcatcactcaggtttaaaggacttgtgtgcatgcatagttgattataggctattatattacattaattttaatctgaagaagattta

SEQ ID NO: 702312 - DNA, 1155 bp, Homo sapiens
ttattgtccattcctggaaaatgcaagctgtgactgacgtttttacatcttaaatccctctcccagagcaaagcaaattgcttcaaccccaaaatacaggcacaggaaccctagagatgtggtaaggggatgtgagagcttttctttctctgtttccataactgcgaaaacctacaacttaaggtattatactgtcagagcaatgtaatctattttatagacagaccagtcaaaacatacatcttactggtcctgggagtcagtgtaaaaaatccgtgtgtggcttttgaatgagggggaagtggtgtgtgtgtatgtgtgtgatgtcttcaaaacccrtaaacacatctagacagggatgggcaccgataaaggaaatcacacttattatttgaatgtatgccacttggaaatgttcttcattattaataataattaataaataaatggttcagagagttctaattttctcttgctatcagaaattagcatattttttcagttttcctaaattgctacctttttgataatgtgtatataattactgattccacccaaactcactctttgttcggctgactgactttgcctgcatgctgtcagatgctggtgaggttttttaaagaactgttatgattgatgtaattaaaccaagataagacgtacattttgctttttctccccttttcttttcttcttcccctccccatcacagcagagttgagggagagggagagagacagagagaaagagagagagagagaatgagaattagttgtctctgatttgttggaggtgctttaccagaatgcacagtatctgcattttgctcaaagaacttgataaaacacccacagcaaacttcaggctgtattgttctcgtcaattactggtgcggcctcgggtttctccttgttaattgctgcgagcagggaagctttactcagtgcgcagtgtacccaagcatgtatggagtttaatgaatcatactaactctgcactccaagcaattaggtaaatctagctgttagttagtgaggcataaaataaatttaatctctcttctaaaaaatcaattatagtgctgtaatgtataattcaatttgggtcatgctacataaattttctgtttttagtatgtttttaaactggttg

SEQ ID NO: 702313 - DNA, 2411 bp, Homo sapiens
tgaacactcaactttgaaatatagacctgcattttatattttgcacagccacttatcagctttgtgtccttgcacagggtctgttgtcagtacagtaaaaattgcaatgatgatatatgcttcctggccttttgaacaagctaaacaaattatattttaaagcactttgatataacattgctacataaaaggaagtgactataattacttggtcaatggaaatctgtgggattttgcagttgcccccatagtagcttaggtcaaattcgaagtcagagttccaagagggtattgatgtttaatgtcaaaaataatgtatttaactttcttaaacaagaaaaactttattgtcacagatccatttaacaccatagcttcaaacaatttattccaagttccaactattttttgtcttatattccatgaagattacttgtcttaggttttttgtggaactgatatttaagagattggacaatgggaaagtttgaacagctacattctaccgcaggcttagaaaagtcaatgaaaacagtgttttttaaaacaaagactgttgaacatgcaaattttgtaaatttataatagctttgggatatacgtgtaatgtgttaagactcattctgagccaagttacagaaaactagttcaattagctaaaagtggaaagggtacatgaagcaaacttcaaaaagagatgaggtggaagtggtttcataatgactggatgcaagaatgccaaagtcatcaggcctcttgttttcacatcggatctggtctcattctattttctctttcgttgtctttcatctccacttctctgttgtgacttcattctcttagaccagctgtaccaacaaatctaagatcataaccaaatgctgtttctggcttttatacaatttagcctcatgagcggacagagagtacttttccgccagtttccattatataaaatccaagggaagagctctgattgatctagtttgggtcatgtgtctatctatctctggaaaaggaaggagagcagagggaagtgtttgttgttttgaccatcacctccaatatgaagggaataggaggaatagcactggggcttccaccgcagcagaatgggaaggaagtgttgggcagacaaaccactgttataaactacagattatcgataatggatttattaatttgaaataatcaggccatgtgctgtggctcatacctgcgaccctgatatgttgggagaccraggtaagaggatcacttgagtagttaaagaccagcctaagcaacaaagagagacctcgtctctacaaaattaaaaaaaaaaaaaaaatagccagtcacggtggtgcaagcctatggttccagctattcaggatgctgaggtcggaggatagcttgagccctagaggtcaaggctgcagtaagccatgatcacaccactgcactccagcctgggtgacagagtgagatcctgtctcaaaaaagaaaaaaaaaaataataataatcatatatcaataagccagaagcaatcctgtaaatctggattttctaggtttatggtaacattttcagactagatttattttattgtataattacctaaggattgtgttcccttggaagagtaataactgaatgtgtatcataaaaatggattattcaaacaaaatacatattctattttcagacctgccatttgctttatattagtataattcaagacaggaatctagcaccagacatatgtgaatgtgcttatttcctgttagaaattggtaatttcttattctgctataaaacggaaactcttgtgtccaggaacacttttgaaatagccattagtatttatttttctttatgctaaaaaaattttttaagtgccatacacatttttagcatagtatattcattacatgtttgagaaggcctgacagtgtgtatacctgacaataccatgagcttattaaaaatcagggccaatgtcttattcatctttgttttccagtccctgtcagagtactttacacaatagcaggctttctatccatgtttgtggaaatgaattagcaattgagcattaatatattgtttggtgataaataaatatacaggttctcaactcagagaaatcactgaagacctgatgttcagagaactttgttttctaaaaatgtaagtggtgaatagccatatacaactaaagatatgttcctgtatgcttttctttttttctgtttcctctcattcttgccctcatttttttttttttttttaacatagtccatgttttgctacttcttgacaccagtggctattgtgggaaacccatgccctgccaacaacttctcagttattttgggaagccaataaatgtatctcatgtatcctcaagaataagttcaggcagcca

SEQ ID NO: 702314 - DNA, 2058 bp, Homo sapiens
aaaatgattaaagaaattatctcagttcattactggttgccagctctaattttactgttaggtgaaaggctgtgaatcagaaccttaaatttttaaaatattagattactgttattagagaaagctcttggttttctgatggtttcttccatctttctggaagaggtgattatctttttctaaatgcaaactacagagctttaagaagtgtgggtttagatttgctctgaaggatgaatacataccaggagagggcaatgctaaatcagtggtaattaattaatggtattttttaaggagctgggggcattttggctaagagaccatacactagcttccaagtaaaaaaggaacttgctggttattgtactttggcattctcctattattttaatatattacgtatatgacttctatctttatgtgaaacaagtgaatatatacagatctcattattggccttgaaacttgctaccttggtggtgaaacaaggactgaccaagctgaagaaaacttcagctcctaatggctaagaagcttggatactcacacttaattgtgcaggctgaaccttactccatggttttgtggtctccaggtgtgaaaaaatcaattattcctagcaaagtaggtcagagaaatgggagaaaaggacgggaaatgaatgagagcatgcaagagtcttgcttctatttttttgatcaccaattctctggcttttttcttcctcatatcttacctcccttggttaggaacacaatccacacttggtttcactgtggagaagactcaagaaaagggaaaacatattttggctactgtttgtcaagttattcagtattgaatatacttaacatatacccaaactgcagatcacaaaaaacacaaacaagcaacaataaaaaacaccaacaaatatctgtaaaaacaagcaagtgctagtacaaagaaaagtgatataaatcgagagggaaaatgatcctgctttctctacttggcttgtgttcaccaaactctgtctttgctgactctgaagcttctttcattttaagcttataattcttataggtttagtccaagtatgcaattacccttggctgtgagaggtggctgagcagttagacaaaygctactaaataggatgaaaggtgaacttgcacttaaaaagttaggttggaatctaaagcatacaattcagtcttctgggaggttatagtatagtactaatgaatatattttgggaaataaatttgatgcaagttttaaataaaccagacttgacttctataataaatttagaaactcttttaccaaaggtcctcattgcaggttttggggataaagggtagagtgctataaatctattatttaaagaaaactaaaatgaattctagatgtttctgattaacagtaagcctctattttccctgcataacatatttgacccttggcccatcagaaccgtagctgcactgatgtattagagaccattacacacgtgaatttacttggtttagcaggaagcctatatgactgtttaaatatttgctatattgttgtaccaaaatacaattctgtgtctactgctcattgtagtctatccaaaggcaactgggcagcagtattctgaaatacgtacaccaaaaatacaccacgtacaattcatcaagttaacataacccaatgataatctgtgtgtgtgtgtgtgtgtgcatgtgtgtgtttgtatttcctgctaatagtatgcagtttgcttccctaaacatcaaagatgcttcagaaagaatattctctaacatctttttctatcttttctattcaggaattttactcttccatatctggccatgaccttagtctcgaacactcttttgaaagtgtacagatgtctatgcaaaacaatagaaggatatggtgtagctcacacacataggctctgatatagctttaataatttcccctcatatttcaaatattctgaaatcatgtatcatctttttcaaagactgaaataggttatttgcatatggaagagtgataaatttttttttgataaag

SEQ ID NO: 702315 - DNA, 2049 bp, Homo sapiens
tgagaaggaatagctcttcagggttctttcttcctctgagaaacaactgaaaacctttgacatgagacatgcactccattagaagtaccaatggtaccaatgaaatacttagaggggaggggtaggtagaatggataccctacaaggacagggattgtgatcagttttatttcctgatatgtctcaagcacctaggatagtgacgggcacataccaggtactcaataaatatttgttgatcatatatatatatgtgtgtgtgtgcatatatatatatatatgaacattttgtttccatccaacaaattttacatataggtgtcagtaaactgctaaggggctatcaatatccctctggcatacaccaaaagtagacagcaagctaaattctactataccagataaaaataccttgggttgcaaaggatggaagaccaataagaaatcaattgaacagttaggaaattcttatttttacatttaaaattctagatctagtcaatgcaggactggaacagtagctcaataattccattgaaaactcagactctttttaatctttctgtattttcccttctagcgtggtagctactaccacctgattataagagtcctgtcttagaacccaccatcacatctgcacacaaagtggaaagaatgaaaaatgattgggagtaaccacatctttcccttttattagaaaacctaaccccttcccagaagtccctagcagatccctgctttttgtcattaatctgaatatttatatggcaatccgtattggcttcctgtgactgctgtaataaagtaccacaaactaggaggcttcaaacaaaagtaatttattgtctcacaggtttggaggccagaggtctgaaatcaaacatcagtagagctgcactccctccaaagcctctaggggaggatccatccttacctcttccagcttctggtagccccagacattcttgactcatggaagcatcactccaatctctacagcttcttcttgtgaccatctgtcttctgtgtcttcacatcacctcctatctgtatatctccatgtccaaattcccatcttcttataagaacccagatcattttgaattaaggatctatcctattccagtatgacttcatcttaactgatactatcctcaacagtcctatttccaaataaggtgacattctcaggtgctgggggttaggacttcagcatatgtttttgggtgacacaatttaacacataacatcacccttagcctcaagggaagctgtcaaagtgaaatgttatcttcgtaagcctttatagtggaatgtgttaggagaaggggattgaaaaagatttggggttggccaatgagcagtatttgtcttgcctctttctcacccayaggagacagcatggtggatggaagggaaatgagcttcaccatcacaaaggtgactttcaataagctttaaacaaatgttcatttcagacacccacagtgtacctattattacattactcctgacacgcctctgaagacatcaatgtagcccatgtagttgagatcttttttatgtaagaatggggcaggattcggaaactagcccccttggtcctacttggaaatatctttacctagctgaaggaaaagggtaaaataagaagtgacttcttatctgaaaaatccagggtaagttcaaaggagagtggggggttaacccatagttattgacatattaaaatgacacagttcatttgcagaaatgaacattcaagcctgagacatttaagacactggagattttatcctttgccacaaccaaccttcccaccaaataatgatctcactgtatttcttctgcagataaaatttatcatcagcaatctacttccataagccaataagtggattatttataaatgaaaatattctcaaaatattgtcatactaagctatcatgcatagagccgtggaattttagcacttgtagtaatctatgatttattttgcaacagttagctaatgtcacataaatgctgtgtgacaaacaacctta

SEQ ID NO: 702316 - DNA, 576 bp, Homo sapiens
ggaagtcacacaacgtaggcgaagcacagtgtgaggggctcctgggtgttccagtggcaaccagccttctctgggcttcgagcctgcgccaggatgtgcactcagttgaggtgggttagctgtcaaagtttggttcctagcaaagcagactttgaggcatggatttgtaaatgtatttatttaggatgtgacccaggaaacaatgtgtgggcatgtggacatgagccaagggaaggaaaagcrccaaaaaagagcatgttaatgagggaattatcactgtgggcaacaaaagctcaactcttcctactgatgaggctgtgagaaacctgggtggacctgacttgaaattgtcttactgaggacagaggaaactggggtatttctctcaaccttgggccttgtggttgagggtaacctggatgcactaacctttgagtgcttcagaaacgccaagaggacatgagcacacagaggccagatagcccccttaccagctgcctggcacaggatcaggaagtccacgtagtcaaaaaggcctccacattaggcctgtttaatgggtggcattagtatatt

SEQ ID NO: 702317 - DNA, 576 bp, Homo sapiens
ggaagtcacacaacgtaggcgaagcacagtgtgaggggctcctgggtgttccagtggcaaccagccttctctgggcttcgagcctgcgccaggatgtgcactcagttgaggtgggttagctgtcaaagtttggttcctagcaaagcagactttgaggcatggatttgtaaatgtatttatttaggatgtgacccaggaaacaatgtgtgggcatgtggacatgagccaagggaaggaaaagcgccaaaaaagagcatgttaatgagggaattatcactgtgggcaacaaaagctcaactcttcctactgatgaggctgtgagaaacctgggtggacctgacttgaaattgtcttactgaggacagaggaaactggggtatttctctcaaccttgggccttgtggttgagggtaacctggatgcactaacctttgagtgcttcagaaacgccaagaggacrtgagcacacagaggccagatagcccccttaccagctgcctggcacaggatcaggaagtccacgtagtcaaaaaggcctccacattaggcctgtttaatgggtggcattagtatatt

SEQ ID NO: 702318 - DNA, 576 bp, Homo sapiens
ggaagtcacacaacgtaggcgaagcacagtgtgaggggctcctgggtgttccagtggcaaccagccttctctgggcttcgagcctgcgccaggatgtgcactcagttgaggtgggttagctgtcaaagtttggttcctagcaaagcagactttgaggcatggatttgtaaatgtatttatttaggatgtgacccaggaaacaatgtgtgggcatgtggacatgagccaagggaaggaaaagcgccaaaaaagagcatgttaatgagggaattatcactgtgggcaacaaaagctcaactcttcctactgatgaggctgtgagaaacctgggtggacctgacttgaaattgtcttactgaggacagaggaaactggggtatttctctcaaccttgggccttgtggttgagggtaacctggatgcactaacctttgagtgcttcagaaacgccaagaggacatgagcacrcagaggccagatagcccccttaccagctgcctggcacaggatcaggaagtccacgtagtcaaaaaggcctccacattaggcctgtttaatgggtggcattagtatatt

SEQ ID NO: 702319 - DNA, 576 bp, Homo sapiens
ggaagtcacacaacgtaggcgaagcacagtgtgaggggctcctgggtgttccagtggcaaccagccttctctgggcttcgagcctgcgccaggatgtgcactcagttgaggtgggttagctgtcaaagtttggttcctagcaaagcagactttgaggcatggatttgtaaatgtatttatttaggatgtgacccaggaaacaatgtgtgggcatgtggacatgagccaagggaaggaaaagcgccaaaaaagagcatgttaatgagggaattatcactgtgggcaacaaaagctcaactcttcctactgatgaggctgtgagaaacctgggtggacctgacttgaaattgtcttactgaggacagaggaaactggggtatttctctcaaccttgggccttgtggttgagggtaacctggatgcactaacctttgagtgcttcagaaacgccaagaggacatgagcacacagaggccagatagcccccttaccagctgcctggcacaggatcaggaagtccacrtagtcaaaaaggcctccacattaggcctgtttaatgggtggcattagtatatt

SEQ ID NO: 702320 - DNA, 1144 bp, Homo sapiens
tgcttttagttaatttatttctttttctgttaccctgacctagggttttcttttcttttttttttttttttttgactttctgggaaacatagaactgcactgagtgggttcttcttggcaccgcagtatgtttaggaccattaattgtcattattccccttgttctgcatttaaaccacaacaaattaatctccttaggaaaaagtgagtgttctgagtctggatctccctttcaagtcgttgagcattgagaggtttgtggcattggagggaactcccaacagcctgccttctttcagtacacctgctggaaacttcctctcctgtctagtaaaagtcttagaagagagtttggaaaaaccctttcttccttgtgaatcaacatagcatgatggttaagagcttgggctcaggagtcagactgcctgaatttgaattctgcctccctcatttcttacctgtatgctgggaaataacctttctgtgcttcaatgtcttggaccaccaaataagttcattaatttctgctcctacgatttctgcaagcattaagcgagataacgtacacaaacaaactagtacaaatcatgtagccattccataaaaattatctgttggccaggcgcggtggctcacgcctgtaatcctaacactctgggaggccgaggcaggtggatcacctgaggtcaggagttcaagactagcctggccaacatgatgaaaccctgtctctactaaaaatacaaaaaaattagcctggcatggtggcgtgcacctgtaatcccaactacccaggaggctgagacaggagaatcgcttgaacccgggaggcggaggttgcagtgagcagctatcacaccactgaactccagcctgggcaacaagagcaaaactccatctcaaaaaaaaaaaattatctgttacagttattattactattggggtgtatattgccacattcacataagggctgataagtcaaaatgtacrtagaacttcaattgcaatctgaggattttatggaattcttcttggcatctatatagtatcctgggggggctaatcccaacaacattttttcttttccaacacactcaataattaattgatgctgctatggaagtagaacataataattttctcc

SEQ ID NO: 702321 - DNA, 631 bp, Homo sapiens
cttctgtttgaaatacttgctctgtgtgcataagacattgcctgtagggtatgccattttgtccaagttagtttaccaatttaagggtcctgaactttaactgtttaaagtaagcccaccttcagctgagggctgaaagcaatgaaaattttatttgtgtgtcttgtataggaagaaaaggaacagaaaaaaaatctttgtttttttgtctcttggtagcctgaaacttttatttggtgatattttaaaaatcagagcaaatgcctcacccaacttgggggagttgatattcactttagcatggctctaaaatggatctatttcattttttcacagaatgagcccctcatctgcatcaggtaccttgtgatttttatgcctgaacacaaacacaaccttgtagaaaattaggatttkggaggaagagtttgtgggcatgtctgcattgatatgatcactatgcttctttagaaagtagaagcatggagatagttctctcgagtaggtatggaaagttggcttacctgcctccttttggaagcatcagctttacttatccatgaaccatccacagaaaagctaagttgaagttgaataacttatctatcctgacaattctatgaaaaatgta

SEQ ID NO: 702322 - DNA, 1037 bp, Homo sapiens
tttcttcatcccactgtttctttttatggatttagagaggttaaagatgagggatgataggtaactggaaggagagccctttccttctgttaggaacagggtgtctcattaccaaactttcaggagaacctcagctggaattttaaaagatgatagctagacagcattttatagagaacatccagcatttgaatttcaaatgcctagagtttttctattggctgacccatgtaccattaaaacaaatctccagaggaatcatttgtcatggcagaaataggtctcccattaagagccaaacacccacaaatgtcaactctattctaactcacatgagtaactgccttgagacaatttcttacatttcttatttaataggtataaatattatggtagagattgctataaattctttgctatttctcctgttgagaggtggagtctaattctccttcccttgaatctggactgggtttagtgacttacttggccaattgattgagatagaaatgatgttctgggacttctgaggctaggtcataagaaaccttggaacttttacctaatctcctggaaaactcattttgggagccttgagccattttctgagtctgtcatgtcacagaagacacttcaacagttctaccaatcccagctttgcatctgtccttgcaaatgcgcaggacacgtgagtggagagatcctgtgccactccagatcagctcatctcctagctgagtacctctgagaggcctgcccaaatttctgacccaccagatctcgagacattatgaaacagttgctttgagtcactgagtttgtaagaagccatatataattggctgtaaacattaaatatttttgtgtggaatagcactcaaatgtactcagtagtagaatcacttatggtcatcaaagtattattttattgaaaaagtacatttttgtcttagaccatttaatagtagctcattcaatggcatatacattcctgagattttactatatgccaggttytatgctaagcacttcacctg

SEQ ID NO: 702323 - DNA, 585 bp, Homo sapiens
tgatattacctccaattctacatgttaacaggtaaaagagagaagtttagacatttgcagaaacttttcactgcttttcagggattgtctttcaaaccactgtcacaatatgggttaaagaaagccagatttgagacccttagtgaaacaytgttctatgtgtttcagatggtaattggcttcattttcttgggtatctatacctcatttctcagtttatggatgaaataatgtagcagggtattaaaatatgtttttctaaattttaagaacattatttctattctagtagtccatgaattaatctttaatttatgtcattaagtaggcatagacagaagttaaatgaaaagtcagatgtgaaaaattttatgaagacatgtcttagaggataatattgttgatggacattattgctataaataatcttgtagttttctcttagtcaacatgtttaagagtttccctaaggaaatatctagaagtagaattttagagctatagagaatgaaccttttaaactgtaattgataacggatgccgattttctccctaaatgtttagtatccctatcaatttgcaaga

SEQ ID NO: 702324 - DNA, 602 bp, Homo sapiens
tcttctcaaygaaaataataactatgtgaggtaatgctcattttaattagctatgtttaatgattccacaatgtgtatacactccatggtgcatatgataaatacgtacaatttcatctgtcaatataaaataaatacatttgaaataaataaagacaataccaactttactgtttgtgtgaattaaataaaataatatcttaaaaattcagggtcccggcagcagagtagtgagatatctataggtatctcactagtatatatatagatagatagatagatatatttgtgtgtgtgtgtgtgtgattatgattcatctgatatggataaatggaactttcaaaaccagaaactacttcagcttgcctgtaaaacctttccaaagattttttctctgctgttattgttccctgactcttaaaattattatatgttactgtttgaagaacaatttgccatctgccatgtttagatatggaaactaattgataatgaatgggctgaagttcataggactattgagaataccttgaagtcagagtctttgtgataacctctttttcatatctgtgactgatcactcttttctatgttcacatatt

SEQ ID NO: 702325 - DNA, 602 bp, Homo sapiens
tcttctcaacgaaaataataactatgtgaggtaatgctcattttaattagctatgtttaatgattccacaatgtgtatacactccatggtgcatatgataaatacgtacaatttcatctgtcaatataaaataaatacatttgaaataaataaagacaataccaactttactgtttgtgtgaattaaataaaataatatcttaaaaattcagggtcccggcagcagagtagtgagatatctataggtatctcactagtatatatatagatagrtagatagatatatttgtgtgtgtgtgtgtgtgattatgattcatctgatatggataaatggaactttcaaaaccagaaactacttcagcttgcctgtaaaacctttccaaagattttttctctgctgttattgttccctgactcttaaaattattatatgttactgtttgaagaacaatttgccatctgccatgtttagatatggaaactaattgataatgaatgggctgaagttcataggactattgagaataccttgaagtcagagtctttgtgataacctctttttcatatctgtgactgatcactcttttctatgttcacatatt

SEQ ID NO: 702326 - DNA, 596 bp, Homo sapiens
cagggagatcatttggctgtgcttgacctaatcacatgagtcttttaaaagcaattttttgcaaacaatttttcccaagatggtagtaagaggaagtaagatgttaaaaaaatgagaagggttggatactccttgttggcttgaaagttgagggagactactagtgttaaataatgcaggcagtatagttatttagagccatccccagctgatagctagccaggaagctttagtcctacactcacattgaatgaatcctgctaacaagaagaatgagcttggaagcagaattttccccaaagcctctaggcaagaactgtatccaacmagtccttgatttctgctatgcgtatatcaagcagagaaatcagccacagagtcaaatttttgacctatgtaagtatgagtcaataaatggatgttggtttaagttgctaagtttgtagcaataaaaataaagcttctatgttagtagtattaaaaagtttctaacaattaaagaggcctattttgtgctagaagtatggtacctctataacaaaatataaaatgtaggagtggttttagaattggtcagtggaagaatgctgaggaaa

SEQ ID NO: 702327 - DNA, 1382 bp, Homo sapiens
atatgtaaataaatatgtcaatattctctatgcaaattatggttcccacacatttttatttctaagacctgggtactatgaacatagccatggattaaggaagatcaagccattagcagtaagaagtgatttgcttttcccctacagaatcccagaatgtagaagtttatagacaatttagagtagtctagtccatcctctctttatgtaaacaagaaaattgaaaataaaatgaattttcctgtccaaaggccctagtactaggatgtaagttctttgtctccatattcattcgtcttcctcccatgcctcaatatctcactcagtctgatatacacagacaatacagataattgcattcaggtgaagtggatttagctttgcctccatgaaatgcttggtttgaagaggggttcaggtagcagccctgcatcagctctagaagcctgccatgggaaaaagttagggagaaaaagcctagaaactcatagggtctttcttatttctacccataaaatattctcttaaacctgaaatcagaatcactattttaattaagtagtagcagtagattgtgtgcactaaagatctataatattgtgtgtatcttggttgattagtagtagataaaagcagctcagatttcattttatttttttcaattcacaaatagtatagagaattttgcaacctgtcttctttttccatcagcgaagtgcaactcttgcctattctcttttccaataccctcttatatggcataaagatattcagcttttgaatagtatyagacacttttaaatagcaagattcttaatttttttttttttttttgcttcacaaattcacccctccctttatgttttgaaatgccttaaaagtgcctgattcccagagtacaatatggtatgtcttgctcccatcctcaggcaggatatcgttggtggaacctatgtctagactgtttctacctacagtgttttcacaactcaggtctcttctctcactccttcatctacatcttccatcaccattagggttctgtcctcagaataattctcttccctctttatgatcttgcttgggagtttttacatttctgtggtttcagcaaagacctgtgttgattatttcaggaactggcacagtctaggcactctattattgtttgctgattttagaatcctaaatctggatggcttcaatctttaccttcatcttatctttcctttcaaatgtccatttatactccggacctgtcttctttgaggatttttcagactttcaaatccatatccaaaacaaaacttgtcatctttcttctaaggcttgttcatcctcctgaatttctttccacactaaattgctttatccttcattgg

SEQ ID NO: 702328 - DNA, 1569 bp, Homo sapiens
tgtggggtggtgggaggggggagggatagcatcgggagatatacctaatgctagatgacgagttagtgggtgcagcgcaccagcatggcacatgtatacatatgtaactaacctgcacaatgtgcacatgtaccctaaaacttaaagtataataataaaaaaaagaatataaatttttatgattttaagatagtgctatataaattatctgtaaaatatactacaaacatagtggctttaaaaaaaaaaagacacatctttattctctcacctatttctattgaacaaacatctcagcatgatttatctcattcttccactcagggtctaagaagggtgccttctggaatcagccaggccacatttttatctggaggcttacctggagaagaatccacttgcaagcttggtcaggttgttggcaaaatttatttccttacctcggtagtaggactgagagctctagatttttcctgactgtcacctggaagctacactcagctcctggaggctatgcacagttcctccacgtgtgttcctctccacgagcagtgagcaatgtggtggcttgcttcttcagagccagctggagagcacaatggtgaatctgctagaaagatagtatatcatataaagtcctataatgatgggagtgacatctcagcactttaccatattttagtggttagaagcaaattctatctttcccacactaaagcgaagggattataaaaatgcataagcaccaatgggttggaaaaatgagagcatctcagattttgtttgccacaggatcctatcattaacgtggctcttctaaatacatagtttcaaaaataaacttgagtctattaagaaaaggaaaagtaagtcaaatcagagatttattcattatataaataatatatccatcttcaaaaatgtgtttcaagttttgtatatgtgtgtagaaatgtttcagagaaagtttagaattctatttctttatgaaattttaattgttaacttcaacatttaatctttgtgtgtgtcttcgctaaagataaaaaagaatcatttagtttaaaacctgattatttactcagaattgcatttttcctcaatactgtatactactggtatttaaaactccarttaaagtttccagagaagaaatcttaataatgagagaatacttgattcaacatctataataactttcaattcaccatttaaaatatttttagtcttagggcttttgtttttgtttgacaggtatttttattctactttctcttgactgttattgctgattcttctccaccctaaggacatttacacttcatcacaagaagctagatggaacattctgaactgcttattcctttagcatatttgacacttactttgacttgggtacaaagttagaaatttgcatttggtttcctttatgatgttagaaagtttaaaatgcataaaataacatgaaactgttgcttatttttgtgtaactcataaaatatatttgatagattaatttttgaaacgtacatatgtaatctattaagatataataacataaatataaat

SEQ ID NO: 702329 - DNA, 929 bp, Homo sapiens
aacataaatataaatcaggtacttaaatacgctaataatttaaagcaatgaggtattgatcattttatactgaatttctttgtgaacatgctgtgcctttggacactcagattaaagcagagtggatatatgaaaattagtaacagatagctttccccctttccatatttgattctaataattcataattaacataatgtttacttaaaacagagtaaaagaatgtttctttcttcgtagcataggtgaccactataggtaaacaaattgtctaaatgaaattggcggaaagtattaagagtacatccaagagttgtttccttggatgactagattcgatggaattggccaatggattcttccttaaccatacgcttattgcacrcactgaggttctgatattaattcaagttttgatcagactacccaaatttttatgaaccacaactttaattcaaaacttgaatactagagcacttgttattcagctaataaatattttataatagtttattttgaatatttttttctggaattttgggggatacattaggaaaaaagttgaaagaaatgttgaaagacaaaagttgaaagaaaatgctgatctatgtggtattaaaattaaaattcactttctgaaccctgcttcaaaatgtgtaaccaactgagagctccttttgaaatcattccggtcttcaggcagatcccaaactcagctatttcaagaaagttacttgcctagagtaacattttttttttccttttagtcaacactggagagttctctcttaccacttctgaaattctttaattttttattataaatgagacatagatgatgtgagcctttgatttatgaaacatttccagtcactgtcttatcatatgccatgtaataattatagatatattattagcattgatataaa

SEQ ID NO: 702330 - DNA, 929 bp, Homo sapiens
aacataaatataaatcaggtacttaaatacgctaataatttaaagcaatgaggtattgatcattttatactgaatttctttgtgaacatgctgtgcctttggacactcagattaaagcagagtggatatatgaaaattagtaacagatagctttccccctttccatatttgattctaataattcataattaacataatgtttacttaaaacagagtaaaagaatgtttctttcttcgtagcataggtgaccactataggtaaacaaattgtctaaatgaaattggcggaaagtattaagagtacatccaagagttgtttccttggatgactagattcgatggaattggccaatggattcttccttaaccatacgcttattgcacgcactgaggttctgatattaattcaagttttgatcagactacccaaatttttatgaaccacaactttaattcaaaacttgaatactagagcacttgttattsagctaataaatattttataatagtttattttgaatatttttttctggaattttgggggatacattaggaaaaaagttgaaagaaatgttgaaagacaaaagttgaaagaaaatgctgatctatgtggtattaaaattaaaattcactttctgaaccctgcttcaaaatgtgtaaccaactgagagctccttttgaaatcattccggtcttcaggcagatcccaaactcagctatttcaagaaagttacttgcctagagtaacattttttttttccttttagtcaacactggagagttctctcttaccacttctgaaattctttaattttttattataaatgagacatagatgatgtgagcctttgatttatgaaacatttccagtcactgtcttatcatatgccatgtaataattatagatatattattagcattgatataaa

SEQ ID NO: 702331 - DNA, 929 bp, Homo sapiens
aacataaatataaatcaggtacttaaatacgctaataatttaaagcaatgaggtattgatcattttatactgaatttctttgtgaacatgctgtgcctttggacactcagattaaagcagagtggatatatgaaaattagtaacagatagctttccccctttccatatttgattctaataattcataattaacataatgtttacttaaaacagagtaaaagaatgtttctttcttcgtagcataggtgaccactataggtaaacaaattgtctaaatgaaattggcggaaagtattaagagtacatccaagagttgtttccttggatgactagattcgatggaattggccaatggattcttccttaaccatacgcttattgcacgcactgaggttctgatattaattcaagttttgatcagactacccaaatttttatgaaccacaactttaattcaaaacttgaatactagagcacttgttattcagctaataaatattttataatagtttattttgaatatttttttctggaattttgggggatacattaggaaaaaagttgaaagaaatgttgaaagacaaaagttgaaagaaaatgctgatctatgtggtattaaaattaaaattcactttctgaamcctgcttcaaaatgtgtaaccaactgagagctccttttgaaatcattccggtcttcaggcagatcccaaactcagctatttcaagaaagttacttgcctagagtaacattttttttttccttttagtcaacactggagagttctctcttaccacttctgaaattctttaattttttattataaatgagacatagatgatgtgagcctttgatttatgaaacatttccagtcactgtcttatcatatgccatgtaataattatagatatattattagcattgatataaa

SEQ ID NO: 702332 - DNA, 626 bp, Homo sapiens
  misc_feature 464, 465, 473, 484, 493: n = A,T,C or G
tccaggaaacgagtgaaggattttatatccacacaaattgagtcaagtacaaaggctgcagacaaacttttgaacgtgtaagaaacccttacgaatccytcctgaggaatccactagaaattaactaagacaattgaaatgagtggagtgacggcaattaagactagtgcgaggccaggtgcagtggcacatatctgtaatcccagcactttgggaggccgaggcaggcagatcacctgcctggtcaggagttaagagaccagcctggccaacatggtgaaaccccatctctactaagaatacaaaaattagctaggcatgatggcagacacctgtaatctcagctactcaggaggctgaggcaggagaatcgcttgaacctgcaaggcagaggttgcagtgagctgagatcttgccactgcactccagcctgggatacagggcaagactctatcttaaaaaannaaaaaaanaaaaaaaaaancaggacttntgctgagtattgcatatatatacatgtatttaatacataaagatctgcttaatatacaaggtgttttgggcctaaatttaaaaatacagccaaataatcaacatggagggagaatgtgaaaggtatttgaaat

SEQ ID NO: 702333 - DNA, 1821 bp, Homo sapiens
cttctcccttcttcccttccctttccttcctccctcccttccttcctccatccctcccttccttactctcttcctctcttttctttctttctttctttytttttctttctttctttctttctttcgttctttctttttctttccttctttctttccttctttctctctttctttattttcttctttctctcccttctttccttccttcccaacttaatacacagtaagtactgaaatattttttaataaatgcataaacacatgagtgaaaaagaaaataacagaataattttgggtctatggtcaaaattacagtgtttgagttaaacaatattgaagctaatagtaagtagctatgcagagaatgtgtagacatttgcatgagcaatggccctttctacacttatcaaatacagagtagtaatgactcctggttatacgctgtgtaggggtgggtgtcatttccataagattactgcaaaatatgaataaaaacaaaaagtgatgtagaagtaaaatcaaagaagaaaagagaaatcagactaagagagttaacagaattgatgggtacatgagaaaggtagagactgctattttctaccaaatctttcaagactctgaggagaatacccataatcaatatgttttatgtcatcaaagtgaaccaattttaattaaaataataaagatccaatgacccattgattggccaataacctaagtcataaaaatgcaaggcccttttctgtaattgtacttaagctagaagcctctcaccttctatctcccttaaggcaaatcccaaaatgcaactcaattacttccaagcattgcgatttgattctaaatacaaggtctttgtaaaattatacttgactgacaaattgtagcaaatacacacactaaacatgacatgagattcccccgctcccagcatgttacattgccttgttaatacattcaaaatacttgcttttaactacagcttctaaaagttaactgacctatcattcattcattcatctagcattttgttgttcttgtcattgttaaatggaagtatgttctcaattgcctgaaaactattactaagttatatttggttgaatgggtaacacagtgagatttagtaatagtagtattgaatttaaagtgagtaaaatcagagatggaattgaggccagctcactgctgttgaagggacagaggaaagagcactagttgttaagatctcagtgcagttcccatgctcttttgacttaaaaattaagaagcttatttttttctgcagggcatccagaattgatctgagttaccgtaactggcttctgctaacatgaccacatatcacttacataaaaatcagaatgcttgtttatgatacaggtcacaaataccagctagcttagaaacaaataacaggtagctagtgaactgggccttctctaggaaaatttatgagttaagccaggttataattagatggtgtctttgtgaatgtggtatcacaaccagatgagctggtgtaattatttaatgtcatcagttctatgcaatccttgataagattagacactggccaaatgaattcatattacctggtcagaatatgtgctctcctgaatagtataggagacacacttacagcttcttttgtttgctattttcctccaaaagtgatatggacagagggcagggaaatactgggtagaagcgggcgatccctggcgagggccctaccatcaagcctggacccacggcccaaagtgagaactttacatccctgttttctggcttgaatgttgtctttttcaaaaccac

SEQ ID NO: 702334 - DNA, 1821 bp, Homo sapiens
cttctcccttcttcccttccctttccttcctccctcccttccttcctccatccctcccttccttactctcttcctctcttttctttctttctttctttctytttctttctttctttctttctttcgttctttctttttctttccttctttctttccttctttctctctttctttattttcttctttctctcccttctttccttccttcccaacttaatacacagtaagtactgaaatattttttaataaatgcataaacacatgagtgaaaaagaaaataacagaataattttgggtctatggtcaaaattacagtgtttgagttaaacaatattgaagctaatagtaagtagctatgcagagaatgtgtagacatttgcatgagcaatggccctttctacacttatcaaatacagagtagtaatgactcctggttatacgctgtgtaggggtgggtgtcatttccataagattactgcaaaatatgaataaaaacaaaaagtgatgtagaagtaaaatcaaagaagaaaagagaaatcagactaagagagttaacagaattgatgggtacatgagaaaggtagagactgctattttctaccaaatctttcaagactctgaggagaatacccataatcaatatgttttatgtcatcaaagtgaaccaattttaattaaaataataaagatccaatgacccattgattggccaataacctaagtcataaaaatgcaaggcccttttctgtaattgtacttaagctagaagcctctcaccttctatctcccttaaggcaaatcccaaaatgcaactcaattacttccaagcattgcgatttgattctaaatacaaggtctttgtaaaattatacttgactgacaaattgtagcaaatacacacactaaacatgacatgagattcccccgctcccagcatgttacattgccttgttaatacattcaaaatacttgcttttaactacagcttctaaaagttaactgacctatcattcattcattcatctagcattttgttgttcttgtcattgttaaatggaagtatgttctcaattgcctgaaaactattactaagttatatttggttgaatgggtaacacagtgagatttagtaatagtagtattgaatttaaagtgagtaaaatcagagatggaattgaggccagctcactgctgttgaagggacagaggaaagagcactagttgttaagatctcagtgcagttcccatgctcttttgacttaaaaattaagaagcttatttttttctgcagggcatccagaattgatctgagttaccgtaactggcttctgctaacatgaccacatatcacttacataaaaatcagaatgcttgtttatgatacaggtcacaaataccagctagcttagaaacaaataacaggtagctagtgaactgggccttctctaggaaaatttatgagttaagccaggttataattagatggtgtctttgtgaatgtggtatcacaaccagatgagctggtgtaattatttaatgtcatcagttctatgcaatccttgataagattagacactggccaaatgaattcatattacctggtcagaatatgtgctctcctgaatagtataggagacacacttacagcttcttttgtttgctattttcctccaaaagtgatatggacagagggcagggaaatactgggtagaagcgggcgatccctggcgagggccctaccatcaagcctggacccacggcccaaagtgagaactttacatccctgttttctggcttgaatgttgtctttttcaaaaccac

SEQ ID NO: 702335 - DNA, 1821 bp, Homo sapiens
cttctcccttcttcccttccctttccttcctccctcccttccttcctccatccctcccttccttactctcttcctctcttttctttctttctttctttctttttctttctttctttctttctttcgttctttctttttctttcyttctttctttccttctttctctctttctttattttcttctttctctcccttctttccttccttcccaacttaatacacagtaagtactgaaatattttttaataaatgcataaacacatgagtgaaaaagaaaataacagaataattttgggtctatggtcaaaattacagtgtttgagttaaacaatattgaagctaatagtaagtagctatgcagagaatgtgtagacatttgcatgagcaatggccctttctacacttatcaaatacagagtagtaatgactcctggttatacgctgtgtaggggtgggtgtcatttccataagattactgcaaaatatgaataaaaacaaaaagtgatgtagaagtaaaatcaaagaagaaaagagaaatcagactaagagagttaacagaattgatgggtacatgagaaaggtagagactgctattttctaccaaatctttcaagactctgaggagaatacccataatcaatatgttttatgtcatcaaagtgaaccaattttaattaaaataataaagatccaatgacccattgattggccaataacctaagtcataaaaatgcaaggcccttttctgtaattgtacttaagctagaagcctctcaccttctatctcccttaaggcaaatcccaaaatgcaactcaattacttccaagcattgcgatttgattctaaatacaaggtctttgtaaaattatacttgactgacaaattgtagcaaatacacacactaaacatgacatgagattcccccgctcccagcatgttacattgccttgttaatacattcaaaatacttgcttttaactacagcttctaaaagttaactgacctatcattcattcattcatctagcattttgttgttcttgtcattgttaaatggaagtatgttctcaattgcctgaaaactattactaagttatatttggttgaatgggtaacacagtgagatttagtaatagtagtattgaatttaaagtgagtaaaatcagagatggaattgaggccagctcactgctgttgaagggacagaggaaagagcactagttgttaagatctcagtgcagttcccatgctcttttgacttaaaaattaagaagcttatttttttctgcagggcatccagaattgatctgagttaccgtaactggcttctgctaacatgaccacatatcacttacataaaaatcagaatgcttgtttatgatacaggtcacaaataccagctagcttagaaacaaataacaggtagctagtgaactgggccttctctaggaaaatttatgagttaagccaggttataattagatggtgtctttgtgaatgtggtatcacaaccagatgagctggtgtaattatttaatgtcatcagttctatgcaatccttgataagattagacactggccaaatgaattcatattacctggtcagaatatgtgctctcctgaatagtataggagacacacttacagcttcttttgtttgctattttcctccaaaagtgatatggacagagggcagggaaatactgggtagaagcgggcgatccctggcgagggccctaccatcaagcctggacccacggcccaaagtgagaactttacatccctgttttctggcttgaatgttgtctttttcaaaaccac

SEQ ID NO: 702336 - DNA, 1821 bp, Homo sapiens
cttctcccttcttcccttccctttccttcctccctcccttccttcctccatccctcccttccttactctcttcctctcttttctttctttctttctttctttttctttctttctttctttctttcgttctttctttttctttccttctttctttccttctttctctctttctttattttcttctttctctcccttctttccttccttcccaacttaatacacagtaagtactgaaatattttttaataaatgcataaacacatgagtgaaaaagaaaataacagaataattttgggtctatggtcaaaattacagtgtttgagttaaacaatattgaagctaatagtaagtagctatgcagagaatgtgtagacatttgcatgagcaatggccctttctacacttatcaaatacagagtagtaatgactcctggttatacgctgtgtaggggtgggtgtcatttccataagattactgcaaaatatgaataaaaacaaaaagtgatgtagaagtaaaatcaaagaagaaaagagaaatcagactaagagagttaacagaattgatgggtacatgagaaaggtagagactgctattttctaccaaatctttcaagactctgaggagaatacccataatcaatatgttttatgtcatcaaagtgaaccaattttaattaaaataataaagatccaatgacccattgattggccaataacctaagtcataaaaatgcaaggcccttttctgtaattgtacttaagctagaagcctctcaccttctatctcccttaaggcaaatcccaaaatgcaactcaattacttccaagcattgcgatttgattctaaatacaaggtctttgtaaaattatacttgactgacaaattgtagcaaatacacacactaaacatgacatgagattcccccgctcccagcatgttacattgccttgttaatacattcaaaatacttgcttttaactacagcttctaaaagttaactgacctatcattcattcattcatctagcattttgttgttcttgtcattgttaaatggaagtatgttctcaattgcctgaaaactattactaagttatatttggttgaatgggtaacacagtgagatttagtaatagtagtattgaatttaaagtgagtaaaatcagagatggaattgaggccagctcactgctgttgaagggacagaggaaagagcactagttgttaagatctcagtgcagttcccatgctcttttgacttaaaaattaagaagcttatttttttctgcagggcatccagaattgatctgagttaccgtaactggcttctgctaacatgaccacatrtcacttacataaaaatcagaatgcttgtttatgatacaggtcacaaataccagctagcttagaaacaaataacaggtagctagtgaactgggccttctctaggaaaatttatgagttaagccaggttataattagatggtgtctttgtgaatgtggtatcacaaccagatgagctggtgtaattatttaatgtcatcagttctatgcaatccttgataagattagacactggccaaatgaattcatattacctggtcagaatatgtgctctcctgaatagtataggagacacacttacagcttcttttgtttgctattttcctccaaaagtgatatggacagagggcagggaaatactgggtagaagcgggcgatccctggcgagggccctaccatcaagcctggacccacggcccaaagtgagaactttacatccctgttttctggcttgaatgttgtctttttcaaaaccac

SEQ ID NO: 702337 - DNA, 616 bp, Homo sapiens
tgcgctccagcctgggagacagagcaagactccatctcaaaataataataataataaaataaataaataaattgtattgtgtatattgaaggtatacaaaatgatgacacatgcacatatataataagatggtaataatacttcactacagtgaagtaaatgaacatctatagtgccttctctttgtaaataaatactatatatttcaccatttttcctctatcctatatatgagcttttgagaagactggcattaggrctcattgggtttttagaaatgatgactaaccaacaccatataaatatttagcacatactattttcttttgttttttataatttcagcttttattttggattcagagggtacatatgcaggtttgttacctgggtatattgcataatgcaattttacttagagtaaaattgatgtatgattgatcccttcacccaggtagtgagtatggtgcccaataattagtttttcattccttgttcccctctcttcctccacccccttcactctagtggtccccagtgtctactgttgccatctttatatatggcatatgagctatagggtccccattctttagctgtatgaaacctattattt

SEQ ID NO: 702338 - DNA, 642 bp, Homo sapiens
tccaaaaatatatatatttggtcataaatcaggtatggttcttcaacaagaatctgtctccccctactaaacagcaggactcctgtgctccttagagttgaagatacacacatacacacagacaaacacattcacatacagccaaacacacacatgcctggaaaatattgctggattcaagatatgtgtgtgaaggatgattgaacattgatctttgagaaacttttayggttgttatgcaccccacatacataatatatgatttgtagttgcgtgtctgatataaaagatctaatttttataaaattgtgttacaagtatttgattgagactgacaacatgaagtaggaaatccttaaatggtgacctacatccctaaggcaggtgaaaagtatcatgagaatcaactgttattttgcaaggtgtagtaactcaattttaaaatggcccccacagatcccttcctcttattatttacaactatgcaaaactcccttctcttgagtataggcttgaactattaacttgtttcttatgaacagaatgaagcaaaagtgagaggtatttccgagattaccttccaaaagactgtgactttaatctccttcacaggctctttctcactttctcatttgattcctg

SEQ ID NO: 702339 - DNA, 642 bp, Homo sapiens
tccaaaaatatatatatttggtcataaatcaggtatggttcttcaacaagaatctgtctccccctactaaacagcaggactcctgtgctccttagagttgaagatacacacatacacacagacaaacacattcacatacagccaaacacacacatgcctggaaaatattgctggattcaagatatgtgtgtgaaggatgattgaacattgatctttgagaaacttttacggttgttatgcaccccacatacataatatatgatttgtagttgcgtgtctgatataaaagatctaatttttataaaattgtgttacaagtatttgattgagactgacaacatgaagtaggaaatccttaaatggtgacctacatccctaaggcaggtgaaaagtatcatgagaatcaactgttattttgcaaggtgtagtaactcaattttaaaatggcccccacagatcccttcctcttattatttacaactatgcaaaactcccttctcttgagtataggcttgaactattaacttgtttcttatgaacagaatgaagcaaaagtgagaggtatttccgagattaccttcyaaaagactgtgactttaatctccttcacaggctctttctcactttctcatttgattcctg

SEQ ID NO: 702340 - DNA, 1245 bp, Homo sapiens
aagctacctaatgccttctttaagtgactagtttcacattccaaagaagagtcaactaattttaagtatatttgtagaattttcgtggatagttctaagtagtttggtcacatatttagttaaattggaagcaagtaaataagaaaatagatccgccatgaacatatccgatattggagtgtgaaaggcaaatacccagatagttatgataaaaatgaacaaagctattaatctgacaattaatagggccagatttagcaagatttcagattatgttttattttaatgtccatttatcattgtctataagatccaaagaatgctcatatacattgaataaattgtccatctgtcctattttttaaggatgatttgactaaaaacattttttctcacgtctattttctcatagtagcacttttgacacatccatttcccatttttggttttggaaaatgaggtcactctacctatggaaaagacaaaggaaattttaagtctctccccttgggttgtttgtagtctcattgagaagaagacaaagatgtgtatctttatcttcccttaatacctgtaaattaggaaaagtaagaatggaaaaacaaaggaacaaacggagacaatgagatayagaaaagctcaaagaaagataagtcagaactaaacacaagttttcttatgaataaagtatctcttctttatttacttttatcttgtttcctagatcagttgtcttacagaattagaccaaccaattacaaaaatgacaagatacaaacatatagcaagcatacaaattctcaggaaagctacacttgaaactagttatgtggcaatgaaatagacagattgaatatattttgaagctgccacaattatctaaatatttagtaatatttaatctgtaagatattttggtaggtttccttgaggaagcacaatttcttctttttagagggaatgtcacctgtcagtttttataaaatatattgcatttgggaaatctaaagtcagaactatccataatttttaaggaaaatgtaaaatcatcaaatcagtagcaattttatattttgtttctgaaattgttttcccaccctcttcaactttatgataatttatcgggttttcagagaaaaaatacacaggagatacaaagaaaaaatatttttccaggtttatctttccaacatgcttttgttcatttaggatttgtttagctgttgattttgaaagtttattttt

SEQ ID NO: 702341 - DNA, 1537 bp, Homo sapiens
ccaaactagtgggattgcaggcatgagccaccgccccccagcctagtttttatttttattttctcctaattattgtctgtgcatgactctaggctaggtggcatgtaaaagttaataaatttgctcctgcagagtgggatttataatttgcaaaagaccaacacaattagtgtccagtgtatgaaatggcacaaggtcaaaccaacaattaaaggagcatcaaaataagcctgtattaatcccttctcacactgctctgaagaaatacctgagactgggtaatttacaaaggaaagaagtttaattgactcacagttccacattgctggggaagcctcaggaaacttacaatcatggcagaaggcaaaggagaagcaggaggcaccttcttcacaaggcgggaggacagagtgagtgcaagcaggggaaatgccagatgcttataaaaccacctgatctcgtgagaactcactcactatcacgagaacagcatggtgggaaccatcctcatgatccaattgcccccacctgctcccrcccttgacacgtggggatatggggattacagtttgaggtgagatttgggtggtgacacagagccaaaccatatcaaagcctgatttgaatttttcaaatgttttgttataattcttagcaaagataacacaaaccataggagatttacagccatttcttgaagaaatccccaagttctaacatagaaataaataatgcagaaatgacaaaagcaaggatatataaatgaataatattatgaatgcaaattaaaagatgcaagaaaatttaagagttgaactcaagctttacttcctggaggaatgttgttttttgacgctccctctggcaggcacacaacaatgtccacttgcctctacaggatgttcatgttctaccctgtaacctgtgaacatgtttaccttacatggcaaaagggactttatagatgtgattatgtgtgcaaaccttcagatggagagttttctggattatccaagtgggcccaaattaatcacatggatttttttttttttttttttttttctgagatggagtcttgctctgtcgcccaggctggagggcagtggcgcaatctcggctcacggcaacctctgcctcccaggttcaagcaattctcctgcctcagcctcctgagtagctgggattacaggtgcgcaccatcaggcctggctaatttttgtatttttagagatggagtttcaccatgttggtcaggctggtctcaaacttctgacctcatgatccaccggccttggcctcccaaagtgctgggattacaggcgtgagccaccacgcccagctaatcacacggattcttaaaaggagaagaggcttgcagaagcctgggtcagagagacgtaccatgaggacttggcccactgttgctgctgactttgaagatggagaaagtgggccatcagctggggaatatgggcagcctctagaagctggaaaaggcaagggatcaaattctctccttgtgcctctaagaaggaag

SEQ ID NO: 702342 - DNA, 615 bp, Homo sapiens
ccacttcttaagtgtgtaacttaggaatctcctatacttttgccacccctttaatcagtgctgattgaactaaaagcttagcaagtaattgtaattttaaaatttcaaattgtataataacccaacaacaatattttayccccatagtacctctggagcaagggccttacagtatcccaatattcctggaagagcaggaacaaatttgtaggtaaagatagatagctacagagtgcactgtactctccttctgcagaatctgcaagagaataaaaatacatttaataagcacattattcttacctggtcaatctgtgcattagagtttcttcactgtttatgcttatttctacactctccttgtagagggtatattgcttattctataaaaccatgggtggcagtccgggcacggtggctcatgcctgtaatcccagcactttgggaggccgaggcgggcggatcacctgaggtcgggagttcaagaccagcctgaccaacatggagaaaccccatctctactaaaaatacaaaattagccaggcgtggtggcacatgcctgtaatcccagctactagggaggctgaggcaggagaattgcttgaacccgggagg

SEQ ID NO: 702343 - DNA, 1190 bp, Homo sapiens
ttgctgatttcagtaataactgtagctttgattccaagtgcatgagaagtcacgggggggggttttgagccaaggagtaatatgatctaatttacatttcaaattgtgatgtggaataggctggttgttgtgcttggaatagactgcttgttgtgctgagaatagacagaagcagggcaagagaagcagggagatcagttaggaggctactggaataatcctggtgatagaggatggtcactaggaatagggtggtagtagcgtagatggtgagagctagccagattctgaatacattttgatgtgacaggactcacttacagattgtcaggtgtgagagacaaagaaaagccaagaatgactctaagaagttggtctaagaaaaaagaaggatgaaataatataattcatgtagttcttaacagccaccttagtacctagtttttaattaatctcttatttttctaatattatttccataaaatattccatttaaacataatttagatcattttttatagtggattaaatattatttaaggataatcatagcagatggcagagagtcaagaaaaagacttaatgtaaatacagagggttaaagtacaatttttttaaagttgtttaacattaagaaatgtgaaactctcaatctcctatcagtttttcatggtggacttgacctctttctaacataaacactgacctctcagattctttcagaaagaacctaaggaatgcaaataaaaaaatttctttagagtagctctaaaatcaagaaaaatcacatgaaaaaatatctaattgcctgtgcctttagtacttttgtttctctacttagaatcttattttaaggaagatgtttaatcacatacagatgttagacatattgaggcaaaaaggaatttgactactaataaaattaaaccttaagtctgtatttgtcaaagagcaacaaaaaacgaagggatgaaaagcctgatatattcgtattcccttagctttctacaatttatattggcctcttcaatgtgagctgagtactttatgaaataaaaatgaacattaagtgtaatttagataatatactgtgtcaataaacaaggaaagcytcaacctatcccagtcatttaaaaagagagtattatttcaacagattttttttgttcacttaatatatactgagttcc

SEQ ID NO: 702344 - DNA, 1315 bp, Homo sapiens
ttttaaccacctcacattttctgcctggaaaaagatagctcttttgttcattaactcttttaggtacccccaaaatatatatctaattatcaagtttttaaatgcccccaaaatcagatgcccccccaagaaattctattttatttatccatcaaagactatcattttatttcatccaaattaacaaccatatcacataaagcaggtgaaacagtaatactcttatagaaaaagttttggtaggaagattgctttatcattaatcaaaaaataaagctataaatttaaaatatatataactttatgaagttagtaaccccaaaatatgtaaaatttcctttaggtattaaaatttaatgtactgtatttgaagttaattcctttagttacctaaaataggaaaaggacaattgtaatttaaaaaaaaaacaaaaaacaacagttttgaatctgagcctacttggtaataataaatatcacattatagagataaatgaaaggaagttgttgaggaagatccaggccaaaaaaaaaaaaaaaaatccctgaagtcaaattatatgtaaatatagccaagtggatttacagcaactgtatccaagaagaaacaattaaagatcttagcttagaagaggtctctagggcagtcaacaacagtgattgctgaatttcaaagactagtaaaatctcaaagcaccatggtgttggatacttcttttaattctaagcaaggacagtttccaaaaataaacaaaaattccccaaaacttaacaaaaatctyaaaaagaacttataacctgaaaagtaggatataatattagaaaaaaagtctttcccaagaagggcagtaacttcacaatgaggtataccacatatttaccaggtatactacacattgtccttatttttcttgatcgaatccaaacttatgaaaacatcatcagaagccaagggttgcagactggtattagggagccactgtgttacaggacttttttaaaattaaattcaacaagtagcacgtgcctggtgcttatgttctggagataaaacagtgaacaaaagaaacatggttcttgccactgtggagcatccaatacagtggagaagagacagtaaccacacaaataaatgtataattacaaaatgagaagtgctaggtgaacaagtacaggtgctgtgaaagcctataaaagggggacttgacctagttttgtatcagggaagaagtccctgggcaaacaacattttacttgaggtcagaatggtcagagttagggattaaaaaaaaagtagggaaatggcaaaaggagg

SEQ ID NO: 702345 - DNA, 1315 bp, Homo sapiens
ttttaaccacctcacattttctgcctggaaaaagatagctcttttgttcattaactcttttaggtacccccaaaatatatatctaattatcaagtttttaaatgcccccaaaatcagatgcccccccaagaaattctattttatttatccatcaaagactatcattttatttcatccaaattaacaaccatatcacataaagcaggtgaaacagtaatactcttatagaaaaagttttggtaggaagattgctttatcattaatcaaaaaataaagctataaatttaaaatatatataactttatgaagttagtaaccccaaaatatgtaaaatttcctttaggtattaaaatttaatgtactgtatttgaagttaattcctttagttacctaaaataggaaaaggacaattgtaatttaaaaaaaaaacaaaaaacaacagttttgaatctgagcctacttggtaataataaatatcacattatagagataaatgaaaggaagttgttgaggaagatccaggccaaaaaaaaaaaaaaaaatccctgaagtcaaattatatgtaaatatagccaagtggatttacagcaactgtatccaagaagaaacaattaaagatcttagcttagaagaggtctctagggcagtcaacaacagtgattgctgaatttcaaagactagtaaaatctcaaagcaccatggtgttggatacttcttttaattctaagcaaggacagtttccaaaaataaacaaaaattccccaaaacttaacaaaaatctcaaaaagaacttataacctgaaaagtaggatataatattagaaaaaaagtctttcccaagaagggcagtaacttcacaatgaggtataccacatatttaccaggtatactacacattgtccttatttttcttgatcgaatccaaacttatgaaaacatcatcagaagccaagggttgcagactggtattagggagccactgtgttacaggacttttttaaaattaaattcaacaagtagcamgtgcctggtgcttatgttctggagataaaacagtgaacaaaagaaacatggttcttgccactgtggagcatccaatacagtggagaagagacagtaaccacacaaataaatgtataattacaaaatgagaagtgctaggtgaacaagtacaggtgctgtgaaagcctataaaagggggacttgacctagttttgtatcagggaagaagtccctgggcaaacaacattttacttgaggtcagaatggtcagagttagggattaaaaaaaaagtagggaaatggcaaaaggagg

SEQ ID NO: 702346 - DNA, 632 bp, Homo sapiens
attacaggcatgagctgccgcacccggccaagtctggggtttttaatcaaaataagtcaacagtataacgggggcaacaagtatgctaaaataatcctaaactcttgctagaagcaggtatcttgagcaagcagcctactagtccattatgctttgcaatggttaggccacactgaaaagtctgtattcagctctaagcagttggctttaaaggatactaataaattagaacatattcatgggcatagaaaaaaaaagaggtttattctagatagtcatagtttggtaacaatgaagcaatataagtttgtttaaatatstgaggagctgtcatgtggaaaaacaagattcatttacagagaatgggatggccactaagtatagtaagtataaattagaaaggcagatttcagttgatgataagcatgtcgcaccatccagaagtggaaatggctgctacatgtgagctccctctcattggaagtatggaagtgtttaggtaaagattagaagtacatctaataagtgttacagggatttttacctgggtgggaagtggagtaggtgacctttaacctaacattttattcccaaaatgaaactgaaccttcctctaacattcctgtaccaat

SEQ ID NO: 702347 - DNA, 3154 bp, Homo sapiens
gtttgatagtcagtgcttgtgcacacacatacacccttatcccattagtgatgcagctctgatttcccatgtctcttcccaaatctggacaccttcaggaccctgcttgggctcctactgtccatgctatgttctctcctacttagatatcctttttttcttgttcaagctccaacacccctctttgggccactatggctcccctccacacagacactgctatactccacctaacgacttccaggctggatggcaaggaagagaagggaagaagagaaaggggtgtgtcatcttttagatttccttattagtccttccacagagaaaatgcatgcatgaaaatgtttacaagaggccagtttgctttatatttgcgatagtcacaaaagatctgaactgagaaaaaactgaaatcattagagaaagtaagatttgaagttaactgtcctttcacttggggaagtgaagtcttatttcttttttaggggtttcatgttttgttctgataagtgacttccaaattagacacttagaaataaaaaggctggaatggagacttgatattcttctgtcccaattatcttgttttacagacaagggaattcatcctggtgaggtcaaatgagtttcccaggtttcccaagtgcctgagtcagaaacgtgacatttttcaacatcctggccagtgtacttggcatgctaccctcattatcatttaaaagtattcgacctttaaggcaaatttctaagaaaaatatattttatacattatacattatattttaaatgggaagtgtttttcttttgtaataatatgacttatagaatttggaccctaaaatttatctggctaggtgcagtggcacaggcctgtaatcccagctgttgaggaggctgaggtgggaggatcactcgagcccaggagctctgggatgtagtgggctgtgccagtcactaagtttggcatcaatatgatgaccttcagatgtggggtggtggtgactggggaccaccaggttgtctgaggaggtgtgaactggctcaggtctgaatggagtaggtcaaaactccgtggtggtcaatagttggattgtgcctgtgaatagccactgcgtcctagcttgagcaacatagtgagatcctgcctcttaaaaaataaataaataaataaatgaaacattatttggttatgagttgatttgaaatgcttgggaccagaagtgtttcaaatttggattattaaagatttctgaatatttacatatatataaaatgagatattttggggatgggacccaagtctaaacacaaaattcatttatgtttcatatacaccctataaacataggctgaaagtaattctatataatatttccaataattttgtgcacctgtcaaatgaggtcaggtgtagaattttccattggtgtcatttcagcactcaaaaagtttcatattttgcagtattttggatttggaatttttgaattagagatgcctaacctgtagttctttggtgattatagtttattagactggatgatctagaaattagccttacctatttggtagttagtaacctgaaattttctgaacactttctcttaattgcattatgttaactgggcttagtaaagttggcatgcaggttggtcatttattttactgtttcttattttgtggacttgatgggctggcraaatgtatgtgcatagacatgaatgactgataaatagataaattatatattctaaaaatcccacaatgtaagatttgtatttgtatttgtattattttcttttttgaggcagagtctcactctgtcacccaggttggagtgcagtgtcctgatcttggctcactgcaacctctgtctcctaggttcaagcgattttcatgcctcagcctcccgagtagcaaggattacaagcgtgcgccaccatgcctggctaatttttgtacttttagtagacacagggtttttacatgttggccaggttggtctgaactcctgatctcaagctatctgcccaccttattctcccaaagtgctgagattacaggcgtgagccacagtgcccagccaagatttgtatttttaaaaaccttttatatttgttaaaatctaacactttatggacaaatttagttttagaaaagctggaaataaacaacttgctgggtatagattagccatttagagcattcattaatttccaaaaatcattttgcatcacggaggtccaaaggaaaaataggcaacaaactatattttaaaatccaatgaaaggcttgaagagtcccacgagctgagtgatttaagaggacaactgtgatattaacttacttctggcccttagatgaaatatttgcccttttagcatcaacataattctgtaaattattattaacaaatacgtagattttataattggaaagagcacagtattaagatcatttagttcatctcccttcaggcatgaatcctcctaccacctactaaaggcggtcacccaggatctgttgatttgaatcacttttgatcatggagaaatcactatcttccaaggcagccatgccttataattccacagaaaccttcctctgggtgactttgccccatgactgctgccttctgtcctctgaagttagatataatatagttaaaccttcttccatatgacaatccttcagcttcgtctgcctagatccttagcctctgggaatgttctctacctgtctctttcttctgcagttatgtctttaggttcctcttctaagattaagattttttccctttccccatcttttcccctttgtctagacttaatgtctctttaaaatgtgctattttaggaggctgtgcattctcctgatgaaaggcaagaacggcatcttgtattctttttattgtccttagtcacgtgaatgcaaaatgtctgagacaggtctcagtcaatttagaaagtttattttggcaaggttaaggatgtgcccctgacacagcctcaggaagtcctgagacatgtgcccaaggtggtcgggggtacagtttgcttttatatattttagagagacatgagacatcaatcaatatgtgtaagatgtacattggttcagtccagtaaggtgagacaattggaagtgggggctt

SEQ ID NO: 702348 - DNA, 3154 bp, Homo sapiens
gtttgatagtcagtgcttgtgcacacacatacacccttatcccattagtgatgcagctctgatttcccatgtctcttcccaaatctggacaccttcaggaccctgcttgggctcctactgtccatgctatgttctctcctacttagatatcctttttttcttgttcaagctccaacacccctctttgggccactatggctcccctccacacagacactgctatactccacctaacgacttccaggctggatggcaaggaagagaagggaagaagagaaaggggtgtgtcatcttttagatttccttattagtccttccacagagaaaatgcatgcatgaaaatgtttacaagaggccagtttgctttatatttgcgatagtcacaaaagatctgaactgagaaaaaactgaaatcattagagaaagtaagatttgaagttaactgtcctttcacttggggaagtgaagtcttatttcttttttaggggtttcatgttttgttctgataagtgacttccaaattagacacttagaaataaaaaggctggaatggagacttgatattcttctgtcccaattatcttgttttacagacaagggaattcatcctggtgaggtcaaatgagtttcccaggtttcccaagtgcctgagtcagaaacgtgacatttttcaacatcctggccagtgtacttggcatgctaccctcattatcatttaaaagtattcgacctttaaggcaaatttctaagaaaaatatattttatacattatacattatattttaaatgggaagtgtttttcttttgtaataatatgacttatagaatttggaccctaaaatttatctggctaggtgcagtggcacaggcctgtaatcccagctgttgaggaggctgaggtgggaggatcactcgagcccaggagctctgggatgtagtgggctgtgccagtcactaagtttggcatcaatatgatgaccttcagatgtggggtggtggtgactggggaccaccaggttgtctgaggaggtgtgaactggctcaggtctgaatggagtaggtcaaaactccgtggtggtcaatagttggattgtgcctgtgaatagccactgcgtcctagcttgagcaacatagtgagatcctgcctcttaaaaaataaataaataaataaatgaaacattatttggttatgagttgatttgaaatgcttgggaccagaagtgtttcaaatttggattattaaagatttctgaatatttacatatatataaaatgagatattttggggatgggacccaagtctaaacacaaaattcatttatgtttcatatacaccctataaacataggctgaaagtaattctatataatatttccaataattttgtgcacctgtcaaatgaggtcaggtgtagaattttccattggtgtcatttcagcactcaaaaagtttcatattttgcagtattttggatttggaatttttgaattagagatgcctaacctgtagttctttggtgattatagtttattagactggatgatctagaaattagccttacctatttggtagttagtaacctgaaattttctgaacactttctcttaattgcattatgttaactgggcttagtaaagttggcatgcaggttggtcatttattttactgtttcttattttgtggacttgatgggctggcgaaatgtatgtgcatagacatgaatgactgataaatagataaattatatattctaaaaatcccacaatgtaagatttgtatttgtatttgtattattttcttttttgaggcagagtctcactctgtcacccaggttggagtgcagtgtcctgatcttggctcactgcaacctctgtctcctaggttcaagcgattttcatgcctcagcctcccgagtagcaaggattacaagcgtgygccaccatgcctggctaatttttgtacttttagtagacacagggtttttacatgttggccaggttggtctgaactcctgatctcaagctatctgcccaccttattctcccaaagtgctgagattacaggcgtgagccacagtgcccagccaagatttgtatttttaaaaaccttttatatttgttaaaatctaacactttatggacaaatttagttttagaaaagctggaaataaacaacttgctgggtatagattagccatttagagcattcattaatttccaaaaatcattttgcatcacggaggtccaaaggaaaaataggcaacaaactatattttaaaatccaatgaaaggcttgaagagtcccacgagctgagtgatttaagaggacaactgtgatattaacttacttctggcccttagatgaaatatttgcccttttagcatcaacataattctgtaaattattattaacaaatacgtagattttataattggaaagagcacagtattaagatcatttagttcatctcccttcaggcatgaatcctcctaccacctactaaaggcggtcacccaggatctgttgatttgaatcacttttgatcatggagaaatcactatcttccaaggcagccatgccttataattccacagaaaccttcctctgggtgactttgccccatgactgctgccttctgtcctctgaagttagatataatatagttaaaccttcttccatatgacaatccttcagcttcgtctgcctagatccttagcctctgggaatgttctctacctgtctctttcttctgcagttatgtctttaggttcctcttctaagattaagattttttccctttccccatcttttcccctttgtctagacttaatgtctctttaaaatgtgctattttaggaggctgtgcattctcctgatgaaaggcaagaacggcatcttgtattctttttattgtccttagtcacgtgaatgcaaaatgtctgagacaggtctcagtcaatttagaaagtttattttggcaaggttaaggatgtgcccctgacacagcctcaggaagtcctgagacatgtgcccaaggtggtcgggggtacagtttgcttttatatattttagagagacatgagacatcaatcaatatgtgtaagatgtacattggttcagtccagtaaggtgagacaattggaagtgggggctt

SEQ ID NO: 702349 - DNA, 657 bp, Homo sapiens
tgggctctactccctctatccaaagcacctcacctaaaccttctaaacactgtgcatgaacaaggagatgaatcaactcaagaactcttgaccccagggactcaaagcctgggttatttgcctgattatagactactagctcaattaccacatgactcaatcttagcaaatgttcattaattcactcaaatataatcaatcacctacaattttcaatgtaacatgcattttttaaatagactttattttgtagagtagctttaggtcacagcaaaattgagcagaaggtacagagaattgccatctgcttcctgccccttcacaggcacagcctctcctattagcaacatcccccaccagagtggtacatttgttacaatcaatgagcctacattggcacatcattatcacccwaactccctggtttacgttagggttcgctcttgctgttatacattctacgggtttggacaagtgtatggtgacatgtgcccatcatgatagtatcatacagatcagtttccaaaaccctctgtgctctgcctagtcgtccctccatccctgcacgccctggcaaccactgatctttttactgtctccaaagttttgccttttcaggaatgtcatatgttgaaatcatatagtatgtagcttttt

SEQ ID NO: 702350 - DNA, 2635 bp, Homo sapiens
ggttgtggtgaagtaagtagcttcctttttatcttgtttattaattttcttattacttctcactagaatacaagctgcaataaatgtacttaaacaccatcatgtgcctgaaatcaaaattacaactttatatgcttatatgaaaaaagatagctttcttcatttaggcatgtaaatcagagcacatttgttttctttataccagtttttttcactttcagttcagcaaacactaaatccacgtgtcaatggggaaatagacctagaagactgagaagcagattgttatagacattctctagccagttttctttgtaccagttctattgttatattttctatatctacaaaaattttctcatatttgggtatatgttatctaaaccttccttctcctttgtacataaactttatttctctgtcaacttttcttttgattcattccaacagagaaatgagtcctgtgctgttctatttttatgttttcaaagcaaacagttaccttgagttatctacacagagagcctcacatggctgttcccaagcaccacacagataaaaccaccatgaagcaaagttaaaccagtgaatgatcatcttcacagagagggagaaatgggaccaatcctgtcaaaatgcgatgaaaatgtggcctctaaaattaggtattattttcttctggatgtcaggtttcttttcccccttctaatttcctcatttgaaatatagtaggaaacaaacaaacaatccagagacaaccaatagttccagaatttctacagaaatagaatccctctgtaggagttttagttcaatttgatgggactatacattcttcatatagtctaaaattttcagatgtttatgcaaaaccaaactcaagacattcaagaattatctcacgagcaagatttaccaactgcttctctatccttctcataaagtgccttatgcagcatgtccggaatgattctctgcatctgatgcaaagcaagaaagattctagatttgcatttgaattgctggctatttttaactttctcagagttttactttgagagatattttacctttgtggatgagttatggagtcaggtgcttgacctttaccagctttccagtgaaaaatccaatgaggaaaagacttcaaacgtcttacaaaaccaaactcattatttatgaagtcctgaactatgtcagtgacattcccagacacacatagtgtagtaagggctttatttcgagaaattcccaaattgaatcctctttagtaagaatcctatgtggactaattttgtaaatgatttccaatcatagaaatgcctgtgagtgataggattctacaaacaaacgggcagcatcagaactcacaagctgctctttccttccccttctataagagccctctctacaccatggtgtgcaaaggggattctgtggaattaaaacttgtgtggtttctggaaccctaaatccccagtcaagcagtctggtaaataaagataaggcatttacttgatttccctaatatggctttacctcaggggacagggtaaggaggagggcatatattaatcaagaggttgtttttaaaaaacctattgtatatayttaatatagttctagtcacctgagatttataaaaaacatcgttgctgctttcaatgagtttgcaacctaattatctggctaaaaattagactttaaaattttagttgcatattttactacttgcctattttttttctcatcagatagatttgttgaaaactgaaaatgagctctgatgtccagaatcttttggagttttaattttacactcaggaaaacaccaagatgacaaggaatctacatgtgggactcagctgacattttccctatttagtataatgctggcaaatgtaagccaaagccctcctgtccagtattataagtatcttctctttctttcctaagaagtcagcagacttgacatttgactgcttattcatttcctcccctctccagagctgaaattctcacccaggatcatctgtcacccgggctttgatgaggagggggtttaggcatttgctgtctgaactgtcaaactcaaagtcagctttgaatggaaggtcccaccatgtgctttagaaaaatagggtagtggctgtgggcagacagcagagaggaagggagagagaaacattctgaaagagcatctgatgtgggcctgggaatataaagagaagaggtgagaggacaggtgaatgagagtttagtgagcccatggcagatccagggcttaattattataaaataattccctgcagcactgtatttctgaggtgtatgatttttttgaccatgtgggcatttaccctttttaggtcaaactggacactaagaaatatactatagatatgattgatttgttctttcaagaaacacttattgagcattaactactgccatgaactgtgctaggcattgaaagtactgtgatgacgatgacctagtccttaacctttcagagacttacagtttaaggaggggtggaaggaggcagataagtgaaccaaatatcacagcataatgtattaaggaccgtggtagaattatgcacagagtattcttgcaacaaaaaggagaaaca

SEQ ID NO: 702351 - DNA, 2635 bp, Homo sapiens
ggttgtggtgaagtaagtagcttcctttttatcttgtttattaattttcttattacttctcactagaatacaagctgcaataaatgtacttaaacaccatcatgtgcctgaaatcaaaattacaactttatatgcttatatgaaaaaagatagctttcttcatttaggcatgtaaatcagagcacatttgttttctttataccagtttttttcactttcagttcagcaaacactaaatccacgtgtcaatggggaaatagacctagaagactgagaagcagattgttatagacattctctagccagttttctttgtaccagttctattgttatattttctatatctacaaaaattttctcatatttgggtatatgttatctaaaccttccttctcctttgtacataaactttatttctctgtcaacttttcttttgattcattccaacagagaaatgagtcctgtgctgttctatttttatgttttcaaagcaaacagttaccttgagttatctacacagagagcctcacatggctgttcccaagcaccacacagataaaaccaccatgaagcaaagttaaaccagtgaatgatcatcttcacagagagggagaaatgggaccaatcctgtcaaaatgcgatgaaaatgtggcctctaaaattaggtattattttcttctggatgtcaggtttcttttcccccttctaatttcctcatttgaaatatagtaggaaacaaacaaacaatccagagacaaccaatagttccagaatttctacagaaatagaatccctctgtaggagttttagttcaatttgatgggactatacattcttcatatagtctaaaattttcagatgtttatgcaaaaccaaactcaagacattcaagaattatctcacgagcaagatttaccaactgcttctctatccttctcataaagtgccttatgcagcatgtccggaatgattctctgcatctgatgcaaagcaagaaagattctagatttgcatttgaattgctggctatttttaactttctcagagttttactttgagagatattttacctttgtggatgagttatggagtcaggtgcttgacctttaccagctttccagtgaaaaatccaatgaggaaaagacttcaaacgtcttacaaaaccaaactcattatttatgaagtcctgaactatgtcagtgacattcccagacacacatagtgtagtaagggctttatttcgagaaattcccaaattgaatcctctttagtaagaatcctatgtggactaattttgtaaatgatttccaatcatagaaatgcctgtgagtgataggattctacaaacaaacgggcagcatcagaactcacaagctgctctttccttccccttctataagagccctctctacaccatggtgtgcaaaggggattctgtggaattaaaacttgtgtggtttctggaaccctaaatccccagtcaagcagtctggtaaataaagataaggcatttacttgatttccctaatatggctttacctcaggggacagggtaaggaggagggcatatattaatcaagaggttgtttttaaaaaacctattgtatatacttaatatagttctagtcacctgagatttataaaaaacatcgttgctgctttcaatgagtttgcaacctaattatctggctaaaaattagactttaaaattttagttgcatattttactacttgcctattttttttctcatcagatagatttgttgaaaactgaaaatgagctctgatgtccagaatcttttggagttttaattttacactcaggaaaacaccaagatgacaaggaatctacatgtgggaytcagctgacattttccctatttagtataatgctggcaaatgtaagccaaagccctcctgtccagtattataagtatcttctctttctttcctaagaagtcagcagacttgacatttgactgcttattcatttcctcccctctccagagctgaaattctcacccaggatcatctgtcacccgggctttgatgaggagggggtttaggcatttgctgtctgaactgtcaaactcaaagtcagctttgaatggaaggtcccaccatgtgctttagaaaaatagggtagtggctgtgggcagacagcagagaggaagggagagagaaacattctgaaagagcatctgatgtgggcctgggaatataaagagaagaggtgagaggacaggtgaatgagagtttagtgagcccatggcagatccagggcttaattattataaaataattccctgcagcactgtatttctgaggtgtatgatttttttgaccatgtgggcatttaccctttttaggtcaaactggacactaagaaatatactatagatatgattgatttgttctttcaagaaacacttattgagcattaactactgccatgaactgtgctaggcattgaaagtactgtgatgacgatgacctagtccttaacctttcagagacttacagtttaaggaggggtggaaggaggcagataagtgaaccaaatatcacagcataatgtattaaggaccgtggtagaattatgcacagagtattcttgcaacaaaaaggagaaaca

SEQ ID NO: 702352 - DNA, 1213 bp, Homo sapiens
tttaaatgtccttctgatgttgtatagaaccacatggcacacgtaggtgtgtggatgtgctatagtgaatcccattttwaaaaaaatttccaagaggcctgagaagtgagtgataactcacagagagtggaagaatagaaaggaacatgcaacaggggaatggaccatttaggatcagtttgagaagagccctttttcccaaaggggaaagttactcctgaggatgaagaaccctgggatttgggttatatagatattattttatttatttttattaataactttgtcatataagtattatttaaccatcttgtagataatgaaatgagtctcagagaggttaaatactttgctcacgataacacaactagtagtaaataacagaggaaggatttaatccttgtctaactccacagccaatggacagtacagtatagtgatcaagtaggtagattccagtgtcaaattactttgattctctttctgtgattttcacttattagctgtttaaccttggataatttattcaacatatctgtgcctcaatgctcacatctggaaaatagtgatatgatctcatcagattgctgtgagacttaaatgagataattaatgtcaagattttaatacattacaaggtgtataaaacagatcatatatatcaactggaattattttaacatggctttgcttctgtcataagcagcaaacaatatttgaagatgttacttggatttatagaaattaaaaaaaatctattcaagggtaactctagtacagctaaaaccgataaaacaaacaagagtagaaagacatctaacacatgaaatctgtagctaccactgcataatgtagaaacctaccttaagtcaatggtctatatttctagagtaaatataaattacatggatgtttaaaaaatctatttaacaatttaagtctttggatatccataaggaaatgattgactaatgctattttaaaaggcttgtatgaaagaagtctacaagcatttggtagtctgtaccagaacagcccatctaaacaacccctctaattgatatgttctttctactatctaagaaaatacttcctggtcaaaatgtaatttctttcatatctgtctcctctgatgagacttcaacctcaatacatatgaattggggccaaaatatatacaagacactacattagttatttaagcttacattct

SEQ ID NO: 702353 - DNA, 1263 bp, Homo sapiens
attaaaagaaagctgaaatctgcccttacttgaatgctggtggcaatttgctcagctcagctctcctttggatcaggggccttgggttagctaaccgcctgggaattgggcccagatgcacacagcacgtaggtgctaatccacatgaaacttgaggcactgaaaggggcagctgtgtctgatgtaatttatcatacctgtgatgctattgtccttaaggtatcctatgacctgggaccttctctcaggagagctcctgggcaaatattcttccaatgagattatacctgaggcttgcccagcactcaagtagaaggctagctgaggcttacccctgacatcatgaatagctgtgactcatcattttaaattgaggccttgaatayggtccaccagtatggatttgtagatatctacagggcatgtttccaaaacaggaggagttgatgcagagggaaacaataaacaaaaacctagaatgaattataaaagtttgctgaacctcaactcaaataccaaacattattattttattttctatggaactgagaaataaaacaaagcttattttattttattttattatttaaactgcagtgaaccactttgaacctgtcactgattcactgaactggaaccagactagaatatcaaaatattttctaaatcacacatgagtcaactgaatattatttagttaagagttcctggcttgttcactgtcagaactaaaattcaagttgatgatttctccctgccgtatatctgggtgtgggtagagacactataacagaggctttggtagtagaatagggagagagaatacctactaaattaatgcttcaaacatttcttttagctaattttgttaatcaaacaaactctgacactgagattcaatataaatcacgtaagtgtggccctatggtgattgaagcggtatctgaggtcccaagtccaggcagttggatactgctgcccctctagggaatgtcagcacaccatcagacacagaatagccccacactaaataacactgtgcaggatttgagttctgtggctttaatcatttttttgtgtgtaggtgattccttgggctttatttctctcctgaatgttaatccatatctatttgctattcacttagactacttactggtgtcccaaacttgacgtgtctaatgttgaatagttctatgttccttcaaacaaactactcttgtattgactatttgtgttaatgtcattctcctggttaactgg

SEQ ID NO: 702354 - DNA, 1168 bp, Homo sapiens
tgaatacagctgctgtgaacatctatggagagcaggtttttgacttgagctgaggaactctttcctgggggctgcggtgagtaggtggatgacatctcacattctggcaggtggggctgggggtggggaggtgaaggttcagggtccctggcaggctggttctacaggacattttatttgggcaataggaaaatactgtcctctagtcctaagactccaaaagttgggagactgtagccagcccaagggatgctgatgcagtagatctggggagggcctaggttacctgcacttttaccagcccccaggggattctgacacaggtgggcctgggaatcgctgaggtctactgagatcacatactcattgccaaccttgggtctctcttgacacctccaggaattgtggactctctcgacatcctccaccctttcccccaacatcctcaggccacccatgtcacagtctgttcttccactgtgaactcccaacttatagaatgttccttcttctactgagctgacacctgcctccttaaaccactcaccccctggatcttcatttgtcttctagggcagcctggaagaagtttccagttctgcaccgtgccccatcagacagctgaacctggcttcctcataaccctctcacctcatgctctccaagtgggcaggtgtccttcttgggactaaggtttcagacccttgcccatgccatcactgtcctccaaatgaaagtctaattggttaatgtcactcttaaatgtggcctgagtgagtcactcaagtccaggttgttcatcagctctgagcgcagcaggggtcatgccttaggtcctccacttcccagggcactgacctgaacttgcacccgccctggttccccccgccccccactgatcttgtggtctacaaacagcccctgaatttcttcccaagaattgctgttaagcccagtctctcctccttcctatagtgctgtattgatttttgtgttgttttaaccaaaagcagaactttmaatctatccctgtgaaatctcatctagttggttttagtccaacattccagcatgaacaaatcatttcaaatcttgactcttgtcatccatcatattccatctgacctgcaccacttgagaccatctgaagattgattaagcagcctcc

SEQ ID NO: 702355 - DNA, 3629 bp, Homo sapiens
tggcccactgcagcctctacctcccaggctgaatcggtcctcccacctcagcctcctgagttgctgggaccacaggcatgcaccaccatgcctggctcattttttaatttttgtagagacagggtctccttatgttgcccaggctggtctgaaactccagggctcaagcaatccttccacctcagcctcccaaactgctgggattataggcatgagccaccacgcccagcctgaagacttagtagaatgctaatagggaagccagatagaaggggacttgaagagggggactgagatccattcctacatcctttccccagtggacagccctgcaggcaaccccccagaaccatggggaacactgtggaactgaaaacccctagtgctagggccgggtgtggtggctcacgcctgtaatcccagcactttgggaggccgaggcgggcagatcacctgaggtcgggagttcgagaccagcctgaccaacatgaagaaacctcgtctctactaaaaatagaaaattagccaggcatggcgtcacatgcctgtaatcccagctccttgagaggctgaggcaggagaattgcttgaacgtgggaagcagaggttgtggtgagccgagatcgtgccattgcattccagcctgggcaacaagagtgaaactctgtctcaaaaacaaaacaaaacaaaaaaggaaaacccctagtgctgaggcctggagagcctcctggctctgcctgagactgggatctcaccattgagctggtccttgttgggccaaagccgccatatttcatagctccaaagggcgctcttctgcctgtggttctggaactccatgctccttggcattgagtaactcagtgtccctgctgcagccttccaaccccaatattcagccctccttccttgacaccagccctgggtacagacctctacagtacagggactgtatggagagcaaggagagctcagcagaagccccacctggccccagcactggagtcgcttgccatcctgccctctccccaccgggctctctctgtccctgggtgcccagatgtttgagcgtgagacccggcgagagaagatcctggaggccaggcaccgggagatgcggctgaaggagaagggtaaggcggagggcagggatgaggagcagaccgatgaggagctggccgtagacctggaggcgctggtcagcaaggccgaggaggagttcttcgacatcatcttcgcagagctgaagaagaaggaggcagacgccataaagctgacgccagtgcctgtaggggcctggacagggttgggtgggttgggactgggcgggacacatggcacttgggttctgcttctgcttgccgacttcctgggtgaccttgagcaagtagtcttacctgctagatcttaatttattcacctggcaagtgggaagaattattcccttccttccaaagcatcccaagtctccaaacagacttcaggctccttacaggcaggaaccatactccatgcctcctggtatcctcccctccccccagagagggcacatggtgaaaatgcgtgttgagtgactgaacgagggaacatgtgtgttgagtgactgaacgagggtcctagaggtaagtgagctgtcagagaggaatgggccttgagacccctggagggaagggctgggacattagcggtgtgcacgtcatgctggcttacccaggtttggtgtcaggagtgtgacctgtggtcagctcatctgcccatggccccagctctaaagcactttctagctgtatcacctgagctggtcgcttcacttctggcttccttcatttccatctggaaaatgaggagatgttgctataaagatggtgtctggtcatcttccaggccctcttttgtaccagcggagagaggaagaaaagacattgcctgtctgggtcacctccttcaggccccacagataagatgccaagatatgaaagagccaaagagcagcgtggaagggaaaagaaacagcgggtatatgccaggatttacccttgtaggcaagactggctgcagacttggggattgcaggcactgcaaaatgaaaatgtgagggccctcgtttaaaaagtattaataattttaaaacagtgacaatagagcgttaaaccaagcgtgggccctgctgagacagggtccagtgtatctgcacagagcacccacccatgacgcctgcttgaagaagagctgtatggcaagttcttggtccctgatagagtggacagagcgaaggatggtgcatgagcacacagggaagataactggttccatcttgtgatttcttccctcttctgcctccctccccctgggtctaaagctgtgatttccacaggtgcattttgcatttgggggtacttggttatgagatgttttcttctcacactgggtaatacaggtggggcagagagctccctccacttctggtggaggcaaaactagaatcctggattctgacgcctaatccagggctcctcccactcaccactcctggcctatccagccctgcagaaggcaaagatgacactggccaccttttacaacgcaatggtggctggtaggcacatgctttgtgacatatgtcccaaaacgtgctcctcaccatggcttgaacattctacatgaagaagttgagccttggaaggggttcaggttcacagaacttggccccttcctcctcctgcctgccacacacttcctgtctctctcttagtctgcaattggcccaaaacgctggtggtcacaaagtaccgcgtggtactgaagctgttttacataggctgggtccttatgcccactatttctaatcctggccacagccctgcaaggtgtcctgtcctctctatgggtgagggggccaaggagactcaggaggagctagcccgaggcctcccagtctgcatgtggcagaagcaggcgtgaacccaagtctgccagattcccccagctctgcccactttccgcactgtctgggccctcaccagccgcagagctggcacccgggttccagggtgctcagcgacccaggcttcagcatttggctgctttggtcctcgtggggttcacatcccaggggagtggggaaggcctgtccctaccaacaccaacacttctgtgctgtcttcccctgcagcagcaaccaagtccagaagaagaccaggtggtggaggagggagaggaagcagcgggggaagaaggggatgaagaagtggaagaagacttagcctagaagtcagccttcgactgcggcgctatccctgtgtgccttcctttcccacctcttggtattgccccgctctcacaagtgggaggctgagctccgccttaaagcagcactgggtggtgggctrggagcatcgggccctgactccccagcccctacaaatcactagcccccactgactcactgggcactgagtcctgagccaccccttggagagagggaaggggcggggcttgtcccggagctggctgccccattgtctcagccaccctgagcccaccccaaggccgaggccaccttagtcctagtcctggatgtctcctgggattcagcttctcacaggctccccagcaatcattttcgtttg

SEQ ID NO: 702356 - DNA, 624 bp, Homo sapiens
tgtgtgtgtgtgtgtgtgtgtgtgtgtctgctcaagtcttggctggcttagaaagcattgtctttttgttggcatgaggagtgtggggaggagggcaagtgagggaaattgaccaaaaagaacccagagttttttggagaaaaaggcttacattggagactccagttctctcatataaaaatccacattaggaaaccccgtgagagaggatccctggtggttttaaagggattctgctggcaggaaagaagggcaaggcacctggagggaacrtcctccagagggaggagaggcaacatacaggtgatcactgggacccccattctgagatttagggaaaagcgagggcagaatctggagaaggcaggggcagctgctgcagatggccttcatctgtggggtcaggagcaccctcaatctaaaagttgtccatctggaaagagccattgttgccacccatgctggggagtaatggtcagcgggttgaatttttttctacccagcggtcatctcagtgcagactctaaccagcttagttccctcccccggtgattctggaagtgcccacgtccttggaagtggtggccttcctcctgtgagtgcacctctgtcttcattagctgc

SEQ ID NO: 702357 - DNA, 308 bp, Homo sapiens
aatgctactataaaattatatggaatatttcccaaaatatttacctaggccataccctaaccctgccccaggcaaaatctgatcttgatygcattatatgctaggttcgtatttttgagaatgccacatacacaaaatcatagtggatgtttgcctttgtttctagtttcttttgttcagcataatgtgtttgagattcatctatattttgtgcattgttagtgtccttttgttgttgaacagcattacattaacgggtataacacaattagtttatccattctcttgctaatgaacatttgggttga

SEQ ID NO: 702358 - DNA, 578 bp, Homo sapiens
tacagacatatatacatacatatatatgtacatatacatacacacaaagatatcattatttggcagtaactaagttaaatgcatcatcttatttaattctcttgactcctttattaagcaggcaatattactattcatctgttttagacatgaatccattgaggcttagaaaagttcatgttaattaaggtcatatattaaatggtaaagccaggtctcaaacccaaattctgattctaaactgtaaaaaggaaattaacacagaactgaaacattttatcaaattttcccatgacctatatgggatgtctctcaaactaatctagtctgctttgytaacagtccagacacatcagcaaaactcataccaaattattcaaatgcttatacagtctgatcctggaaaacatggtgtcctagatagtagaaatgccatccagttcatgagggaaagcatatcccagtatgaattccagaattggcatggatttatgtaatcacttgttttttttcttggttgcataagttgatattccagagtttaatcaactctggttgggttgaaatttcaagttact

SEQ ID NO: 702359 - DNA, 679 bp, Homo sapiens
gcccacttgaactttttgcctggagaacctctaagctaataaatgggtgttgtgtcaaggggccaaatttgttgtaatttcttatgacagcaatagaaaatgaatgtgcatcccaaccactaacaagaatcacgtcctgaaatatggcagctyaagtaaggtaaagtcagctagacattcctaagtggacaccattctcctacttacttatacttactctacagcttcactcctgggttattaataaataggtcacgcatccaaataacaaaaatccttctttctcaatataaaaatgattgttatttaaaaaaatactatttcaaggccaggcgcggtggctcacgcctgtaattccagcattttgggaggccgaggcgggcagatcacaaggtcaggagatcgagaccatcctggctaatacggtgaaaccccgtctctactaaaaatacaaaaaaattagcctggcgtggtaggcgcctgtgagaagctgaggcaggagaatggcaggaacccaggaggcggagcttgcagtgagccgagatggcgccactgcactccagcctgggcgacagaacgagactctgtctcaaaatatatatatgtatatatactatttcaataagaataaataaaaacaatgagccctgaaaataatcctaccacccaaggataaata

SEQ ID NO: 702360 - DNA, 679 bp, Homo sapiens
gcccacttgaactttttgcctggagaacctctaagctaataaatgggtgttgtgtcaaggggccaaatttgttgtaatttcttatgacagcaatagaaaatgaatgtgcatcccaaccactaacaagaatcacgtcctgaaatatggcagcttaagtaaggtaaagtcagctagacattcctaagtggacaccattctcctacttacttatacttactctacagcttcactccwgggttattaataaataggtcacgcatccaaataacaaaaatccttctttctcaatataaaaatgattgttatttaaaaaaatactatttcaaggccaggcgcggtggctcacgcctgtaattccagcattttgggaggccgaggcgggcagatcacaaggtcaggagatcgagaccatcctggctaatacggtgaaaccccgtctctactaaaaatacaaaaaaattagcctggcgtggtaggcgcctgtgagaagctgaggcaggagaatggcaggaacccaggaggcggagcttgcagtgagccgagatggcgccactgcactccagcctgggcgacagaacgagactctgtctcaaaatatatatatgtatatatactatttcaataagaataaataaaaacaatgagccctgaaaataatcctaccacccaaggataaata

SEQ ID NO: 702361 - DNA, 679 bp, Homo sapiens
gcccacttgaactttttgcctggagaacctctaagctaataaatgggtgttgtgtcaaggggccaaatttgttgtaatttcttatgacagcaatagaaaatgaatgtgcatcccaaccactaacaagaatcacgtcctgaaatatggcagcttaagtaaggtaaagtcagctagacattcctaagtggacaccattctcctacttacttatacttactctacagcttcactcctgggttattaataaataggtcacgcatccaaataacaaaaatccttctttctcaatataaaaatgattgttatttwaaaaaatactatttcaaggccaggcgcggtggctcacgcctgtaattccagcattttgggaggccgaggcgggcagatcacaaggtcaggagatcgagaccatcctggctaatacggtgaaaccccgtctctactaaaaatacaaaaaaattagcctggcgtggtaggcgcctgtgagaagctgaggcaggagaatggcaggaacccaggaggcggagcttgcagtgagccgagatggcgccactgcactccagcctgggcgacagaacgagactctgtctcaaaatatatatatgtatatatactatttcaataagaataaataaaaacaatgagccctgaaaataatcctaccacccaaggataaata

SEQ ID NO: 702362 - DNA, 405 bp, Homo sapiens
tggaattttttaaatatgacagacagctatacatactaacatgaaaggatacccacagtatattgttggatatgaaatcaacaaaatgtagaccattgtttatcgtattgtatcaattttctattgctgtgtaacaaaccatcccccaaaatttagtgatttaaaacaacaatcacttatttgtttatgattttgtgggctggcaatttgggttgggcttagctaggacaagtcatctctgctagatacggtgttggctaggcttactaatatatgtccccaaagcagggacagctgggacaactctttctacctggcctttctctcatcctcaaggagaaaagcagaaaaggcaaatcttgagccrtggcttgggattgccacaattttatttctaccaatttc

SEQ ID NO: 702363 - DNA, 1039 bp, Homo sapiens
aaaaaatggtaatattaacccatgcattacaaaactaataaatttccccatagcataccagggacaggagctgtgatttttcattttcaaaaagcctcctttgtcagatgaaaagccctgagagtaaaatatttcagtatagttcagtgttaacaatgggtatgccattagattaccatacaagtgaataaagcaccaaatgatacgaacattttttcacactttagattttgatgtgaaatgagtctaattatttattcatagacttttcctctaaggagttcaaagaactatattttaaatcttcaaacacgtatttcctaagctctaaaatctaccaggtaggacagaagaacgtgctgccgggaagaagataaagaaaagcagcacaaaagaaaaggctggttggaagaattcaagtacatttcaaacatgaggtggtatattttattcattcatttattcttgcagtcactcatttattgagcacctattaagaagtctaggtctgtgctagatgttaaggatatgaaaacaatccctgctccagcagctcatcagagagagggatgacagacaaataaagtgataattacagtaggtgcctagtgctgcaacagcaggatgaactaagtactttgggagcacaagggatagaaccactggcctgaaggaatttggaaaggctttaacaagaaggtagcatttcaattgtatttagaaacatcagtaraagtcggtcagagaattaagaggagcccttgaagacagagctaacattatactgaaatgcaaggagtcatcaaaaggtttgacctgagaatgtgaggaatacaatatggcttagtagcaagagataacgtttagtgcctagaaaccataggtttcaagtctgttctgtgaaggactacaagggtgccatactcatagaaaccttggcattagactaacaaagcaaaatgagcagatgtaaaatatgtatacgaacatgtatgtatagagagatatatatcatttttatgtatataattttgcttta

SEQ ID NO: 702364 - DNA, 595 bp, Homo sapiens
tgttaaactgttcagccacactgaaaaactgtatcagctgtaaaacttccaaggtatatactagtgataggtgattttatgggttaaattggtcaggccccaacacccaagtatytggtcaaacattattctagatgtttctgtgaaggcattttttagatgagattgacaattagatcagtagattttgagtgaagcagatgaccctccataatgggggtgggcctcatctaatcagctgaaggccttaagagagacaactgaggttccctgaagaggaaggaattctgccagagacggccttcagcctcgagccacggcatcacctcttcctggggtctccagcctgccaacctatcctgcagaattggacttttttgaacatacccagcctccaccaagcacataagccaattccttggagcctttctctgtctctgcctctccctctctctgtctctgcctctccctctctgtctctgcctctccctctctctttctctccacacacatcccattggttccgtttctctgaaggaaactaatacaaagctcaaaggaaagagcgtatgcgtccaccagaagacctttacaa

SEQ ID NO: 702365 - DNA, 3555 bp, Homo sapiens
  misc_feature 622, 623, 624, 625, 626, 627, 628, 629, 630, 631, 632, 633,634, 635, 636, 637, 638, 639, 640, 641, 642, 643, 644, 645,646, 647, 648, 649, 650, 651, 652, 653, 654, 655, 656, 657,658, 659, 660, 661, 662, 663, 664, 665, 666, 667, 668: n = A,T,C or G
  misc_feature 669, 670, 671, 672, 673, 674, 675, 676, 677, 678, 679, 680,681, 682, 683, 684, 685, 686, 687, 688, 689, 690, 691, 692,693, 694, 695, 696, 697, 698, 699, 700, 701, 702, 703, 704,705, 706, 707, 708, 709, 710, 711, 712, 713, 714, 715: n = A,T,C or G
  misc_feature 716, 717, 718, 719, 720, 721: n = A,T,C or G
tgagacacaagtgtcgcttgaacccaagggggtggaggttgcagtgagacatgttcacaccactgcactccagcctgggtgacagagtgagactctgtctcaaaaaataaataaataaataaataaataaataaatataaataaataaaaaggttaagatggtaaattgtgttatgtatattttacaattatatgttttaaatggaaaaaaatcctgagaaacagaactattattttactatgcacccataaggggctgagaagctggaagggccatggaagccacagtggctgggagtcaggggacaaggttttattcccagctgtgtccccacccgagtggctttgggatatttacacgactgtaagactatgggatgcctggagcagaggggggtgctgggtgttggagagatggatgaactggcagacaggcgggtgacggaggcccccaggtggcatagcatctgctgaggtaccaggtggacggcacctggccagggtgagctcttagtaggtgcctggggagaatgtggagcccaggccatggccacgtcctcagcagccctgagagctgcgtgcaaaggccctgggatttctgcagcctcgcgggggagggggnnnnnnnnnnnnnnnnnnnnnnnnnnnnnnnnnnnnnnnnnnnnnnnnnnnnnnnnnnnnnnnnnnnnnnnnnnnnnnnnnnnnnnnnnnnnnnnnnnnncccaggctggagtgcagtggctcgactgtggctcactgcaacctccaacttccaggttcaagcagtcctcccatctcagcctcccaagtagctgaaactacaggcacgcacccagctaattttttttttgagatggggtcttgctatgttgtccagtctggtctcaaactcctgagctcaagtgatccacccccttcagcctcctaaagtgctgagattacaggcataagccaccacacccaacctttctgctgtgtttttaaacacaatgtctttatttccttcagtgaattcatcaaaatctcgggcagtttgcatctgctggagcagtgccgggcggtcggcagagccacagtatagagcagttacaagatttcctgccttgccgagtgaaatctatgccttccaattttttttaattaattaatttttaaaaaattagattggtacaaaagtaattgcagtttttgccattactttcaatggcaaaaacagcggttacttttgaaccaacctaatattatagagacagggtttcaccatcttacctaggttggtctcgaactcctaagctcaagtgatccacccacctcggcctcccaaagcgtggtgattataggcatgagccaccatgcccgcccctccccaccaatatatttttaaaactagttgagtgtgggccaagagttgtgggatctgtgtcaccaccaatcccgcctctaagctgctgggtgggtaatatgggaaaacagtaattgtagcaggactccagtggcagaagccatgcggataaactacaaaaagcagaagggacactggggatgctgacatctccattggttgagattacccttaaggtattgagcaactgtggccaggtccaggaagggcaaaaaaaaaacaaaaaacaaaaaacaaaaaggcaacacaagacaagaagccatcgagtctcttggctacaaccagccagtacacaagaaacagttcactgcggccaggcgtggtggctcatgtctgtaatcccagcactttgggaggctgaggcgggaggatcacctgaggtcaggagttcaagaccagcgtggccaacatggctaaccctgtctctactaaaaatataaaaaattagccaggcatgatggtgggcacttgtaatcccaactactcgggaggctgaagcaggagaatcgcttcaacccaggaagcgaaggttgtaagctgatatcgcgccattgcactctagcctgtgcgacaagagcaaaactctttcttgaaaaaaacaaaaaacaaaaaaacaaaacagttcactggagatgatcagccataagtaagatccctagggaccccactgcccggccaaagggcctcccgcccttgagaacacaacagtgtgcatattgtaaacaagagggccattgggtactagagtgtcctaactgtccccagtgggtagggaaagaaacttccccgtcaatcagcccaccagatgctacagtttgctaatagtgaccagaagtgatgggacttggggactcctctatgatctgggaacccctagatcgggtaacaattgctgtgggagrgactcacgggttttctgacactagagccaaatttttgcctgtctcctttctaccgtgttcttcctaaaatttaggaaagggcttctgctgtatgggagagataaattttagctaaaattgttagttggacggagacagagttggaactgtcttttaagtagtgaatttcacctgacccatggctaaacctttaaaagttaaagctataggatcgttatttgtatctggtagtatgtacacgtccggttatatttggctatggtaccgaattggcttataaagaaatgagtactcataaactaagcaaataagaccaagtgcttttcaagttcacatgacagtaatcttttggtgaatggaactagtctaaaattgttggtttgatgggaatggtgtgccttctgaaatgtaacttaaaggttcttacttttttttttttttttttgagacggagtctcgctctgtcgcccaggctggagtgcagtggcgtgatctcggctcactgcaagctctgcctcccgggttcacgccattctccttcctcagcctcccgagtagctgggactacaggcgcctgccaccacgcccggctaattttttgtattttttttttttttttagtagagatggggtttcactgtgttagccaggatggtcttgatctcctgacctcgtgatctgcccacctcggcctcctaaagtgctgggattacaggcgtgagccacagcatccggccttaaaggttcttacttttatgatagttgcctgacatccagctatataaaggtaattaacagataaataatttgaaatgatgactagctttgtctaatatatcagttctcataagtaatcctggtaaactgctaaaaataaataaagtatgtaaaggtaaatgggataagtatctatcggctttttaatgtaatttgaaatcctctattaggtaatggatactcattaactatgtgagttatttccaaataagacaaaaactggaacaaattgctgaccataaatatgtttgccctgggtctcttaaatttaatataaagactaaatatgtttgggcctataaatacgtataaaaattatgctataggaaaacatgtttttctaacaattacaaaatggctcttccccataaaataccaatatgtgataggaagttcaagattttgtgcttcctatgttttcaacaaaatttaagggaactggatgggcactgtggctcatgcctgtaattccag

SEQ ID NO: 702366 - DNA, 3494 bp, Homo sapiens
gatctgccccccttggcctcccaaagtgttggggttacaggtgtgagccactgcacccagctgacaaagaagctcttgaacaaattcatttaatgagattctctagcactaaaatagtcctacctcattgtaatgttttgtagagtatcttataaaacaatgaaaaaaaaccagtattttaatacatatttttctgtatatttscttctagcctttgtacatatgatcacatatttgtaaaaagttgtatgtatatatatacaactttacccgctttgtgtgatgatatgacaaaaacatttatctgaaaaaagtatttttttcatcaaatggcagagctcctgtttctggtaacccggggtatggcaagtaggggctctgggagatggagcagctcagcctcctgtgaaaaattctgtttctctaaaaaagaacaaattctcatgctgggcgcggtggctcacgcctgtaatctcagcactttgggaggccgaggcgggcggatcacgaggtcaagagatcgagaccatcctggctaacacggtgaaaccccgtctctactaaaaatgcaaaaaattagccgggcgtggtggcgggcgcctgtggtcccagctactcaggaagctgaggcaggagaatggcgtgaacccgggaggtggagcttgcagtgagccgagatcgcgccactgcaccccagcttgggtgacagagccagactctgtctcaaaaaaaaaaaaacgaattcccaaaactagtcccactgttgtctacccagatccgggatccgggttgcccttggccggccagagatgcctctcaatcccccacggcacgcagagccagacagaaaccgaaagcagaggtgccctgcgctgaagtctagagatcccactgctaggtccaaagaatttaccctttcagtcaacccacggggcaaagtctactttcttccctgaaggagcagcgcagaacaaaagctccaggcagctgcttccgctgtttcgggggtagggcggagtgacagccccacgggccacgcagcaagcagaagatccccgggagtcaccctcaaccctctggggccacgtgggtgagttcgcccgggggaggtgccgcggcccactgctttaccttagtgagcctcaagaagttaggatcagaatcccagtcggccccatctgggtcgccagagttttgttacccacacaacgggtgggctcagttgcttggcgggtgttaactaaagaggatttaataggggattttatttcttgcaacaagtaaggaggacacctagacagctcccaaagcagtgtctccccgagctgagggctggggcaggttttataagcataaggtaatgaggcgtgatctgattgcatcttgcaatgaggtgatgctgggaggcatgatctaattggatgctgacacagggggaaccacagctctgacccctctctgggtctcagtttccccaactgcagtgaggaaattggccccagtgatgatgcccatgacatcaccatcctctgccctcactcatgctggggtctccatgtgcccattttcaagcttgtgcccgtccttttttcctcactccccacagctgcccttggccaggactttcacacggtggagccaaggcccagagagggcactgaatctctccaggtcacacagcctgtcagggaggtggggccagagccaggtcacacatgtgcacacaacacacacgcacacatgctcacgcacatgcacgcacacatgctctcaagcacatgcacacatgcacacacatgcacacacgctctcgcgcacacacgcacacatgtacacacacatgcatgcacacacgcacacaatactctcatgcacatgcacacacgtacacacgcacacatgcatgctgtcacacatgcgcgcgcacacgcacacatgctctcatgcacacacgcacacatgtacacatgcatgcacacatgcacacaatactctcatgcacatgcacacacatgtacacacgcacacacgcatgctgccacgtacacatgtgcgtgcacacacgcacacacatgctctcatgcacacgcacacatgtacagatgcacacatgcatgcacacacatgcacacacatgcacacacgcgcacacactgccaggactgggggctgctgtttctgagggctcctggaccccgttctgttccataaacactcactgaaatgcagaagctggaccccagccaagggaagtgaaactttccagcacccctactgctgttctccctaaacttgggggcccagcaccttgtggcaggaagcaccctggcccccagcagcccccaaaatagctaggtctgccacggaggcccttccttcctgagaggtaccacaccgagtcagcaggatcccagcctctgtgggggttgggggggccttccaacaaagaccatggcctgggactcataaagcagcatgggggtccctgagacccctaccccaagcaaggagggaacagacccaggccgacaggctcctctactgactccctctcccaccacctgccaaggactcagtcaagtcacccaacccctagagcttcagtccacacctgcaaaatggagccggtgacagctgcccccagggctgggccggatacaggagttgatggcatggcatggccccctaatggcagtctctgccctccctttgctgaggctccaggtgccaggaggagtggcccctggaggtccatagggagccggcccgcagggggctcagcctcacactccatccacccctcttgacaccctgtcaagatcccagctgccctgatgggagccaggatgacaaatcccctgtccccacaatcgccatgctctaagctcacgaagccttgggtgtggagggcaggagagcccaggccacacagagctgagtgtgatctggggcaacttccgagagggtgtaacttagagggtcctggccacccagagccccccaggctggtgggcctggcatctggagcagggctggactggcccggggagacccagtgtggtggtaaagaaggcccaggatcgatgcctgggggaggctccagctcagggtcccagcacctggcatccagcaggccctggcggagcagcttgcctcactccccagtgacttcggaactggcctcagctcctcccagcagacagctgagcctggtgggaggtagaggccccagggctgagtgcaggggacctcaccttcatccttccccactttgctcttgagaggcagcaggaggggatggagccacattggacgcactgagtgccacctacagccgcctctagggctctgtgcgccacctgcagcccgcctctagggctctgtgtgccgctgaacagtctgcccctagggttctgtgggccacctgcagcctgcctctagggcttgtgtgcctgcagacaattttctgagcctcagttttcacatctataaaa

SEQ ID NO: 702367 - DNA, 615 bp, Homo sapiens
tcatttgctcgttcattcaacaaatatttattaagcacgaactgtacaccacttgtgtaagtatacactggggacataatagsgtacaaaatcaagttcctcccctaagaagtttacattctagtggggaagggatattctaaatatgtcagtgtataaactccctagttgtatttgcattttaattatccctaactatgacatgaaaatctcaagccttcttttttcttttcttttttttttttttttttttttgagacagcgtctcgctctgtgcccaagctggagtgcagtggcgcggtctcggctcactgcaagctccgcctcccgggttcacgccattctcctgcctcagcctcccgagtagctgggactacaggcgcacaccaccacgcccgcctaattttttgtattttttttttttttagtagagacagggtttcaccgtgttagccaggatggtctcgatatcctgacctcgtgatccacccgcctcggcctcccaaagtgctgggattacaggcgtgacccaccgtgcacggcccaagccttcttgaggagtattttttaaaagatcaaggtatcaggaatcaagtaggggacaaattctggaat

SEQ ID NO: 702368 - DNA, 339 bp, Homo sapiens
aggtttcagtaagctgagattgccccactgcactccagcctgggggacagagtgagactctgtctcaaacaaaacaaaacaacaacaacaaaaaaaaamcccagtcattcaaagatttatgaataaccatttggaatttaatttggtgtagagaaattcaggtagagaaccaagacttttgcatttatgaattttattaataaatctttggaccatttggattttaatctggcataagaaattcaggtagggaaccaaatcaattcttatgaataaaaatcgaactcatggccgggcacagtggctcatgcctgtaatcctagcattttgggaggccaa

SEQ ID NO: 702369 - DNA, 3612 bp, Homo sapiens
ataatccaatgattaggacccgaaatcctgcatttcaaacatactcctaggtggtgccaaagatccacactttgagagtctacagcaaacttctcaaggattatggttatgtagagacactgatcctctcaatcctgagagtactttctgtcaccagaggaccaagagcagtttttcttctgctacataaaatgacagtggtatttttcttccttaatgttaagtgatatcaaaaaaggcaaagacatcactaacaagtatagttatccctagacaacaccttacaaatacattcccacttgaaagaaagctaaaatcaataaagctcaccaggcatggtggctcatgcccgtaatcccagcactgtgggagcctgaggagggcagatcaccagaggtcaggcgttcaagaccagcctggccaatatggtgaaaccccgtctctactaaaaatacaaaaattagccgggcacacacctgtaagtctctgctactcaggaggctgaggcaggagaatcacttgaacccaggaggtggaggttgcagtgagcccagattgcgccattgcactctggcctgagttacagagcaagactccatctcaaaaaaataaaataaaaataaaataaaatcaatagagctcaactaaagcaaattttggttcccaaatgtctagctgtttaaaattgtagtttttttgtatagtttggttctaactataattagaaatataatttttaaaaaatgttggttcttcaacccaaatgtccatcaatgatagactggattaagaaattgtggcacatatacaccatggaatactatgcagccataaaagaggatgagttcatgtcctttgcaggtacatggatgaagctggaagacatcattctcagcaaactatcacaaggacagaaaaccaaacaccacatgtcctcactcatagatgcatagatgggaaatgaacaatgagatcaactggacacagggcggggaatatcacacactgtggcctgctggtgggtgggggacttcgggagggatagcattaggagaaatacctaatgtaaatgatgaattgatggatgcagcaaaccaacacggcacatgtatacctatgtatcaaaactgcacgttgtgctcgtgtaccctagaacttaaagtataatttaaaaaaaaaatagttggttcttgatggcttgctattttccaaatgaaacactgatgaagattaaagggctaaagagtctaagccactttgggacttaaagggctgaagagtcaaagtcactgcagcagacctcaaaatattgctgtgaattggtctgctgttcactgactcaaaagtacaattcctaagagttgaaaataagacagctgaatatttggcaggtatggagaagggttagtgagaatgcaaccaggcatatgtgagcaaaaactataaccacagggagtttttaaacaaagagctatttcagtagttaaatctaacactacagagctccagcaaacaaatggattctctaaacagcaggagggttatgctgttgctcatctgtttgaaacatgatcccaaacaccagaaaaagttgccttaaaatacctttcccccattgtttctactaaattactctttatttacagagttatacatttccactaagttatactgttacctatttctttttttttttttgagtctaatttttttttttttttttgagtctcactctgttgcccaggctggagtgcagtggtgcgatctcggctcactgcaagctctgtctcccaggttcatgccattctcctgcctcagcctgagtaggtgggactacaggcgcccacgaccaggcccagctcatttttttgtatttttagtagagagggggtttcatcgagttagccaggatggtctctttctcctgatcttgtgatccgcccgccttggcctccaagagtgctgggattacaggcttgagccaccgcacccggccctactgttacctatttctacaaaagaagatttacataaaaaatattcctcctaatgcccaatactataatactataactactaaactattatcatcaaatttcaatttgagaacaacaaaaagacttaggcagacagatacaagggtagcaataaaagaaaatttgactaggcaaggtagctcatgcytataatcccagcactttgggagtctgaggcgggcagttcgcttgagcccaggagttggagaccagcctgggaaacatggcaaaacttcgtctctacgcatgtggcaccggtgcccacctaaggtcagagacatcagagacatgtgacacactaagactggaccccataggaggatgctctgggggatcctgtggacctcagcctccccaaagaggatgctcttgcagaggttctgaggtctagaagttctgagccctcctcagaattctcccgcagttgtaacgctgcttggccccaaaattgtttggaatctggagcttactgtttaatgggaaaatgggatggcgttgcatgtatccaggcttttgtgctgcggttctaagcagggggcctgattaatgtgacgttctcctttggtactgtttggccccagtgctcttcagagtctggggaggtttggcctttaataatcaaactgccatggagactgctttacccaaaattttggttcacagccttcattggattatctattggggcaaagtaaaactggcaagcttgtattgctacctcatggctaaggttccaagcaattggatcttcgtttgtgtgtgtgtatagatgtctagatgtatttattcgtatgtacacttattgttacatgttgtgtctaccaaaattggcttataagtaagagtgctcataaattaagtctaagcaattttcaagttcacgtgacttagaagtataactctactaaacaaattagcttcaaaattataggtggaataaaaatagaaatgccttcagaattgtcagcatacattttgtctgaattttatgtttgtctttgctaggtatttttaaatgtcagtgttaattcgggcctgcctctcattctattcaaagtctcactgagataaatgcacatctgattgcttcctttggaaggactaatcagaaactcaaaagaatgtaaccgtttgtctcccacctacctatgatctgaaagcccccaagccccctccccacctcgaattgtcctgcctttctggaacgaaccaatgtttattttacatgtgttggttgatgtctcgtgtctcccttgttaaaagtaaaaattaagtacagcaaatgggataaatgttttaggtaaactttttgtgtaaattaaaatcttaaagttattttcgatgctcatttaatatctgggtcatcttcaactaagaaatggttgtgatatggggaaatatgtttctaaaattgtggaattgttcttatctataaatgcccatatctgatagttcaggatttcttgctttttagggtttcactaaagttttaggttactaaggataagaattttagttaacacgtaattctgtatacaaaatgtgccagaaaggattatgttattagtggaagaaa

SEQ ID NO: 702370 - DNA, 638 bp, Homo sapiens
tttgggtttttttgcccttagtaagtattatggtgaaacatattgtgtgtaggccaattattaattaaacaactttatagaaacctgctatgggtcaagccatgtgttcttcactagaggtaagaatgaatagacacttttcatataaaatgacttgtgctatgattggatgaagtacatggtattactagagcagataggaaaggcaattaatccagactagaatcctctgcgatgatttatttttttcaaaataattttgcctatttttcttgcataaagttatcagccaaaaatacatttaatgatgaaagagggctctactttataactatatgagacaataggcataacaggggcgtacagacaggtgtggactctctatttcatcctcaacatgktaggtgtggagattttgcatatatttaaaaacgttaggaagcatgcatggccctaacgctgctctcacattcaagaagctgacatatccacaaatctggcagggacttctctgtgctacctccatctagaaagccctagagaaaatgtaaaatgacaagattcagtatgttgacattatgttttaaatcacactgtatggcttagacattaaggagtttactacaaaaatttttgtg

SEQ ID NO: 702371 - DNA, 638 bp, Homo sapiens
tttgggtttttttgcccttagtaagtattatggtgaaacatattgtgtgtaggccaattattaattaaacaactttatagaaacctgctatgggtcaagccatgtgttcttcactagaggtaagaatgaatagacacttttcatataaaatgacttgtgctatgattggatgaagtacatggtattactagagcagataggaaaggcaattaatccagactagaatcctctgcgatgatttatttttttcaaaataattttgcctatttttcttgcataaagttatcagccaaaaatacatttaatgatgaaagagggctctactttataactatatgagacaataggcataacaggggcgtacagacaggtgtggactctctatttcatcctcaacatggtaggtgtgkagattttgcatatatttaaaaacgttaggaagcatgcatggccctaacgctgctctcacattcaagaagctgacatatccacaaatctggcagggacttctctgtgctacctccatctagaaagccctagagaaaatgtaaaatgacaagattcagtatgttgacattatgttttaaatcacactgtatggcttagacattaaggagtttactacaaaaatttttgtg

SEQ ID NO: 702372 - DNA, 2172 bp, Homo sapiens
gagcgttccctctggacatatggtaccatctgtgtactgcttcagtattcttaaatgttgacatccactcactaggatctaaacacaatttaaatacacagtgatttaaccactgaatgagaattgtctttactctagctaagttaggtgctaaagccccattttcatcctacttcttcccagaaatattcctaagtcattgcaacttctgaacagagacagcaattttaggaagcaagttaggatgaattaaagagccaggaaaagtataccattggcagtagtgatcagctcagtagcatcaggggtacctaactttagaaaaatcacattgtatttgagtagcccagcaatttattactcagtgaggcagctagtaagagagaatgytacctgcccacgggggctttaaaagaccatgcagtgcataatctctccatgagctctggccttgccagccctgatccttcttccattacacacacatcaaacaagcctgtggttatttatttccccttcaaggttctctttaatgctcattttaactgattctctctctgaatcttgataaagatagaagatggaggctgcaaaagggaaaaggaaagtgagattcaagttgtattcacaactctcagataaatagtcctgaggcagaagaagcggcctactggtaataattgtacaattcaattaatctttactccctgtcaacaagtatcttctagatgaccaaaaactgactatgagaccagtgatgcccactgtattagtcaggatcctccagagaaacagaaccaatgggatgtgtacatatgtagaaagagatttattataaggaattggctcccacaattatggaaactggcaagtgcaaatatgcagtgtgacctgtcgggctcgagacacagccagccaatggtatagttccagtctaaaggtcaacaggcagagaaccagaacaggcaatagtacagatggagtttaaaggccagcaggaaatcatccgggagagctaatggtgctgataaaatctaaagacagtctgctgtagaattctctcttgcggggagaggcaggtctttttgttctattcaggtcttcaactgattagatgaggcctacccacatgatggagggcagtctgctttactcaggtccactgactttaatgttaatttcattcaaaaacactcacagaatatccagaataatgtttgaccaactatctgaacattctgtgacccagccaagttgacacataaaatgaaccatcatgcccccctaattttgacatacccatgtctccattatctctccaggcatatcactaaactctccacacaaaccaaaatctattcatgtaaagttttaaaactgcttgccatatagcatacatgtaaagaactagaaaaggtattttataagacccaacaaaaatgaggagtatgaaatatttttaaagattgatgcctacattttaaaaaattaatatgacatacatcaaatcaaagatcttctatttcttcattgtttgttcttatttaaaatagctcatcatttctaaaatagtattctttaaagttgaaatatcaatattggtatctgtgaatctgggaagaatttatttagaaacctgtttcataattatttagaatttacttagaaatctaattccagttgcaaaacaacaaattaaaaaaaaaactctgagaaagtaccttttcatatctcaatttctttatctgataaaatcagtttctctcatatagttaaatttcaaaaggtttattttcataggataaaacaatgaaagaagcaacatttatcaatttagaaaatagtattaattaaaatttgctacagatgttcacatactgggattacattgccttttactgtagacaaaagtaggatataaaagaaagttaaaggaggtatctatttttccaatgaaagttttttaaaaagaaccaaatatccaatacttcacttatccttcttaatctaattttataacaagcccatactcagcagatggctagtttactatctgatgataaagttttgaagaatacatttgttaactcttcaagtcctctaaggcaattgttccaagctgactgaatattagaaattaattggaaggcttttgaaaactgaacattccca

SEQ ID NO: 702373 - DNA, 2172 bp, Homo sapiens
gagcgttccctctggacatatggtaccatctgtgtactgcttcagtattcttaaatgttgacatccactcactaggatctaaacacaatttaaatacacagtgatttaaccactgaatgagaattgtctttactctagctaagttaggtgctaaagccccattttcatcctacttcttcccagaaatattcctaagtcattgcaacttctgaacagagacagcaattttaggaagcaagttaggatgaattaaagagccaggaaaagtataccattggcagtagtgatcagctcagtagcatcaggggtacctaactttagaaaaatcacattgtatttgagtagcccagcaatttattactcagtgaggcagctagtaagagagaatgctacctgcccackggggctttaaaagaccatgcagtgcataatctctccatgagctctggccttgccagccctgatccttcttccattacacacacatcaaacaagcctgtggttatttatttccccttcaaggttctctttaatgctcattttaactgattctctctctgaatcttgataaagatagaagatggaggctgcaaaagggaaaaggaaagtgagattcaagttgtattcacaactctcagataaatagtcctgaggcagaagaagcggcctactggtaataattgtacaattcaattaatctttactccctgtcaacaagtatcttctagatgaccaaaaactgactatgagaccagtgatgcccactgtattagtcaggatcctccagagaaacagaaccaatgggatgtgtacatatgtagaaagagatttattataaggaattggctcccacaattatggaaactggcaagtgcaaatatgcagtgtgacctgtcgggctcgagacacagccagccaatggtatagttccagtctaaaggtcaacaggcagagaaccagaacaggcaatagtacagatggagtttaaaggccagcaggaaatcatccgggagagctaatggtgctgataaaatctaaagacagtctgctgtagaattctctcttgcggggagaggcaggtctttttgttctattcaggtcttcaactgattagatgaggcctacccacatgatggagggcagtctgctttactcaggtccactgactttaatgttaatttcattcaaaaacactcacagaatatccagaataatgtttgaccaactatctgaacattctgtgacccagccaagttgacacataaaatgaaccatcatgcccccctaattttgacatacccatgtctccattatctctccaggcatatcactaaactctccacacaaaccaaaatctattcatgtaaagttttaaaactgcttgccatatagcatacatgtaaagaactagaaaaggtattttataagacccaacaaaaatgaggagtatgaaatatttttaaagattgatgcctacattttaaaaaattaatatgacatacatcaaatcaaagatcttctatttcttcattgtttgttcttatttaaaatagctcatcatttctaaaatagtattctttaaagttgaaatatcaatattggtatctgtgaatctgggaagaatttatttagaaacctgtttcataattatttagaatttacttagaaatctaattccagttgcaaaacaacaaattaaaaaaaaaactctgagaaagtaccttttcatatctcaatttctttatctgataaaatcagtttctctcatatagttaaatttcaaaaggtttattttcataggataaaacaatgaaagaagcaacatttatcaatttagaaaatagtattaattaaaatttgctacagatgttcacatactgggattacattgccttttactgtagacaaaagtaggatataaaagaaagttaaaggaggtatctatttttccaatgaaagttttttaaaaagaaccaaatatccaatacttcacttatccttcttaatctaattttataacaagcccatactcagcagatggctagtttactatctgatgataaagttttgaagaatacatttgttaactcttcaagtcctctaaggcaattgttccaagctgactgaatattagaaattaattggaaggcttttgaaaactgaacattccca

SEQ ID NO: 702374 - DNA, 2172 bp, Homo sapiens
gagcgttccctctggacatatggtaccatctgtgtactgcttcagtattcttaaatgttgacatccactcactaggatctaaacacaatttaaatacacagtgatttaaccactgaatgagaattgtctttactctagctaagttaggtgctaaagccccattttcatcctacttcttcccagaaatattcctaagtcattgcaacttctgaacagagacagcaattttaggaagcaagttaggatgaattaaagagccaggaaaagtataccattggcagtagtgatcagctcagtagcatcaggggtacctaactttagaaaaatcacattgtatttgagtagcccagcaatttattactcagtgaggcagctagtaagagagaatgctacctgcccacgggggctttaaaagaccatgcagtgcataatctctccatgagctctggccttgccagccctgatccttcttccattacacacacatcaaacaagcctgtggttatttatttccccttcaaggttctctttaatgctcattttaactgattctctctctgaatctkgataaagatagaagatggaggctgcaaaagggaaaaggaaagtgagattcaagttgtattcacaactctcagataaatagtcctgaggcagaagaagcggcctactggtaataattgtacaattcaattaatctttactccctgtcaacaagtatcttctagatgaccaaaaactgactatgagaccagtgatgcccactgtattagtcaggatcctccagagaaacagaaccaatgggatgtgtacatatgtagaaagagatttattataaggaattggctcccacaattatggaaactggcaagtgcaaatatgcagtgtgacctgtcgggctcgagacacagccagccaatggtatagttccagtctaaaggtcaacaggcagagaaccagaacaggcaatagtacagatggagtttaaaggccagcaggaaatcatccgggagagctaatggtgctgataaaatctaaagacagtctgctgtagaattctctcttgcggggagaggcaggtctttttgttctattcaggtcttcaactgattagatgaggcctacccacatgatggagggcagtctgctttactcaggtccactgactttaatgttaatttcattcaaaaacactcacagaatatccagaataatgtttgaccaactatctgaacattctgtgacccagccaagttgacacataaaatgaaccatcatgcccccctaattttgacatacccatgtctccattatctctccaggcatatcactaaactctccacacaaaccaaaatctattcatgtaaagttttaaaactgcttgccatatagcatacatgtaaagaactagaaaaggtattttataagacccaacaaaaatgaggagtatgaaatatttttaaagattgatgcctacattttaaaaaattaatatgacatacatcaaatcaaagatcttctatttcttcattgtttgttcttatttaaaatagctcatcatttctaaaatagtattctttaaagttgaaatatcaatattggtatctgtgaatctgggaagaatttatttagaaacctgtttcataattatttagaatttacttagaaatctaattccagttgcaaaacaacaaattaaaaaaaaaactctgagaaagtaccttttcatatctcaatttctttatctgataaaatcagtttctctcatatagttaaatttcaaaaggtttattttcataggataaaacaatgaaagaagcaacatttatcaatttagaaaatagtattaattaaaatttgctacagatgttcacatactgggattacattgccttttactgtagacaaaagtaggatataaaagaaagttaaaggaggtatctatttttccaatgaaagttttttaaaaagaaccaaatatccaatacttcacttatccttcttaatctaattttataacaagcccatactcagcagatggctagtttactatctgatgataaagttttgaagaatacatttgttaactcttcaagtcctctaaggcaattgttccaagctgactgaatattagaaattaattggaaggcttttgaaaactgaacattccca

SEQ ID NO: 702375 - DNA, 2172 bp, Homo sapiens
gagcgttccctctggacatatggtaccatctgtgtactgcttcagtattcttaaatgttgacatccactcactaggatctaaacacaatttaaatacacagtgatttaaccactgaatgagaattgtctttactctagctaagttaggtgctaaagccccattttcatcctacttcttcccagaaatattcctaagtcattgcaacttctgaacagagacagcaattttaggaagcaagttaggatgaattaaagagccaggaaaagtataccattggcagtagtgatcagctcagtagcatcaggggtacctaactttagaaaaatcacattgtatttgagtagcccagcaatttattactcagtgaggcagctagtaagagagaatgctacctgcccacgggggctttaaaagaccatgcagtgcataatctctccatgagctctggccttgccagccctgatccttcttccattacacacacatcaaacaagcctgtggttatttatttccccttcaaggttctctttaatgctcattttaactgattctctctctgaatcttgataaagatagaagatggaggctgcaaaagggaaaaggaaagtgagattcaagttgtattcacaactctcagataaatagtcctgaggcagaagaagcggcctactggtaataattgtacaattcaattaatctttactccctgtcaacaagtatcttctagatgaccaaaaactgactatgagaccagtgatgcccactgtattagtcaggatcctccagagaaacagaaccaatgggatgtgtacatatgtagaaagagatttattataaggaattggctcccacaattatggaaactggcaagtgcaaatatgcagtgtgacctgtcgggctcgagacacagccagccaatggtatagttccagtctaaaggtcaacaggcagagaaccagaacaggcaatagtacagatggagtttaaaggccagcaggaaatcatccgggagagctaatggtgctgataaaatctaaagasagtctgctgtagaattctctcttgcggggagaggcaggtctttttgttctattcaggtcttcaactgattagatgaggcctacccacatgatggagggcagtctgctttactcaggtccactgactttaatgttaatttcattcaaaaacactcacagaatatccagaataatgtttgaccaactatctgaacattctgtgacccagccaagttgacacataaaatgaaccatcatgcccccctaattttgacatacccatgtctccattatctctccaggcatatcactaaactctccacacaaaccaaaatctattcatgtaaagttttaaaactgcttgccatatagcatacatgtaaagaactagaaaaggtattttataagacccaacaaaaatgaggagtatgaaatatttttaaagattgatgcctacattttaaaaaattaatatgacatacatcaaatcaaagatcttctatttcttcattgtttgttcttatttaaaatagctcatcatttctaaaatagtattctttaaagttgaaatatcaatattggtatctgtgaatctgggaagaatttatttagaaacctgtttcataattatttagaatttacttagaaatctaattccagttgcaaaacaacaaattaaaaaaaaaactctgagaaagtaccttttcatatctcaatttctttatctgataaaatcagtttctctcatatagttaaatttcaaaaggtttattttcataggataaaacaatgaaagaagcaacatttatcaatttagaaaatagtattaattaaaatttgctacagatgttcacatactgggattacattgccttttactgtagacaaaagtaggatataaaagaaagttaaaggaggtatctatttttccaatgaaagttttttaaaaagaaccaaatatccaatacttcacttatccttcttaatctaattttataacaagcccatactcagcagatggctagtttactatctgatgataaagttttgaagaatacatttgttaactcttcaagtcctctaaggcaattgttccaagctgactgaatattagaaattaattggaaggcttttgaaaactgaacattccca

SEQ ID NO: 702376 - DNA, 1952 bp, Homo sapiens
tgttatattgattcctcctcttgcttactgcctgctgacttctgagatgatagtttccttccccattctcagtatatccctaattcatccttcattgagcatcttttatcataaagctgtattctctttgtattaatatccttaccgtgtttcacagggcagaaacagctgggcttataaacaggcatagtccttttgaaggatgtggttgatcctacaacaacacactttcctaaggatgacaacaactcaccccacccctagaatggctggtatgaaccgagtttccacacagtctagctggcaatggggtcaggagacgttttgctacttcacatcttttggtcactggtaaatattaaggtactttgttttctgttttgtgaactctctctctctctctctcgatatgtcttctgaccatttgtttctatttctgcatttactgggtctaaacactgtacagaggttaaaaacaacactccaatgggcgtttcccaagagggtggggttcagtttctgaactcacttgtaggtgtgtatttctttcatatccaatttcccattttcctctgcctctgatacctgcctctccttttctgcatgctcacattctttcatgcttagtttcctcagattagaagggagagaaatgcacacacatgatccaccagcccgtgtgggattccctctgcccttctggcatctgaaggctgtgattcaaagatcccccctgcaaccttcccacaaatgaaccaactgattctcacaaccgaagggagaattgacacctcccattgagggacaaaaaaaaagtcacactctggcctgctggcaagtcacctgtcatttccagctcatcttcatagttccatagttagtcctattctttagtaaatataaagactattaaaagcttctatgaggtgcactatgtgtgtctctggggtcagtcttgtgcttgacacagcgaaagctcattttagttcagtgtgaaaaaccagacctcaccaattcatcacaactaactccatcggaagcagaggattgctcctcatctgactcctcctgtgtgagacctgattctcagtcagaggctgatgccggaactgagaccatcagccatagagagatccttccagaatatggtgtcattaaccccgcagttcactactgcactttgccatgattcaggactggaactcttgtgatcgactttaaagatcctggttgagagaaaaggcaatctgaatgctgggcacatctattgaattacaaatgattggaatggctcctaagtcagggtgttatgtcctgaaaataggtgacaacggcaaaccatccaccctggtgttgactgactttaacaaggttcagttcacagagattgagggcagaaaaaggaaatggcctaaagagggtaagtttgctgtgttgccctcacaccacttgattcatggtcctgatcctaaggatctcacctgatacttggttttataggaaggatgtgtaaaattcccagaacgctaggaaacagggackaaaacacttcaaagagaaagttaatgaacttgtttctgaccacagggcatccttcagcacatgctgtctggagtggcctcaaacaaggagtgtgtggtgaggtgctgagaatgcaatgggagcagggtcctgtccccacgctaaagaagctcacagtttaatgcaaatgagaagccagtgaggacatcactactcctgctgtgcacttgggaactagaaacacaaaacctgactctggagggaagctaaggaagcattctactcttgagttgacataagtgcatctgaagcttctgatctccgatgagaacaatgggggacaccaaacagaatataaaacccatgattgaatacatcaaattgctaacatggcagtaaacagacatgaggtgaagatggagaagaaggaa

SEQ ID NO: 702377 - DNA, 585 bp, Homo sapiens
tctagatggtattagaatcatttacatatagtttttacctcctctcccagccttactaaggaagcacactgacggcaggtttgagaactaaatatccttatatcctcttttaggtgaggagtccaaagtgtttacagtcacgtgagatagcatattttgatttactcgctgtatgtcagtgttggctctatgtacatgagatcaacacatctctctaacacaatcagaaaaaaaaatagatcagttcatatgaaccaaatatccaaatcaaatgattactttcttcctacttttcaaccccttgcattgccaccaatgccttttatttatttrtttgtttatttttatttttttgagacagagtctcactctgtcacccaggctggagtgcaatggcatgatctcggctcactgcaatctgcacctcctgtgttcaagtgattctcctgcctcagcctcctgagcagctgagattacaggcgcatgccaccacgcccggctaatttttgtatttttagtaaagatgtggtttcaccatgttggtcaggctggtctcgaactcctgacctcatgatccgcctgcct

SEQ ID NO: 702378 - DNA, 585 bp, Homo sapiens
tctagatggtattagaatcatttacatatagtttttacctcctctcccagccttactaaggaagcacactgacggcaggtttgagaactaaatatccttatatcctcttttaggtgaggagtccaaagtgtttacagtcacgtgagatagcatattttgatttactcgctgtatgtcagtgttggctctatgtacatgagatcaacacatctctctaacacaatcagaaaaaaaaatagatcagttcatatgaaccaaatatccaaatcaaatgattactttcttcctacttttcaaccccttgcattgccaccaatgccttttatttatttatttgtttatttttatttttttgagacagagtctcactctgtcacccaggctggagtgcaatggcrtgatctcggctcactgcaatctgcacctcctgtgttcaagtgattctcctgcctcagcctcctgagcagctgagattacaggcgcatgccaccacgcccggctaatttttgtatttttagtaaagatgtggtttcaccatgttggtcaggctggtctcgaactcctgacctcatgatccgcctgcct

SEQ ID NO: 702379 - DNA, 632 bp, Homo sapiens
gagatgaagttctacatgagaccttctattattctcttacctcttttccattttcctttgaataacttgtcacggtttgtgtttataagcttgtttgctttacttgtttactctctgctccwttccgcattttagccccttcctctcctcgtcccccaccttcatctccacccaccattgtaaggtccatgagggcagggactgtgtctattttgatcttctatccccagagcctagcatgatgcctggcacatagtagaggctcaataaatgcttgttggaaaagtggctggttgaatgaacaccataatgaggaaagtcatgcagtggctccctggctttttgcatacattactgaggctctccagagagtcttgctggggttactgatttattgtaacagaggaacaagaagaataagaaggcctcttaacagatgtcacgtaggacacgaacattgctctgataggccagctgtcattccactgattttatgtcagttgctctctcttttgtgttgtgtcacacatcagccccaactaaaaggaaaggctacaggctgggatttgaaagataatttaatgaagggattatttatagaggtgtgggcaagagcagaagaaccagatggg

SEQ ID NO: 702380 - DNA, 585 bp, Homo sapiens
taattttttcttgaacaaatcaatagagtttcatctacctgatgtaaatatattgaactgacaaatacttttttctctatttgtagaatctaccagaagccatttactttttctagcaaaaacagaggtaaaccttccttctcttgcctcttgtcaactcttttgctttctttcatgatgtagttttagaaattataattgcttggacgtacaacaaaataaaatgctgatctattatattgaaaactgattgaacatcatgaatcttgatatgtctggcagataattagagattaatcattttatcatcaccaccttggtgaaatttctaagagatttcatttttggaatcactccctacaaaatgaagtgcaagttgttgtgccatgactaccactatattgctcctatcattataaatcactgtcaaaacctcactcaatgaggttatttggatgttaraggcacatttgagtgtgttgctctgacccacttactgaataacaaaaatgactgccagcaggactaagggagtgcctcagtgagaaccttggcaaatcctcttaccaaaaacaaatgtaaaat

SEQ ID NO: 702381 - DNA, 589 bp, Homo sapiens
ctttatttctttctgaacaaagcttccccttacaagcaatttattagcatgttatcattaacttcgtaaatgactgatgtggttaaaaactctgcgcctggcttcaaggtaatttctatattaataaacccaaatctcaactccacttgagggcagagattcctttcaagtcaaatttattttatacataagaatctcattctcatcaattttgtatttagaacattctcctccaaaaggagaaaaaaaactgaatatcttaatttgtgatgtagcttcaagatattccgaagtactttgctaaacagyttgtctatatttcctatttaaatagaatgtattttataaacaatgcaaaaacatcagtttggtgaactcaaaaccatctatcaaacaaataacttaccacaatctagggcaagaggtcatctgtctgcttgttttgtgttgggttggcatttatgtgttctgacatatgaccagaacctaaactgcttttcccctttttgctctattttttatttaataattacatatgaaatagaagcttattttcagaaaggaaatggactcagcgaagtcactttat

SEQ ID NO: 702382 - DNA, 631 bp, Homo sapiens
ccagcaaaatgataatgattggggctgagtcgcttcactctcagacatgtgaaaaaacaaacagaaactatcactttcagatgcttctctacatactgtctgttctttgctctgagtctccaaaattagagcaagaaacacaaaaaaattatccaaataatgtccattataaatatgtttgccttcacattgtagttttatagcattgaatatttctgttggcagttatattaaacrttccctatattccaggctaccacttattttatctgtttattttagctagagcaagttcaggcctacaatagcacactcagcattttggctctatatcatttgcaaacaagatgcaaacctggcagcttagggcttgacattttgcatacatgcaacagtacctcctcttagcatcatcatatgtctggcatgatcttatatttccactggtctcagactgcaaacaacaggagggaaaaacccagcagaaaagaggaagacaatacaagatgacttggaagtcattttgctccatcttcaccatgggagttaattgtaaagaaacatttttctaaagggtgccatcagtaggtctacaactacaggaacgaattacatagtagagtattttgca

SEQ ID NO: 702383 - DNA, 621 bp, Homo sapiens
tgactctatagtaacttgaaatactttttaagtttttcccaaatttacatgatgtctgtctttttttatatataacttaacattctgaatactaatattttcttcatgcaactatgtaaggaaatactgcacttcaggtccagtggggaatttatcctgtatgcctgggtttttataaccctgcttgacacatggtagccccccaaataagtgtggaataagtgattagaatatcacttatmccatcgtccttttcaaaatataccttatgatttcatggattttgtcaaataaattgtggaaacttttgataaggtctatgatacgtgtgtaactttatttctttcagaggtatcataaaatgtataataaatgcttgtcggtcgcaaagattctcattattgaaataactcaagccttcttattgatttaaagcaagtttagaccagtctcatttcattttcaatcttaaggctgataaaattatttccaaataatttccagttgaggtggccatcattgctgttggcttcgtctgtttttatgtcacctatatctgttatctgactaagtgtgttatgtgctcattatacatacaatgagcttttattatacatgctc

SEQ ID NO: 702384 - DNA, 621 bp, Homo sapiens
tgactctatagtaacttgaaatactttttaagtttttcccaaatttacatgatgtctgtctttttttatatataacttaacattctgaatactaatattttcttcatgcaactatgtaaggaaatactgcacttcaggtccagtggggaatttatcctgtatgcctgggtttttataaccctgcttgacacatggtagccccccaaataagtgtggaataagtgattagaatatcacttataccatcgtccttttcaaaatataccttatgatttcatggattttgtcaaataaattgtggaaacttttgataaggtctatgatacgtgtgtaactttatttctttcagaggtatcataaaatgtayaataaatgcttgtcggtcgcaaagattctcattattgaaataactcaagccttcttattgatttaaagcaagtttagaccagtctcatttcattttcaatcttaaggctgataaaattatttccaaataatttccagttgaggtggccatcattgctgttggcttcgtctgtttttatgtcacctatatctgttatctgactaagtgtgttatgtgctcattatacatacaatgagcttttattatacatgctc

SEQ ID NO: 702385 - DNA, 621 bp, Homo sapiens
tgactctatagtaacttgaaatactttttaagtttttcccaaatttacatgatgtctgtctttttttatatataacttaacattctgaatactaatattttcttcatgcaactatgtaaggaaatactgcacttcaggtccagtggggaatttatcctgtatgcctgggtttttataaccctgcttgacacatggtagccccccaaataagtgtggaataagtgattagaatatcacttataccatcgtccttttcaaaatataccttatgatttcatggattttgtcaaataaattgtggaaacttttgataaggtctatgatacgtgtgtaactttatttctttcagaggtatcataaaatgtataataaatgcttgtcggtcgcaaagattctcattattgaaataactcaagccttcttattgatttaaagcaagtttagaccagtctcatttcattttcaatcttaaggctgataaaattatttccaaataatttccagttgaggtrgccatcattgctgttggcttcgtctgtttttatgtcacctatatctgttatctgactaagtgtgttatgtgctcattatacatacaatgagcttttattatacatgctc

SEQ ID NO: 702386 - DNA, 621 bp, Homo sapiens
tgactctatagtaacttgaaatactttttaagtttttcccaaatttacatgatgtctgtctttttttatatataacttaacattctgaatactaatattttcttcatgcaactatgtaaggaaatactgcacttcaggtccagtggggaatttatcctgtatgcctgggtttttataaccctgcttgacacatggtagccccccaaataagtgtggaataagtgattagaatatcacttataccatcgtccttttcaaaatataccttatgatttcatggattttgtcaaataaattgtggaaacttttgataaggtctatgatacgtgtgtaactttatttctttcagaggtatcataaaatgtataataaatgcttgtcggtcgcaaagattctcattattgaaataactcaagccttcttattgatttaaagcaagtttagaccagtctcatttcattttcaatcttaaggctgataaaattatttccaaataatttccagttgaggtggccatcattgctgttggcttcgtctgtttttatgtcayctatatctgttatctgactaagtgtgttatgtgctcattatacatacaatgagcttttattatacatgctc

SEQ ID NO: 702387 - DNA, 1473 bp, Homo sapiens
ggggcgggtctttcctgtggtgttctcgtgatagtaaatgaatctcagaagatacgatggttttaaaaatgggagtttccctgtacaagctctctttggctgctgccatccatgtaagatgtgacttgcttctcctcgccttccaccatgattgtgaggcctccccagccatgtggaactgtaagcccaataaacctctttcttttgtaaattgcccagtcccagatatgtttttatcagcagtgcgaaagcagactaatacagatatatttaggtgtgtttgaattttaactttcaatctataaagacacattaaatagatgctatttgaatattaaacaaattggtaagtgctgttaagacgagaagagtgtaggagatcttttcttayctacgttcataaatgagaaattttatcggagctaaagataagctaattatttaccttggctaacatagaatgtttttatgtttttaatacctaatacaattcttttccttttgatttttgtgccaataatatataagatttataatctctcccactcatatgtatttaaatttttatttcactggattcaatttaatgtgctcctaaatttcatcttttatataattttcttgccagagtttgagtattttctgtcatcacaaggctgagtcattacaatggaagtgtttgaatgaagatgaatagaggtgaaggtcactggaggtgagcaccacaatccattgctaaattaaacatggcctttatagtcaaggaccttattaactaatgagggctatggagaaagaatcagataattaaagcagaatgcacttagtattgatggggagaattagagggcactattgaaacatacagtaggggcatgtaaatcagacaggagttacatggaatgaaagtgtaagagacctgtaagaattatctaggaaaggaattgggggaaagagtgctccaaaaagaaagaataatattcataaatatatggagaggggagacctgtaagaattatctaggaaaggagttgggggaaagagcgctccaagaagaaagaataatattcataaatatatggagaggggagacagcctggtgcatgttggaaatgccaggcatttccatactgatggaggataaataactcagtctctgaatctgggattggtttcggaccgtcttcggcaaatttttggacctttgccccagcaacagtgtggtttgggaaaatggggcataaaacgaaagaaatagatgggggtaatttgtttgtgtcatatctgttgcttagagatggatcttgctatttgggttcttctcacttcactctgaatgtttttttttttttcttgcttttggctaacacccatgtctcccctttataccaaataccagcattacccagaacatggaatgcgacattctgtcttttccctgatttgagaggcaaattatttgagcagctcagg

SEQ ID NO: 702388 - DNA, 593 bp, Homo sapiens
tattactttattacgttggctacgcagaaagacagaaaaacagtaagttcatatctgtggaaggtctgacacagaaaagcttttattgtgtcaccataaaaattataaaatggccagggagtaagaggcatagcaaagtagagaatggaaggaggccagcaggtccatttaagatcatattcatcattaaattacttgtaacaccacctaatattctttcttggaaacacttatcaaattctatttcaaaactacttgctcttgttacttatactgtgaccctaccaacgttttcctcaagccactwaatattctctacataaagaaattactttggtttattttgcaaaggcatatttggtgttcatcattttctacatgcagccagtaaccctgtgaacttctgtttgacactaaatcagctttgccacatatcttctttttacattctaaatgcattctcttttaaagctacttattcctaagaatcataaatttattcaatggagtatatgtagtttgtactagttttacgttacttgcattcatctctttcctcttatcaatgtgataatgtgattttaaccaatgaa

SEQ ID NO: 702389 - DNA, 593 bp, Homo sapiens
tattactttattacgttggctacgcagaaagacagaaaaacagtaagttcatatctgtggaaggtctgacacagaaaagcttttattgtgtcaccataaaaattataaaatggccagggagtaagaggcatagcaaagtagagaatggaaggaggccagcaggtccatttaagatcatattcatcattaaattacttgtaacaccacctaatattctttcttggaaacacttatcaaattctatttcaaaactacttgctcttgttacttatactgtgaccctaccaacgttttcctcaagccactaaatattctctacataaagaaattmctttggtttattttgcaaaggcatatttggtgttcatcattttctacatgcagccagtaaccctgtgaacttctgtttgacactaaatcagctttgccacatatcttctttttacattctaaatgcattctcttttaaagctacttattcctaagaatcataaatttattcaatggagtatatgtagtttgtactagttttacgttacttgcattcatctctttcctcttatcaatgtgataatgtgattttaaccaatgaa

SEQ ID NO: 702390 - DNA, 593 bp, Homo sapiens
tattactttattacgttggctacgcagaaagacagaaaaacagtaagttcatatctgtggaaggtctgacacagaaaagcttttattgtgtcaccataaaaattataaaatggccagggagtaagaggcatagcaaagtagagaatggaaggaggccagcaggtccatttaagatcatattcatcattaaattacttgtaacaccacctaatattctttcttggaaacacttatcaaattctatttcaaaactacttgctcttgttacttatactgtgaccctaccaacgttttcctcaagccactaaatattctctacataaagaaattactttggtttattttgcaaaggcatatttggtgttcatcattttctacatgcagccagtaaccctgtgaacttctgtttgacactaaatcagctttgccayatatcttctttttacattctaaatgcattctcttttaaagctacttattcctaagaatcataaatttattcaatggagtatatgtagtttgtactagttttacgttacttgcattcatctctttcctcttatcaatgtgataatgtgattttaaccaatgaa

SEQ ID NO: 702391 - DNA, 590 bp, Homo sapiens
cctcataaatgtatccatttttgtaacattattaccattgggttttctcccgttggccctattagggagactactgtgggcctcaggcctggcttagactatcacacatggcttccctccctaggagggggcataatagccgcttgctaaattcaggccttgcaaacggtatcgactctatgactgctctacaggtattggtgctgcctcatgttgatattgtaagcctcttagatttctatcaagyatagctggaaccacctcccttctggtagtcttcatggcactccccactgccgtaaaaccaatctagtatgggggcactgtccagctcaaattcaggttcacatagccatcgccacttggcagatccattggtgttctcaggagcacagtctggccacctgcttcaggagcatggcttggagtttcagaggtaaccctgagggtttgtcaggcctgttttaaaggccatgacaaaccttcatagggagtgatgccatgtgtggtagtaggtgacttattttaagtttgtatccctttagggagattcttagtccagggccttaaagagcactcctggaacagta

SEQ ID NO: 702392 - DNA, 660 bp, Homo sapiens
cgccattacacccagctgagattacaggcacacgccatcacacccagctaattttttatattttttgtacagatgaggtttcaccrtgttggccaggctgatcttgaactcctgacctcaggtgatctgccttcctcggtctcccaaagtgctgggattccaggcatgagccaccacacccgaccccacttcttatttgaatctaaactatgataactaactgtgggattaacatatacacaattgtaatggtaattcaaacaatccatgtatataaagcaggatgcctgttatgtcgaaactgcaatatgtaagttactgctgctagtatttttatttcagtgcattggttcagtattattttgacttaagagatatttatgggtgccaccatatttcaggcactgtggtaggaatggatacacaacacagcaaaaacaacaattgcctctcctgaaaattataggtgtcaaccaataattataaaccatgtgtgtaaatttacatttaaaatttatacgtaagggcaaaggaagcttttagtaattcatagattgtctttcaacgtatgctttccttgttcagagctaccatttttctagaagagaaccaaatctccctctcctggttttacacacacatacacatatgcttacacaa

SEQ ID NO: 702393 - DNA, 660 bp, Homo sapiens
cgccattacacccagctgagattacaggcacacgccatcacacccagctaattttttatattttttgtacagatgaggtttcaccatgttggccaggctgatcttgaactcctgacctcaggtgatctgccttcctcggtctcccaaagtgctgggattccaggcatgagccaccacacccgaccccacttcttatttgaatctaaactatgataactaactgtgggattaacatatacacamttgtaatggtaattcaaacaatccatgtatataaagcaggatgcctgttatgtcgaaactgcaatatgtaagttactgctgctagtatttttatttcagtgcattggttcagtattattttgacttaagagatatttatgggtgccaccatatttcaggcactgtggtaggaatggatacacaacacagcaaaaacaacaattgcctctcctgaaaattataggtgtcaaccaataattataaaccatgtgtgtaaatttacatttaaaatttatacgtaagggcaaaggaagcttttagtaattcatagattgtctttcaacgtatgctttccttgttcagagctaccatttttctagaagagaaccaaatctccctctcctggttttacacacacatacacatatgcttacacaa

SEQ ID NO: 702394 - DNA, 624 bp, Homo sapiens
atccctctgtcgcccaggctggagtgcagtggtgtcatctcagctcactgcaagctccgcctcccgggttcacgccattctcctacctcagcctcccgagtagctgggactacaggcaggcaccactacgcccaactgatttttgtattatttttttttagtagagacgggctttcaacatgtyggtcaggctggggttttattatcttataacacatacacagaaaagtaaacaaatctcaaaggcgtcccctgagggatttttacaaagtgaaggcagcagtgcacctaagatcacggtcaagatctagaacagcaccccagaagctcaggactctaccatctgctttctctcagttactactctcaaagctaaaccattatttgatttttgaagtgtatataaataaattcacatatgatacattattttgcatctgactttttttctcgtaatattatgtctctgatactccacaatgattttgcatagttcattaccattgcgcatggtagttccattcataaatacactacaatttatccattctactcctattgaagttttcagttcagttcagttggggctgtagtagtgtcacaaaaagccattcttctgcctcc

SEQ ID NO: 702395 - DNA, 624 bp, Homo sapiens
atccctctgtcgcccaggctggagtgcagtggtgtcatctcagctcactgcaagctccgcctcccgggttcacgccattctcctacctcagcctcccgagtagctgggactacaggcaggcaccactacgcccaactgatttttgtattatttttttttagtagagacgggctttcaacatgttggtcaggctggggttttattatcttataacacatacacagaaaagtaaacaaatctcaaaggcgtcccctgagggatttttacaaagtgaaggcagcagtgcacctaagatcacggtcaagatctagaacagcaccccagaagctcaggactctaccatctgctttctctcagttactactctcaaagctaaaccattatttgatttttgaagtgtrtataaataaattcacatatgatacattattttgcatctgactttttttctcgtaatattatgtctctgatactccacaatgattttgcatagttcattaccattgcgcatggtagttccattcataaatacactacaatttatccattctactcctattgaagttttcagttcagttcagttggggctgtagtagtgtcacaaaaagccattcttctgcctcc

SEQ ID NO: 702396 - DNA, 624 bp, Homo sapiens
atccctctgtcgcccaggctggagtgcagtggtgtcatctcagctcactgcaagctccgcctcccgggttcacgccattctcctacctcagcctcccgagtagctgggactacaggcaggcaccactacgcccaactgatttttgtattatttttttttagtagagacgggctttcaacatgttggtcaggctggggttttattatcttataacacatacacagaaaagtaaacaaatctcaaaggcgtcccctgagggatttttacaaagtgaaggcagcagtgcacctaagatcacggtcaagatctagaacagcaccccagaagctcaggactctaccatctgctttctctcagttactactctcaaagctaaaccattatttgatttttgaagtgtatataaataaattcacatatgatacattattttgcatctgactttttttctcgtaatattatgtctctgatactccacaatgattttgcatagttcattaccattgcgcatggtagttccattcataaatacactacaatttatccattctactcctattgaagttttcagttcagttcagytggggctgtagtagtgtcacaaaaagccattcttctgcctcc

SEQ ID NO: 702397 - DNA, 1311 bp, Homo sapiens
  misc_feature 1083, 1084, 1085, 1086, 1087, 1088, 1089, 1090, 1091, 1092,1093, 1094, 1095, 1096, 1097, 1098, 1099, 1100, 1101, 1102,1103, 1104, 1105, 1106, 1107, 1108, 1109, 1110, 1111, 1112,1113, 1114, 1115, 1116, 1117, 1118, 1119, 1120, 1121: n = A,T,C or G
  misc_feature 1122, 1123, 1124, 1125, 1126, 1127, 1128, 1129, 1130, 1131,1132, 1133, 1134, 1135, 1136, 1137, 1138, 1139, 1140, 1141,1142, 1143, 1144, 1145, 1146, 1147, 1148, 1149, 1150, 1151,1152, 1153, 1154, 1155, 1156, 1157, 1158, 1159, 1160: n = A,T,C or G
  misc_feature 1161, 1162, 1163, 1164, 1165, 1166, 1167, 1168, 1169, 1170,1171, 1172, 1173, 1174, 1175, 1176, 1177, 1178, 1179, 1180,1181, 1182: n = A,T,C or G
ccataaaaagctatactttttttctactactatttcctgtaaatggtaaataaaaaaagattttaaaatattaataattgaataagtgctgcccaaaacagatccaaagagtcttgatcaatgcagaattctcttacacatcaatatgaaatatgaatggagatgatatgagaggtacagtcatagaaaagtctatttataaaacattttcaatacttagatttcactggttatcrttaatgcataaataatttctgagacccaaagggaaaaatataccaaccttaccaaaaaaaattattcattttctatagggattttcttttgtcattgttgttttcttttgagacaaggtccactctgtcgccccaggctggagtgtattggcaagatcatagctcactgtagcctcgacctcccaggctcaagtgatcctcccacctcagtctctggagtagctgagaccacaggtgtgtgccactatgcctggctaatttttttttcatttaatttgcttttattttttgtacaatatacccaatgatgaataggtattcttattttcttttttaaaaaacttttgttttaagttcatgggtacctgtgcaggatgtacaggtttgttacataggtaaatttgtgtcgtggtgacttattgtacagattgtttcatcatgcaggtattaagcttagtatccattatttatttttcctgatcctctcccttccccatcctccaccctcagataggccccatatgtgttgttcccttctatgtatccatatgttctcatgatttaactcccacttataagtgagaacatgcagtatttagttttctgttcctatattggtttgctaaggaattaggcctccagctccatccatgtccctgcaaaggacgtgattcattcttttttatggctgcatagtgttccatggtatatatgtactacattttctttatccagtctatcatcgatgagcatttgggttgattccatgtctttgttattgtgaatagtgctttgatgaacatacatgtgcatgtgtttttataacagaaacattttggagagatgnnnnnnnnnnnnnnnnnnnnnnnnnnnnnnnnnnnnnnnnnnnnnnnnnnnnnnnnnnnnnnnnnnnnnnnnnnnnnnnnnnnnnnnnnnnnnnnnnnnntgagccaccatgcccagcccaaaaaataaagttatttaattaatagttgtaatatttctattggagctttgaagttaagtgccctcaaagaggccaagtttgatggttcctttcagaaagcttaatgca

SEQ ID NO: 702398 - DNA, 598 bp, Homo sapiens
ttatttatttctttctttattttgggacagactctcgctctttcgcccaggctagagtgcagtggcgcgatctcggctcactgcaagctccgcctcccgggttcacgccattctcctgtctcagcctcataagtagctgggactacaggtgcccgccaccacgcctggctaattttttgtatttttagtagagacggggtttcaccgtgttagccaggatggtctcgatctcctgacctcgtgatccgcccgtctcggcctcccgaagtgctgggtttacaagcatgagccaccrctctcggccagaaattattagtttagagagacggcttaacaactgcctgactaccacctgatgggcgcctgacattcctggttggggttgagggtcggggggcctctcctgccctgctcatgtctgcctaactacctaccgtaacaagaggaccctggctagagtttggtcaaagagtgaatctttgtcacctctctctcaggttccacaaccctatttatggtaatagcagcccacgtatgctgagtacatactgtgtgctgagcatgatccaggagtttgccatgcacttgctcatcaaat

SEQ ID NO: 702399 - DNA, 1353 bp, Homo sapiens
tctgctatcacttgaaaaacaggccaggccaggcatggtrgctcatgcctgtaatcccagcactttgggaggttgaggcgggaagatcacctgaggtcaggagtttgagaccagcctggccaacatggtgaaaccccgtctctactaaaaatacaaaaatcagccaggtgtggcggcagccgcctgtaatctcagctactcgggaggctgaggcaggagaatctcttgagcctgggaggcggaggttgcagtgagctaagatcacgtcactgcactccagcctgggcaacagagtgagactgtgtctcaaaaccaaaaaaaaaaaaaaaaaaaaaaaaaagaagaagaaaaacatgacaatagcgtgtccaacggtcatcttatccaagcagccccttcccctacttccaaacgggatccagcccatgcctgggtgcaagatagaggctcaaagcatggccaatgagttcccttctccactcctggcctccctctcccatggggaacaggagccacgcctcactgtctcctggtggggtcagaagcaaatcgagttctggaccccacaaaagatctggggacccgagaaaagggtgactgggctgagggcgaacccggggcggggtgggttacagggtcacgtggcagctgctagagaacccctaccccagagacctacagattctgctcaccttcccgatgcgggggttcctctttgggcttggggtgcattagggtgaagggcagttccacggccacgtcgctgaaacagagacccagacccagtgagccttgagcggactcacaggctgtgagacttgatgtcgatgccctgtcagtccgaggactgcagagggttttgccgtcagaggaggtagatccaaaagatgccctccagccccagttctgccactcggagcctcggtctgcctgggagctggacgaggagacttcctctggtcccaaaaagaaatggaagcctcctctttcctgagaaggctctctgggttcccacgggctgggaagaggcccaggggtgggaaaggattgcccggggcagcatgcaccgtggtcactgcggggctccagaggtgccctgggaccccccccccacctcaaatcgccacagccaccctcgcctcccctgacactgcccttcccaacttccaggtcggagctcctcccaccctcacgccatcccatctcccaacacctccagggtgctcttgtaaaagtgctcaggtgaccctagcacccctgcaatctggatgaagcactgttgaggtcagtttagtcaggtttaggatggccccagggcccaaggctgattacactgtggggatgcaggggaaa

SEQ ID NO: 702400 - DNA, 1161 bp, Homo sapiens
tttgatgttgttaaatccattaatttttcctttgagatttacactttttgtgccctgcttgaatcagttagcttttgctatgtaacaaaccacaccaaagcatagtggcttaagccaacaaggattcattgctgtgggattaattgcttctgaacggggcctgatgggcgggggctggatgatctggggggcctcactcacatcatggccccagctgggatggctgggcctcttactccacacggcctttcaccctccaacagggcagcccagggttccgcacacggcggctccgggattccagcgcaggagagggcaagcctggtggacctgagctttccaggcctctccttcttcacatttgttaatgcccagtggaccaaaacaagccacatggccacacccaaactcaaggagtcaaataaaagcccccacctcctgctgggagaagctgccagtgcagttgttacttttctcaatctactgtgccactctaagcttataaagatgtttcttctagccgggtgcagtggctcatgccygtaatcccaacactttgggaggctgaggtgggagaatcgcttgacatcaggagttcaagaccactctgggcatcgtaatgaggccctgtctctaaaaaaagcaattaactgggcatgatggctcatgcctgtagtcccagctactggggaggctgtggcagaaggattactggagcccaggaggtcaaggctgcagtgagctatgatcacaccactgcattccaccctgggcaacacagcaagactctgcctttaaaaaaaaaaaaaaaaaaaaaagatagttctagatttcttattagtagttttatagtcttaaaactatttggcatttcttttttctttatattgtgatttttaattcattgaaatcatttaaatctttataaacagtaaatattaatatatgtgttatgtatcaatataattatacattatcatatattgttaaaataaatttcagccaggcacagtgggtcatgcctgtaatcccagcactttgggaggccaaggcgggtggatcacctgaggtcaggagtttgagagcagcctggccaacatggtgaaacctggctcaactaaaaatataaaaattagccggatgtggtggcaggcacctgta

SEQ ID NO: 702401 - DNA, 865 bp, Homo sapiens
ggtcaaaagattagtagtgtctgatttaaaaccaacaagtaagtaccaagttatatataaatagaatttaaacttttattttaaaacagcattacaatcaacattcccagaaaatttccacaatgaagaagctggatatttcaaattaataaaaataaaattatctaatggaatgataatttttaagaatatacactgtgatactaaatatcattcgtatataactgtttatttctgagaagccatatgatagtcactttatgatctttgtttcacatagatttgtatgtaaactggtgagttcaagaattgtatttattcatagtgactataattaaaataattgctacaggtggatttacttggttaaaatacccatgttttactacttaatataaacaaccaaatttcaatcaagtaggactgtttgtttaaaggtgcatttcttctatacactatccagtaataataataattttaacaactattataatcatgaattagacaccaggctaagcatcatgcatgyattataacctcttttatttttatagccatctgacatacccactactactctccctatttttcccaaggggaaactgaagctgaaagaagtgatgtaactttcttaaagtcacacaactgaaatggttaaaaagcttattaatggtatatttaataccattaatagctaactctcacactctacgtacacatctgataccacttaaactaagaattccattttatgattttgaacattgtttagacattaattcatccttttaaaaacacatacacatacatagcttaattttaattttatttctgatcttaaaaatatttaaacagtgaattaatt

SEQ ID NO: 702402 - DNA, 865 bp, Homo sapiens
ggtcaaaagattagtagtgtctgatttaaaaccaacaagtaagtaccaagttatatataaatagaatttaaacttttattttaaaacagcattacaatcaacattcccagaaaatttccacaatgaagaagctggatatttcaaattaataaaaataaaattatctaatggaatgataatttttaagaatatacactgtgatactaaatatcattcgtatataactgtttatttctgagaagccatatgatagtcactttatgatctttgtttcacatagatttgtatgtaaactggtgagttcaagaattgtatttattcatagtgactataattaaaataattgctacaggtggatttacttggttaaaatacccatgttttactacttaatataaacaaccaaatttcaatcaagtaggactgtttgtttaaaggtgcatttcttctatacactatccagtaataataataattttaacaactattataatcatgaattagacaccaggctaagcatcatgcatgcattataacctcttttatttttatagccatctgacatacccactactactctccctatttttcccaaggggaaactgaagctgaaagaagtgatgtaactttcttaaagtcacacaactgaaatggttaaaaagcttattaatggtatatttaataccattaatagctaactctcacactctacrtacacatctgataccacttaaactaagaattccattttatgattttgaacattgtttagacattaattcatccttttaaaaacacatacacatacatagcttaattttaattttatttctgatcttaaaaatatttaaacagtgaattaatt

SEQ ID NO: 702403 - DNA, 560 bp, Homo sapiens
aaccccgcaacagactggattaagaaaatgtggcacatatacaccatggaatactatgcagccataaaaaatgatgaggtcatgtcctttgtarggacatggatgaaacatggaaaccatcattctcaaacttttttttttaacctttctcttgatatgtaaacatctcaaaagatcaggacttgattatcttttctcagtagactgttcctccttctttatcttctcttagtattatatgtgagaaaaatttttaattatttaatatgattgcattaagataggttctagttatacccaatcaacaaatctacagttgcatacatggtgaattctttgcaacatcatagtccagtgtgctggtgtggctctcatggacaatgatcttctctttaactcctattcttgactctccatcacactgaacctgtgtgccttattttaaaatattgcaatccacatttcataatattgccatctataatatttcataattttgcctctatctatccttagttttatgctttatttgtgtgaaatttatagtatagtgtacacct

SEQ ID NO: 702404 - DNA, 560 bp, Homo sapiens
aaccccgcaacagactggattaagaaaatgtggcacatatacaccatggaatactatgcagccataaaaaatgatgaggtcatgtcctttgtagggacatggatgaaacatggaaaccatcattctcaaacttttttttttaacctttctcttgatatgtaaacatctcaaaagatcaggacttgattatcttttctcagtagactgttcctccttctttatcttctcttagtattatatgtgagaaaaatttttaattatttaatatgattgcattaagataggttctagttatacccaatcaacamatctacagttgcatacatggtgaattctttgcaacatcatagtccagtgtgctggtgtggctctcatggacaatgatcttctctttaactcctattcttgactctccatcacactgaacctgtgtgccttattttaaaatattgcaatccacatttcataatattgccatctataatatttcataattttgcctctatctatccttagttttatgctttatttgtgtgaaatttatagtatagtgtacacct

SEQ ID NO: 702405 - DNA, 620 bp, Homo sapiens
ccactcgggaggctaaggcacaaggaccacttgaatctgggagccgagattctaccactgcactccagcccgtccagcccgggtgatagagtgagaccctgtctcaaaaaaaaaaaaaaaaaaaaagtaaaaaatgtaaaaattaattattttctatggtttgcagtattttttcacatcagttccttaaaattcatacaacacctccaatacaacctcagaaacatgtacaaagttattatttaaaaaagcaaaagagaacaaaatactttctgccatggctaaaagcttggataaaycataattttttttttttttttttttttttgtgagggagtcttgctctgtcacccaggctggagtgcagtggcgcgatctcagctcactgcaagctccacctctcaggttcacgccattctcctgcctcggcctcaaaacattcgccttagtagaaatacgcctggcggagccttcagcagtgctcagtttacatgcccctgaggggcgcctctcaagcatcaggtgcttgaatcagattccagccaaaaaaaacagcattgatttagggttgaggcctcaggcgagaacctaaagttcctgtttcttgggttgtccattca

SEQ ID NO: 702406 - DNA, 620 bp, Homo sapiens
ccactcgggaggctaaggcacaaggaccacttgaatctgggagccgagattctaccactgcactccagcccgtccagcccgggtgatagagtgagaccctgtctcaaaaaaaaaaaaaaaaaaaaagtaaaaaatgtaaaaattaattattttctatggtttgcagtattttttcacatcagttccttaaaattcatacaacacctccaatacaacctcagaaacatgtacaaagttattatttaaaaaagcaaaagagaacaaaatactttctgccatggctaaaagcttggataaatcataattttttttttttttttttttttttgtgagggagtcttgctctgtcacccaggctggagtgcagtggcgcgatctcagctcactgcaagctccacctctcaggttcacgccattctcctgcctcggcctcaaaacattcgccttagtagaaatacgcctggcggagccttcagcagtgctcagtttacatgcccctgaggggcgcctctcaagcatcaggtgcttgaatcagattccagccaaaaraaacagcattgatttagggttgaggcctcaggcgagaacctaaagttcctgtttcttgggttgtccattca

SEQ ID NO: 702407 - DNA, 645 bp, Homo sapiens
tgcaatgagggaattgggaaataatagaaatgaataattcagaattttctgtaaagggaaggagaaaaagaaagaggtggtagaaatagggtcaaacggatattttaagatggaaaaaataacaataatttgataggagttatgagaaaggaaaaccttgatgcaggagatggaggccagagtcgcttgagtgggcagaagggagtgaggctgaagttcctgagtgacagggtggagcgtagcggcacagagtaggtggggtttggatgagctgggcgacagcttgttggagctgatttctgtttttttcagctttctccatgaaataggaaattaggtcatcatctgaaagccaagaataagggtgtcaccttaggacagaaaaaaaaaagagagtaataaccatcttcgctttagctaatggtacctggaaattcacccaggcaatacaaagaatgctttgacactgtgaaaatctcttgccttgagttatttctaagttcccttctgtaccataggaatagccattccttatagagtactttccaaaatgaggcagaagcacctgtacttgtgtcaaaaaacaaacaaacaaacaaacaaamaaaaaaaacttctttctaaaggataaaacctattttgtcc

SEQ ID NO: 702408 - DNA, 653 bp, Homo sapiens
tttcagagagccaaataaatataagcatttatttcattaaattaattcaatgaacatatactaaacttcatgggtgcctggaatattactacatagtgaattgatggccatttaataaacatgaaggatctgtgaactttcacggcattgtagacaaaattttgtatacatatgtgtataagaatatttctcttcatcatcctcagcaaactaacacaggaacagaaaaccaaacacygcatgttctcactcataagtgggagttgaacaatgagaacacatggacacagggaggggaacatcacacatcggggcctgtcgggttgtggggcgaggtgagggagagcattaggacaaatacctaatgcatgcagggcttaaaacctagacgatgggttgataggtgcagcaaaccaccatagcacatgtatacctatgtaacgaacctgcacgttcagcacatgtgtcccagacttaaagtaaaattttttaaaaaagaaaataagagatactctccaactcccaactcccatagaaggtggagctgagtccaggaggaagtctgaggaaataaaagtgtgtaaaaattaaaaaaagaagaatatttctggagaggagttccaaaatgttcatcagactctcaaaagggctga

SEQ ID NO: 702409 - DNA, 653 bp, Homo sapiens
tttcagagagccaaataaatataagcatttatttcattaaattaattcaatgaacatatactaaacttcatgggtgcctggaatattactacatagtgaattgatggccatttaataaacatgaaggatctgtgaactttcacggcattgtagacaaaattttgtatacatatgtgtataagaatatttctcttcatcatcctcagcaaactaacacaggaacagaaaaccaaacaccgcatgttctcactcataagtgggagttgaacaatgagaacacatggacacagggaggggaacatcacacatcggggcctgtcgggttgyggggcgaggtgagggagagcattaggacaaatacctaatgcatgcagggcttaaaacctagacgatgggttgataggtgcagcaaaccaccatagcacatgtatacctatgtaacgaacctgcacgttcagcacatgtgtcccagacttaaagtaaaattttttaaaaaagaaaataagagatactctccaactcccaactcccatagaaggtggagctgagtccaggaggaagtctgaggaaataaaagtgtgtaaaaattaaaaaaagaagaatatttctggagaggagttccaaaatgttcatcagactctcaaaagggctga

SEQ ID NO: 702410 - DNA, 653 bp, Homo sapiens
tttcagagagccaaataaatataagcatttatttcattaaattaattcaatgaacatatactaaacttcatgggtgcctggaatattactacatagtgaattgatggccatttaataaacatgaaggatctgtgaactttcacggcattgtagacaaaattttgtatacatatgtgtataagaatatttctcttcatcatcctcagcaaactaacacaggaacagaaaaccaaacaccgcatgttctcactcataagtgggagttgaacaatgagaacacatggacacagggaggggaacatcacacatcggggcctgtcgggttgtggggcgaggtgagggagagcattaggacaaatacctaatgcatgcagggcttaaaacctagacgatgggttgataggtgcagcaaaccaccatagcacatgtatacctatgtaacgaacctgcacgttcagcacatgtgtcccagacttaaagtaaaattttttaaaaaagaaaataagagatactctccaactcccaactcccatagaaggtggagctgagtccaggaggaagwctgaggaaataaaagtgtgtaaaaattaaaaaaagaagaatatttctggagaggagttccaaaatgttcatcagactctcaaaagggctga

SEQ ID NO: 702411 - DNA, 615 bp, Homo sapiens
gagtctccctctgccacccaggctggagtgcagtggtgcaatctcagckcactgcaacctccgccttccagggtcaagcgattctcttgcctcagcctcctgagtagctgggttataggagctcgccaccacaccaaactaatttttgtatttttagtagagacggggtttcaccatgttggccaggctggtcttgaactcctgacctcaggtgatccacccacctcagcctcccaaaggattacaggcatgagctaccgcacccagctgatctgtgcatttttaagagcaatatttatattcaagattgaattttcattttacccttataattagtgaatggatctaacaatgcaaattctcaaggcaactgtagggaagacaaagaaatttcagtcattaatcataatgtgaaactagacatagcacagaaaaagaattgaaataaaactcactgaaccaaaaataatccatattggaaaataaagatttgcctagtcagatgtgagatggaagtgatatttgtttttctgagctgtatcctgacctaaaatagaaagtagtactgaacaaaatactatatatttcccttctggaccagtaagttgagaatta

SEQ ID NO: 702412 - DNA, 615 bp, Homo sapiens
gagtctccctctgccacccaggctggagtgcagtggtgcaatctcagcgcactgcaacctccgccttccagggtcaagcgattctcttgcctcagcctcctgagtagctgggttataggagctcgccaccacaccaaactaatttttgtatttttagtagagacggggtttcaccatgttggccaggctggtcttgaactcctgacctcaggtgatccacccacctcagcctcccaaaggattacaggcatgagctaccgyacccagctgatctgtgcatttttaagagcaatatttatattcaagattgaattttcattttacccttataattagtgaatggatctaacaatgcaaattctcaaggcaactgtagggaagacaaagaaatttcagtcattaatcataatgtgaaactagacatagcacagaaaaagaattgaaataaaactcactgaaccaaaaataatccatattggaaaataaagatttgcctagtcagatgtgagatggaagtgatatttgtttttctgagctgtatcctgacctaaaatagaaagtagtactgaacaaaatactatatatttcccttctggaccagtaagttgagaatta

SEQ ID NO: 702413 - DNA, 615 bp, Homo sapiens
gagtctccctctgccacccaggctggagtgcagtggtgcaatctcagcgcactgcaacctccgccttccagggtcaagcgattctcttgcctcagcctcctgagtagctgggttataggagctcgccaccacaccaaactaatttttgtatttttagtagagacggggtttcaccatgttggccaggctggtcttgaactcctgacctcaggtgatccacccacctcagcctcccaaaggattacaggcatgagctaccgcrcccagctgatctgtgcatttttaagagcaatatttatattcaagattgaattttcattttacccttataattagtgaatggatctaacaatgcaaattctcaaggcaactgtagggaagacaaagaaatttcagtcattaatcataatgtgaaactagacatagcacagaaaaagaattgaaataaaactcactgaaccaaaaataatccatattggaaaataaagatttgcctagtcagatgtgagatggaagtgatatttgtttttctgagctgtatcctgacctaaaatagaaagtagtactgaacaaaatactatatatttcccttctggaccagtaagttgagaatta

SEQ ID NO: 702414 - DNA, 905 bp, Homo sapiens
tggggaaatcgtgaattttttaaatggaggctaaaggagtacagagatcactggagatgtttaaggtgggacagaagctaggctgccatgtgactatgaacttggttagggcaggttcatgccagggtgtctcatagatgtgttgccagctcctgtcacagtgtctggccgataacagctgcttaaatatttgtgacatggatcagttgatgagtggatgataagaaagtgttggaaattaagcatagatggaacattttcaataaatttgccaatgaagaaatggggaaaaggttgttagtgggaggaatgttcatttttcttttcagacgtgtgtgtgtgtgtgtatccttagataacctgtagagaggagagatgaatgatgctggagcagaaagggtaggaagaaatatgaattcctctggtatgctgctaattgtttaataactggctctccaaagaacgggactcctgatttgtagtgtttgctaatgtaaatactcccactgtggctgattgcaagctacgagtgtgacttcactgaccatggagttgtgagagctgtcatagtccgccatgatgccatgtttctaccagacrgatgcaatagacataaataacctcaaaagcatagataatagcaaagtgaagcaaaaagccaactcaagagtagtgagctttgaatatgtactaccttgtttaaaatatgacatatttaattttaagtttatttacttgaatttttaataatggctgttttttaagtaagcgacttgtaaaattcctaaaactttgtcagctcttccaaaccagtgtcagccagttccagcacaccagtgagaaggtccctcagtagggggaagaaaactttctattatccaactactatgtaccagaaagggggc

SEQ ID NO: 702415 - DNA, 643 bp, Homo sapiens
ttttatctggcaaaccttacttcccaggaacccctgagttctcctacagaaagttctaaacattccagggaattaattacaccagtgaggctgaaagccaggatttgagttgattaggagacacgtccagtcaggaatgcattaagaacgggaaatattttaagcytcaagagcagcagctaaaaggagccctgttctctagagcccatccccacgatgagaaaaaggctgtattcagtgcagacctggaccccccttcacagggccaaacagaggccagtctactccctgtccctgatacaaactggtccctgataaaaactggtctaatatttgcatacaacctatgctcactcagggtccctccccagccatgcgaccccacagcatggggagacaattagacccagaggtctgggcttgtggaggaggaccagcagagagaccaacctgcctctgccttcctctgccagggagagcaggagacaggtggtggaccttcttgggtcacccagcagatctttactgagcatgtactatgagccaggtggcatgctaggtatctggaatacaatggcaaacaaaatagtcactgtcctcaaggaccatctgtaagggagaaaggcacatagctatacagcaa

SEQ ID NO: 702416 - DNA, 643 bp, Homo sapiens
ttttatctggcaaaccttacttcccaggaacccctgagttctcctacagaaagttctaaacattccagggaattaattacaccagtgaggctgaaagccaggatttgagttgattaggagacacgtccagtcaggaatgcattaagaacgggaaatattttaagcttcaagagcagcagctaaaaggagccctgttctctagagcccatccccacgatgagaaaaaggctgtwttcagtgcagacctggaccccccttcacagggccaaacagaggccagtctactccctgtccctgatacaaactggtccctgataaaaactggtctaatatttgcatacaacctatgctcactcagggtccctccccagccatgcgaccccacagcatggggagacaattagacccagaggtctgggcttgtggaggaggaccagcagagagaccaacctgcctctgccttcctctgccagggagagcaggagacaggtggtggaccttcttgggtcacccagcagatctttactgagcatgtactatgagccaggtggcatgctaggtatctggaatacaatggcaaacaaaatagtcactgtcctcaaggaccatctgtaagggagaaaggcacatagctatacagcaa

SEQ ID NO: 702417 - DNA, 581 bp, Homo sapiens
gaaattgataggaatcatggagagaatacacctgaagaggccagtttcactctctaaaagccatgcaaggaagattgggaagctgattcagggcaatggtgctcaagtagataaggagttatgtcaaatattgacaattattcctaaaggtccaaggcctttaaaagagtcctgtagaatatttctcaaagatgctgatatggtttggatctatgtctccagccaaatgtcatgttcaattgtaatcctcaatgttggaggtggggcctggtgggaagtgattggatcatcggggcagtttctcatagtttaacaccaccacacttggtcctgtcatcacgatagtgagttctcacaaaacctgtagatgtctattaggtctgcttggtccagagctgagttcaagtcctgaatatccttgttaattttctgtcttgttgatctrtctaatattgacagtggggtgttaaagtctcccattattattgtgtgggagtctaagtctctttgtaggtctttaagaacttgctttatgaatctgggtgctcctgtattgggtgcatatatatttaggatagtta

SEQ ID NO: 702418 - DNA, 1188 bp, Homo sapiens
attgcattccaacctgggtgacagaacgagactctgtctcaaaaaaataaaaaataaataaaaagaagaagaaatgaccaagggagctggccagggaaaaacctacacttaagattcagcaaggcatgttagaccctgataacctgcaattccacagccaggtttctatcccagagaaacaaaatcacacgtgcacaagagagcgtatgaaagttcacagcagcattgtctgtcttggtgaaagcctgggtcagggaggagcaggcaaataaaccattaaacatccacattgtgcaatagttaccaattaagtagatcaaaggtattgacatggacagatcttcagaacatacagtggatgagaaaaacaacatgtagtgcaataataatgtataaaacattacttatgaaaaaagaagaaaagccaaacaatcctgtcacatatatattttaaatgatgtatgtgtaggcatagagaaaattctggaaagctaaatccatgctaattgtgataaaggggaggagttgggacaaacatgaagagcagaaggggttaaatggggttttagcatagttgtcaggttttaattttataagaaaaatgtaatcatctgttacttatgtgaataaaaattctcaaaatatttttaaaaagaaagattcaatgggaagaggaagcaatggaatagacaggaatacattcctagactctaggtaggacactgttactgggaacactgggagaagtttctggaatgcaaggtggaaaaaggatccactgcactcagcaacgctgcagagacagcagccagcaggatgagtcctgtgagctcagctggttgtcaacacctttcacttacagccactagctcctgtgtccttgaaaagtcgccatgtcccaccactgcccttgaatgagatggagactttctgttcttttttgagttgtaaacatccaaaagcatttcrtcaatttcttgtatttagacattcccttcctttcccagaaattccacagtgatattctcagtgttctctttccagtccttcaagctgtgtatgaaatctacttcttcccagtccagctccagcaaatacctgcctcctctcttgttctccattcaaaaaacttccaatttgaggtcatttttaagagcattactgtggtggtggcggtggtggagttta

SEQ ID NO: 702419 - DNA, 631 bp, Homo sapiens
tgactccatgtgacacatttatgtccagaaagatcagttagttcctacagtagcactggggcatttataatctatatcagttcttaattcaattattcatatggtcaaccacaaacaacamcatcaccaagaaataaagcaaacatgaaggctggcgtggtggctcacgcctgtaatcccagcactttgggaggctgaagttggcagattgcttgcagccaggagttcgagaccagcctggccaacatggcaaaacctgtctttactaaaaatacaaaaattagctgggcatggttgcgcacacctgtagttccagctacttgggaggctgaggcaggagaattgcttgaacctggcaggtggaggttgcagggagccgagattgcaccactgcactccagcctgggtgacagagtgagactgtctccccaccccaaaaaaaaaagaaaaaaaaggcaaacattagataggacagtatgacagcttttttatattgtcaggtcttacgatattcttcaccacaactgctgctggtccactcccttccaaataaagatactacattatcatctcagatcttttcacttaagcctctaaacttagaacctgagctttatgtagagaaaatatc

SEQ ID NO: 702420 - DNA, 631 bp, Homo sapiens
tgactccatgtgacacatttatgtccagaaagatcagttagttcctacagtagcactggggcatttataatctatatcagttcttaattcaattattcatatggtcaaccacaaacaacaccatcaccaagaaataaagcaaacatgaaggctggcgtggtggctcacgcctgtaatcccagcactttgggaggctgaagttggcagattgcttgcagccaggagttcsagaccagcctggccaacatggcaaaacctgtctttactaaaaatacaaaaattagctgggcatggttgcgcacacctgtagttccagctacttgggaggctgaggcaggagaattgcttgaacctggcaggtggaggttgcagggagccgagattgcaccactgcactccagcctgggtgacagagtgagactgtctccccaccccaaaaaaaaaagaaaaaaaaggcaaacattagataggacagtatgacagcttttttatattgtcaggtcttacgatattcttcaccacaactgctgctggtccactcccttccaaataaagatactacattatcatctcagatcttttcacttaagcctctaaacttagaacctgagctttatgtagagaaaatatc

SEQ ID NO: 702421 - DNA, 631 bp, Homo sapiens
tgactccatgtgacacatttatgtccagaaagatcagttagttcctacagtagcactggggcatttataatctatatcagttcttaattcaattattcatatggtcaaccacaaacaacaccatcaccaagaaataaagcaaacatgaaggctggcgtggtggctcacgcctgtaatcccagcactttgggaggctgaagttggcagattgcttgcagccaggagttcgagaccagcctggccaacatggmaaaacctgtctttactaaaaatacaaaaattagctgggcatggttgcgcacacctgtagttccagctacttgggaggctgaggcaggagaattgcttgaacctggcaggtggaggttgcagggagccgagattgcaccactgcactccagcctgggtgacagagtgagactgtctccccaccccaaaaaaaaaagaaaaaaaaggcaaacattagataggacagtatgacagcttttttatattgtcaggtcttacgatattcttcaccacaactgctgctggtccactcccttccaaataaagatactacattatcatctcagatcttttcacttaagcctctaaacttagaacctgagctttatgtagagaaaatatc

SEQ ID NO: 702422 - DNA, 631 bp, Homo sapiens
tgactccatgtgacacatttatgtccagaaagatcagttagttcctacagtagcactggggcatttataatctatatcagttcttaattcaattattcatatggtcaaccacaaacaacaccatcaccaagaaataaagcaaacatgaaggctggcgtggtggctcacgcctgtaatcccagcactttgggaggctgaagttggcagattgcttgcagccaggagttcgagaccagcctggccaacatggcaaaacctgtctttactaaaaatacaaaaattagctgggcatggttgcgcacacctgtagttccagctacttgggaggctgaggcaggagaattgcttgaacctggmaggtggaggttgcagggagccgagattgcaccactgcactccagcctgggtgacagagtgagactgtctccccaccccaaaaaaaaaagaaaaaaaaggcaaacattagataggacagtatgacagcttttttatattgtcaggtcttacgatattcttcaccacaactgctgctggtccactcccttccaaataaagatactacattatcatctcagatcttttcacttaagcctctaaacttagaacctgagctttatgtagagaaaatatc

SEQ ID NO: 702423 - DNA, 589 bp, Homo sapiens
ttgaggatgccatgaagtcaatgccttgtagagtttgacttcaagaaggtgctcaataaatgtttgaacaatgggataaagggagcttgaaggaaatggttaatggcgatgaagttagttaatccttagtagtcaggatagaatttgtgttgagtagtgagaagcagtttatattatgaaataaagactaaagactgaattgtcatttatttggactaacttcacatgttgctgataaaaattaattacttctcagtttcctttgcagcaaagtctagaatgtgaatttatttgcttccaactttaaactgactcactctaagttggcatttcactgtttttttttttgcccaggctggagtagaatggcgcaatcatagctcactgtatcctcaaactcctgggctcaagtgatcctcctgcctkggcctcctgagtagttaggactgtaggcagctgccttcatgcccagctaattttttgtagagatgagttattgctatattgcccaggctagtctggaactcatggtctcaaaggatcctcccacctcagccacccaaagtactgggattactggcttgagctg

SEQ ID NO: 702424 - DNA, 611 bp, Homo sapiens
cctgcactcttcttcctttggtgggtgtattagtttgcgagggctgccgtaataaagtcacaactgagtagatcaacacagcattaattttctcacagttctggaggttagaagtccaagataaggtacctgtagggttgattctttctgagggccacgagggaacatctgttccgggcctctygccttggctcgtagatgaccgtttttccctcgtatctttacactgtcttccctctctgtcagtgtccaaatttcctcttcttacaacaccagtcatattggattagcgcccaatctaatgaccttattatagcttaattatccccgaaaagaccctatctccaaatatggtaacattccgaggtactggggattaggatttcaatatataaattttaggggatgggacacaattcataacaagtaggaaagaagagcacagaaatatttaatgtcacatggcatttctggattattgagatttcatgcaaaaatataaatcttaattatcaggcaagaaacatatggataatcagttacgtagtgatcctagtcttctgatggtcaaaatgctaaccagggaggacatatcccctcctccatgtgaa

SEQ ID NO: 702425 - DNA, 1054 bp, Homo sapiens
tttattagagacatggtttcaccatgttgcccaggctagtctcgaactcctgaactgaagctatccacccgccttagcctcccaaagtgctgggattacaggcatgagccactgcacctggccctgtatatatttgaaattatgttattatattgcatccatattcatacaattgatatatcttcctagataattaaatttccattaatatgtaatctttgaatctggtaattttttttgcttcgagaatttttttcttcatgatttcacatgaacttttattggtgtgtattagtgtgctttatcttttttcctcctattactttccatttttgtgtccttatagtatagctatgtcattgtcatcttagtccattcctgctataacaaagtaacttagactgggtaatttatcacaacacaaatttattttttacagttttggaggctggaaaatctgagattaaggtgccacagtgtttggtgagggcccattcctcacagatggcaccttcttgctgcatccctacaatgtgaaaggggctaacaggctccctcaagcctttttataagggcactaatcccattcatgacataatcaccacccaaaggctccacttcttgataccatcaccttggaggttagatttcaacatacgaattttggagggacataaacattcagaccatagcagtaatgtaaatatcataagattggatttttaaaagattctgttttataatcttttacttagaatatttggttcacttttatttaatgtaartattataccttgttttaatttctaccattttattttgttcttccatttcatctctctttcttctatgtttttttttctcttttctttttttatattttggtcttgtattggatttgttaaaaattgtttttatttaatatttttctcctgtcatagtatggaagttatatgtagccaaattatagtttttcaggaattctcaaattttaacttgcatatctaactcaagaaagactaaatatggctgggaatggtggctcacgcctgta

SEQ ID NO: 702426 - DNA, 2447 bp, Homo sapiens
gaatacctcaaatagtccagtagagggcagtccaccaggcagaaaaggttaggcgttttggtttcacatctttgctggggaataataggggaaatggctgtttttgctaatttttagctaatatctagccaggagagcaagcacataggacagactgaaagactgtaattttacacaatacacatggcttaattattttattgggatacagaaaaatataaattctggacaaataagtcatatacctgttttcagtcctaacatttaaggattcttgagtcccaatcacataactgtggtgttactctgtcatttatatggtgtcaaaagcacttgatgagtaaacccagtagcatctttttgagtgtttcataatgcattttccaacttgaaaacaataattgaaaaatagccttattgtatattttatgccatgactaaaagtgccatttttactgatgctattagactgataatttcttgaagtgaaatttaacctttttttctctttagtattatgtttataatgccatatttttagaaagcattccagatcaggcatggtggcttacacctgtaatcccagcactttggaaggctgaggtgtggggattgcgtgaagccacaagtttgagaccagcctggttagcaaggcaagatccccaactctacaaaaaaataaaaattaaaaaaaaattattaggctgcagaggcaagaggatcccctgagcccagaagttcaagggtatagtgagtcgtgattgtaccactgcattcctgctgagcaacagagtgagaccccatctcaaaaaagaaaaaaaaaggcattctagtaaatcgaatgtaatgtgaatggaatttcaaaacaggatctaagatggtatgtagtagaattcaaagtaatatcattttaaagttaaatgagtatggaaaaggtctgttctctagttttgtccagttcagtttactgaaggaatatatttaattatattcatatatttaacaaataaaaatatgttgaattttcgtattgtttgccactgagggttcagatgatagacctcaaaaaatcgaaaatactggttgaaatttgtagcatccatttagttattctttttgacctaaataacttaatagtttattaaatctaaggttagctaaatatgtagctaaccttatttgttttctttcctaacaactctgaagaatacataggactttgcacttttttttttttttttttttttaaagagacagcgtttcggtcttgttgcccaggctggactgtaatggcacaatcttggctcattgcaacctctacctcccgggttcaagtgattctcctgcctcagcctcctgagtagctgggattacaggcacctgccaccacacccgcctaattttttgttatttttagtggagacagggttttaccattttggaccaggctggtctcaaactcctgactgacctcaggtgatccacccgccttggcctcccaaagtgctgggattataggtgtgagccaccgtgccgggcttggactttgtactttttcaaatcatatttaattatttcttgatctttactcaaagaattattctgcgctaaatttgcaacattaaacaataattaagcctggatccgataagttattgggtgactagaacctacaacacaatttatttttaatttaaactctcaagtctgattaaacttgggggaaaaactgaacattcaggtgatattttaaattttctttgtgactaaatagatgtcattaatatcatgcttcatcttactgtgcatagatgacccatggcacacaaagtatatgtataatattgcaatattgtacttccatctttaaaagtatgccaaagacttcataatgaattcaccatatttaaggaataaggcaaattaatgtttatccgaaatcaaaatgagattggataattcctggaatctgatttctgtaagtttcagtcctaaagggaccttaaatatctactagaacgaagtacagtgtatttctcagattacatgacattagtcaaccaatttagttgtaacacaaagtgagaaagccttaggtgttgaaggagtgtgaaaataaaaatctcttttcatgcagtttctgcttcattttccaaggattataatatgctgagtaaacttttggcactaaggaagccagctacaggccacgtaatgaaaactattcagaaaacagttcagcaaatactactatttgaatacagttcaaatcgtatttatataaatactctgcctacattatttaacccaaactggattattcaccattctttgaagatgccttgtgttttctgttatctacttctgctcgtgcagtttacttacaccttcaccctttcaaatcctaactcttcttcaaggcctgattcagattttaacttttwaaa

SEQ ID NO: 702427 - DNA, 532 bp, Homo sapiens
cagcattaggtattatcagtccttttatctttaaccatatggtgggaggtagggtatctcatgtagtcttaatttacttccatatacttaatttaaatacactcaatttatatacacacacgtatactctctcagccttcagtaagccagtcycattcccctgaactaaccaatgttaataatggtatacttctctcagtgctcatgcaaacatgcatacacacacatacacataaataaggggtgtgggaatgtatttgattctgagagctgctgtaacaaattaccacaaacttagtggcttaaaacaacagaaatatttctgttcacagttctggaggccagaaatctgagagcaagatgtcagctgggccacacctccctctgaaggctccaagggagaatccttgctttcctcttccagctgctggtggctccaggtattacttggcttatggcagcataactcctatctctgcctttgtctttgtggtcttcttttctgtcttcttcccttctttttatgaggact

SEQ ID NO: 702428 - DNA, 831 bp, Homo sapiens
ccaaaggacacttgggaaaaaatattcagtagacctcatgttggtttaaagtttatttttaaaatcttagtactttactacttaacttggcacatgaagacaacggtgaaagtgacacttgcttataaactttcatgtgcaggtagctgggatttttcaggtgaaatcaactgagttggaatacataaactaacatggaattagcttttcagtttttgtttgttttttacttttattttttattttattttatttttttttgccagcacacttttatgtacactggagaaggatagaaaaatccatatcagaacttttaaaagcttgctatgtgaccttggctatttcaccttctttaggcacataggcttttacgtcagtgaaatgacaggacrggaattattttaagagctgcaaattcacttattaaaacaaacatttaagagacgctaataccaaaaagaggctgaaaaaaatgcggtagcatctgctgaatcaacactgggctcccacctgggcaggcttcccgttttcaaccctccctgacctcaggacagagcacagttcaaaaatcactttagataatctgacacactccttccatctttaggaaatcaccaaaggaaggtgaaaaatttaatcccactcctgattttcccagagcagccaacaatgcttagctgattataagtgcttgatcttggaaaaaaaaaaataactatagaattacagttgaaaagaagggacattcttgataagaaatggggtggtattattcatgatgctgacacaaaggacagcaccgcataatcaggagcaatgtggacctcc

SEQ ID NO: 702429 - DNA, 668 bp, Homo sapiens
aacagctagagagagagtaagagcctgagagagacaatgagtcctggttatttgtctttgagtgcctggatctaatcatacctgaaatcataaacttttttttttttttgaaacggaatcttgcactgtcacccaggctggagggcagtggcacgatctcagctcactgcaccctccgcctcccgggttcaagcgattctcctgcctcagtctcctgagtagctggtattacaggggcctgccaccacacccagctaattttttgtatttttagtagggacgggtttcaccatgttggccagactggtctcaaacccctgacctcgtgattcacccgcctcagcctcccaaagtgctgggaatataatcgtgagccrccatgcccggcctaaactttttttttttaaattaaataagcaaattcccctttccgctttttttcagaagccagtttgactgttaaaactgataaaactgataaaactcctaatatatccttcaatatgcaaggagtgatacacagaaacctgtatcaaacgtgaaagcttacagatcacactgaaaccactggatggctctacagactttgcaaacatttacgcttgcatctaggagaaatttgaggactatttcatgagattctttgaggtaattcattgaagtaacca

SEQ ID NO: 702430 - DNA, 790 bp, Homo sapiens
ggaggaaagccaaagtggaattcacacactaacaaatgaagttaacaagattacacataatagcatcatcacagaagttgattatggagaaagcaactacctaagtaactttgggaaacaatattttgattggatactgcaaggctaaagaaagaaagaattatgcataaatgttgtattctatttagtatatgttgtattctatttagtaaatatatttcttccaatgatagtctttagcaatcctgaagctattttatatgtatactagcattgaacaaacaagaataaatatactgtaactatatgtataatgttcatgtacatatgtagaactatatgtatcatgttcaagaaaagagtaaggataaaataaaccccattgtgttggactgcactcaaagttaacaatataaacacatacccacaagcctatataaatacctatgtatatacaaacatatgtatgayatgtatcttaaattttataatacatatatacacagagaggtagaaaaataaatatagatgtgagtattgtacagattagtttacatacataatctcctatccctgactactgagagcttctaggagcaatgaaatctagtagcaatgaggcgcctatttgttttggaaacaccattcttcagttaaaaggtatcaggaattcttagagaagtgcttgctttccagggttgggtagaggcaatactagataaatctggagttagaaggtaagaaagttcttaaaaagatggggtcttgttgaacgagtacaggtactaac

SEQ ID NO: 702431 - DNA, 665 bp, Homo sapiens
aggattcaatgagataattcatttaaagtacttatttagcaatgtctgatccacaagaagtgtttattaagtgttcacccttggtagaggcaatatatatataattattatatacctaatatatatatatatatatatatatatatcagacatctttgaatgtatctaaaagtgttttttaatcattatattttaaaagctgtcagttacaagtaataactttataaagttatatttcaaaaatgttgatggatactttataaatgatattcttttcaacataatttattaagcactgacggaatactggatgcattgtgctaggctctgtagggaatataagttaatcagacagcatgctttttttttttacttcaaggggtttatagtcattttgtggaacttggcaaacatctgaaaacttagagaacacaagatakaatttatttaagtacctttggcttagagtatttctaaagcttctatagtatctatttggacaagtcattaatatacctctctaacaaatatatcagaggtgtttttcaatataagaaaagaaaggaaaaagttcaaatagcttctctaattataagatagtttacaacaaatcattcacttctgataatgtacaggcaatcacgagaatttaggccaacaataaa

SEQ ID NO: 702432 - DNA, 1116 bp, Homo sapiens
tggtagtccacaagtagacagatgtttcatagcaggtaagcagatttgctgtactttggtcactcagaacccacgttccttatcagtctgccattccctagctgtttttgttcatgtggtcaaagtcatcactgcatccacagtctagctttctggaaagggggaagaatgtatggaggcagcacagcttccttttttaaaggacacgccctggaaataggaacatacttatgggctataagttagtcattgggccacatttagctcctaggaaggctaggaaatatactgtctggctaaggagttaatgtaacttgctaaagctcgaaagtctggggcatgatttcatgtttgattgcctcaaagcaactctcccagacagaattgcttttccagctcatttgctaaaattctaagtaagatggtattttttgaaaagtcgttatttaggttttcatcctcattttaaggactcctgtaaacgttaacgtttaagtcggaaattgtagtctgcaattcactttctgttatagttcattttgattatataaatccttttctgaaggaatttttgccagtctgtttggacctaccaaatggagacctgtatattttttacattaaatatcagtgatttccatttccagtcagtgaaaatcaagagctacaaatatatgaaaggcatgccactgtctcacatttgcaaaggcaattgaattctgttttggctttcatcattgatagctagaattcagatttctagttcaagtagaaatctttttttcaacataggtgattttactcatgggacgacagtcattaatgttaagctagattagagagggctgatatcatgaagtgktaataattatgaagtgatcaagctaagaaggaaagtgacctgttttgtacatgaaggcaaacctgtgcttgcaggaagttttgcaaactctatgaaagaattattaatagaatatttattacctttagaaaatgaaaaattgttacatatttgaagacaaagcagtgctcgcaggaagttatgcaaactctgtgaaagaattattaacagaatatttattaccttcagaaaatgaaaaattgttatatattttt

SEQ ID NO: 702433 - DNA, 637 bp, Homo sapiens
catagcagcttgtgattactaattggctttgctcaatataattaactttttctagaaaaatagatgcatccattgttttacgtaaccttattcatcatctcccaaagacagatgtagattttatttctgatggtgaatacctcatgatttktttttcagctaaaacatagaaacaaagatactgttgtcagtttatttatccaaactaacagttggtgaaactagattagatatttttatggcctaggaaaagttctgcatcactgagtcactgagccacatagactccaccgctatatctcttaagaagtcaaagaagaaacatgtggtggttaaaaaaaaaaaaattctgcagtcagatgggactaggctcacatctaagacctgtcttgaccaactgtgtgaccttggccaatttccttaatctctctaatgttgtttactcactggtaaagcagacacaataatatttctcccacagagattttgaagataaatgatttaatgtacataacacatgtagcacagcatgtgataagcaggaggtacccataagtggtagcttctacactgatgtaacatacacatctgaatcacctcttatcaggtcattctgaatcttcatgtgggatgacca

SEQ ID NO: 702434 - DNA, 637 bp, Homo sapiens
catagcagcttgtgattactaattggctttgctcaatataattaactttttctagaaaaatagatgcatccattgttttacgtaaccttattcatcatctcccaaagacagatgtagattttatttctgatggtgaatacctcatgatttgtttttcagctaaaacatagaaacaaagatactgttgtcagtttatttatccaaactaacagttggtgaaactagattagatatttttatggcctaggaaaagttctgcatcactgagtcactgagccacatagactccaccgctatatctcttaagaagtcaaagaagaaacatgtggtggttaaaaaaaaaaaaattctgcagtcagatgggactaggctcacatctaagacctstcttgaccaactgtgtgaccttggccaatttccttaatctctctaatgttgtttactcactggtaaagcagacacaataatatttctcccacagagattttgaagataaatgatttaatgtacataacacatgtagcacagcatgtgataagcaggaggtacccataagtggtagcttctacactgatgtaacatacacatctgaatcacctcttatcaggtcattctgaatcttcatgtgggatgacca

SEQ ID NO: 702435 - DNA, 2150 bp, Homo sapiens
aagtatattggattttcattgtaactacaaacgttctcagtctagacactgttatgattttaaattatttcaatccaaagttcaagatgtagacacaaactaagtttgtgattttagtagtagtacctgtgaaaccacctgttggggttagaaattttgactgacttcagaactgaatagaccatttattttagccaaaataagtcacttactttgcatataagcaaacaattttccttttgcctactagtaattcattttcaatatattcaccaaatatatggatgatttctttgcctttggattgattttttttctgtttatgtaaaagagatttttgaagcaaaacaactagttttcaagtaaacataaaaacttcagattgcatacaaaggttattccacttgaaggaaaaaatcataattttaatatctttcattcaattttctattataattatggtgaataaagtggtcctcatgtactcatttacttagaagcccaaaatgggtaaggagccagaacaggaaaaggtggagctacctaggtttagctctaaggatcctatgcttgtgcgaagttgcagcaagtttgatagcacagttttgttgatgataatgagttaattatcactaaacttttacatttttctaatgaaaagaaaatctgtacccactgcattcaaacaattagatttttgaagctgctgatttgttagttttgagaactgtagacttctaggacccatccattattcttgcttttgtctagaaatcatccttcttagatacaaggcctatccccaccacaaaaaaggaggcatcattgwttatatttttcaaattgtgaagcaagcattttcagcttattaaaatagctaagtatgttataaattcttatagtttttaacttttggaatgaattagctcctccttttctactaatattttatgctgcatttggagattttgcttctgttttgaaatttctcctacaaaagttctattgactcaatatattgatatactaaacctagataaagaatgagatagtgaagtggtaataaaatacccacattaaatttacaaagctttctgtacattttatttcagttttggaaggtactcagctgcacaattttgtatgtccaagaagatatcatttgtgaaccttcattttaatcatcaaactgccttttggcctcaactgctttgaggcccacactttctcttccattattaacaagtttgggaaacagagtcaataaaatctaattattgacagatggtgaaatcagtactatttcctgaatatatattcaggttttctagattaaactagaaagtttagtctctcctttcacatacttttctaggctcgctcttcaacacctaaaacagcacctctgttgcctaacacagtgcctggcaggcagtaaccatttggcataactggattgaacaaaaactattacatcattagagggattccaaagtaggatactctgagctgataatatcttgatcaattaaaggatatatggataccctataggccacagtatcctcaaaatcacatctgcatactcctgtgctcatttccaaaagtaacaaatcctttcccagttacccatatttatccctaaatagaaagatgagtaggcaggagctcactagatcacagccgtatgatccagtctcattttctacaactattggaacaaagccttcttgtagatggtggaaatttcttactgtggactcatatcttgagaggtaaagcatggctaagaatgtgctcctttgtaatccaggtgagttgtttggcacctaagcagtatgatggcatcacaatttataagctatgggtacacaataactagatgacaactttcattttagattcaagttatttgagattagcaacacggggagattccaagagatgtaaaaataagtgataagaacttttttttttctaccatggccttgcctatttatccaccacccaccctttatggccttttataaggtagaggaatgattcatagctacaagaggtaatattgcaaacaggtaaaccttataaacccaatggtaacccaatccatttacaagtgaaaagttcagctgaggaacaggactatttcc

SEQ ID NO: 702436 - DNA, 849 bp, Homo sapiens
acagaaacatgttttgaggtcaaatattttgactttcttctttgycatatgttttgtggtttgtaaggcatgaccccctagactctttacataggaatttggacaagataaaaaaatcagagcttacacctcattctcaaatacttttttttacagttcttccctgcaatataactacttttacgataaatgttgttgacaacataatatgctaacatcaataatttataaatgtattgtaatattaaattcactctatgtgccttctgaaaaaattagaaaatgtaccttttatcttcaagttgtactttttttttttccttcagacaggacctagttctgtcaccccggctggaatgcagtggcaggaacactgctccttgcaccctcaacctctggtgctcaagcaatcctcccgccacacctcccaactagctggagctgcaggccctcaccaccaagcctggctaatttgttagtactttgtagaggggtggtcccactatgatgctcaggctagccttcaactcctggactcaagcgatcaacccacctttgcttcccaaagtgttggggttacaggcaagccaccacacccatccaattgcaatctattttaggtgttttctttgttattctctcctgagtgttctatcaggtgggaataacaaaggctataaaatatgcagtctttaaatgttaggatttattttcatatagagaaagatcatgaaatattactaagaatacattgcagtcaagttattccgttttacttgggccctgaaaaaatataactaagttataaaattggctgggcacattgactcacacctgtaatcccagcac

SEQ ID NO: 702437 - DNA, 624 bp, Homo sapiens
tgaggcaggagaatggcgtgaacccaggaggtggaggttgcagtgagctgagatcatgccactgcaatccagcctgggtgacagagggagactccatgtcaaaaacaaaaacaaacaaacaaacaaacaaacaaaagttaatagcttctgaatcattataatttctcaagtgagtaggaatatatttttcttcaaagctcttgcaagattttctgccaatacatgatttagaatttcataatcaatatttrttgtttagaaaccctaaaagactgctttcatatttaattttttgtttctgtgattattaaattatttgcctttttaactaaaagaaaaaagacttactcctttttcttctaggtactaccaaaatgcttttctgggaagaacacaatgtacacatccaaactgtaatcagctattttctcttgtgcttgcggcttttcagagctggattatttgacgaagtacatgctgagggctccatcagagcaatagagatagagatgatagagatggagagagatagctacctctgtctaggtgcagatataaatgatgtagatgcagatataaggtgttccatgaaagggccataaatgcaaagtggtcccctcaaat

SEQ ID NO: 702438 - DNA, 2429 bp, Homo sapiens
ttcctttttatagaggagttcctatctgtgagccatggttttcagctgaggccgtgcattagaatccagggtggagtctttaaaaaattcagatacccagatacctttcttatcccctatggaatattgatttagaaggtttggggtggggatatgagcatttatatgtttctaaaagctcctgagttaattctaagggcaccctggttgatagccacattatggactgagtcccaggtctgtggtatcgagaccaccatactgactggccccagtaggccctggggcctggtctatggaccctgagcctgggttctagcttctgttacctctccctgatggagagggtccatttgagcaggggcttggctatatggagaaggttgatgggaagacatgaaaggagggcttggtaggtggagagaagggcaggatgaagcagaagactgtcgctagtgtagggaagacacggctgagttacagcttagcccagaatgcctgagagagagtggtgggagtccaggttggatgtgggtcagggccttgaacaacagacttcacgtgtactttactcttcataaaaagcagtggtggaggccagccctaaggtattgccaggtaataatagatggtgaatccctgtaacgtcacctctgtaaataaagccaagttttgtctttcttctcttcattatttccaggacagattatatagaatccagagctctttgaaataattaagaatgcactttgcttttcatgatctttcttaggaggattataaaaccgatggcttgttccacacattttgcctagaggcctgggtcctgcccaggcgatcccctggatttcttcacattgctccaggaacctcacatctcccagccaaggcaatcaattgcagcagaattccaaagggtttccctgttcatgatggggtttctgccaatgcctataaataaataaaatcaatgtcttttttgtgtttttgctgagctttattggttccccttatgagatgaggaaggataggataagaaatgaagaacttgtttgtatttaatcttcccgaaatatatttgggcagacattattatctgcattttgtggccaagaacattgaggcttaatcgaggttaagtaacttgcttgtggtcacaaaatagtaarttgtgaaactggggtagaaaaccaggtctttctggccccaaacccatgcttgctccattatgccacctcttcctgtctgggtggaaggtctgccaggggatgttgaggcatccctggtaaggttaaacctcatttacattttaaaccagacactagtctagaggcatgtctaggctgattgaaggatttggggcagatttagggtaggctatgtgcatgtgatgtctgggagattgataatgggctaaagttgggatggttgcaagaccaactttggctgctttgcagttttgcccagaactatagtagcatccagggagctggtgctcaagctgagatactagcctctctttggagttattaacatatgtgttctccaattcaatattgttctcctgcttggcagaggaggagaggtaaacagatgcacctgggcagattttcttgagtcgttccaggtaatcttttcataggatgtttctggctgctatttccctttcttagcactcctgggaacatgtacgggatggataagctcacggcactactgtgcctgatattgttgtgcggtctacccagtgttgtgggactgataaatctgagttgctagagtataatttccatgagggcagtgtccaggtctatgtatcttcagtatctagcacagtgcctgatacatagcaagtgctttaaaaatatttgttggataaacccaagtgttctggtttcacatgggcttttcttcattcagtgattctacatcaaagagatttccccagggctctagagagtatggagaagagttcattataatgcctttattttttcactgttatgtttttcttttaaccatgaagtcattttggggtccctttgttttgtttgtttgttttttagttctctagtcaactccttctgggatagccctgcattttaatcacatattagagaaaaatgaagtgaaaagggaagataaagctatcagcacaccttgatgacccctgagaacacaaaatcatggactctatttgctctgaggaactccacatccatggccaggctaggacatctgtggttagaaggggcagggcagggacagacagggactgacactcttcactgaaggaaaggccacaaagaactcaaagacagggctcatctctgcatggagcttaaatgtcatctcccctgtctatagcataggccaagttgccatgtgagtgcggagcagtggttggggaaggaatgtctttaatctta

SEQ ID NO: 702439 - DNA, 635 bp, Homo sapiens
ggacgggcgcggtggatcacacctgtaaatcccagcactttgggaggctgaggcgggcggatcacgaggtcaagagattgagaccatcctggccaacatggtgaaaccccgtctctactaaaaatacaaaaattagctgggcatggtggtgtgcacctgcactcccagttattcagggggctgaggcaggagaatcacttgaaccctgcaggcggagattgcagtgagccgagatcgtgccactgcactccagcctgggtgacagagcaaggctccgtctcaaaaaaaaaaaaaaaaaagacactgagacagtcccaatgccaatgagccgtgcacttaaaaattgttaaaatggtagattatatatataaccacaattcaaaaaataaccasataaaattttaggagcctgaagttatggggcgtgtatacagtgagggaccgcaccgcccgccggcagctttcatctgtcaactcctagtgagaagaacactcacccaccaaaaaaaggaaaaattgaaaatggtgctgatttcgagggtaagtgctagcttgcttgcagggcatttgaatatatgaagtcaaatggacaaattcaaacctgggtcttgttaccaggcaagttactgaaatac

SEQ ID NO: 702440 - DNA, 638 bp, Homo sapiens
ttaatatagttacaaaataaagcaatatagatggacgtttctgatggttctttgctaagtaatagcaaaacatatttttgcccttgaaagataatatataacttgatcataaaatattaatttttaaatcacgaagaaataaaaaatctgaagagaccaataatgagtgatgagactgaatcaacagtagaatgattcccatcaaagaaaagcccaggacctgatgacttcaatgctgaattctactaaacatttaaagaagaacaaatacaaatccttctcaaacatctccccaaaaattgaagagtaaggaatactttcaaactcatttcaatagacgcagaaaaagcctttgataaaattaaacatccattcacgatgaaaacycacaaatttggtatagaaggaatgtactgcaacccaatataggccatatatgacaaacccacagctaatatcatattcaatggtgaaaagttgaaggcttttcctgcaagatcaggaacaagacaagaatactttctcatcacttatattcaacatagtagtggaattactacacacagcaattaggtaagggaaaaaaataaaggcatccaactagaaggggaggaagctaaattgtccctgttggcaga

SEQ ID NO: 702441 - DNA, 2212 bp, Homo sapiens
tagttgcaagaagataaagtgttgagggagttaagaagggagatatttaggctgaatgaaaatattgagtggggagatgcatatctgcatatctgatgaagcaatgtgttaggggacacaggtgattagaatcaagaacaggagaaaagagtaacttttgacatatgtccctccttctgaccagctaccttgtctatcttcttgtagcacttgacacctagtctgatgtgcccattctagtccccaatgacaacaaatgccttgaacctggtccactggcaagcagaggtctgcttttgcacagacataatttttgaaactttatccttgaggagtgtccccaggaaaaattcaatgacctcagattccctgaggtacagagagataggactactctttctattttagatactcctcagtcatctctgcttttctctatgcttctgttctttctctcattctctctctcttaaaaatttcccatgattacttatcttactcatggttcaaaatgaacccctttagccatctatagcctagagaggtagaaacatagggtccattattcactcagcagaagttgtgacctgcagaagatcccttcaagaagtgtgagtagtgtagacattccagaataccaccatttctcttttaatcagaattttaatttctgcttttatccatccattttaccccataagtgatattattttatttaagagctttcagtaacactcatatttgaacaaactttgattgaatatgaaactgcatttatcaggcttgggcttgtggtgtaaaattctaatttactttawtttttatataatgggcagattgaatttaaatgatcatactcagaaaaatctcggtgtagtcaaaaccataaataaatgtgtaagattctgttactgcaaaatagcaatgttgtactgtggtcagcaatttaaacagcctcgcacatatttatagtaggcatcacatacagggtctgtttctgcctcacttaactttgggattaagatttgaacccgacctccttgcccttgagtttatctacctctttcaaagaaaacaaatcatttctatccaaagttaattataatttacatgcagtagatttcctaaattgcttccagatctgcattttaaaaataagcacactagaaagaaatatttgctctttaaaaataatatttgtttttgtccaaatgtaccttttctttagttacatatgttcagttaattttctctgtagtttaaaatggtgcctagaacacctttaaagagttagaatggacattgctatagaagagtgccttgatgttctattgctttattactcagctattatcatctggcaatgcaaatttatttgtaaaaattggcaaaaacatagctttctgggaaagttttatctattaaccaaaagtagagaggacacacagaattcctttcctgtatcaatactgattttggctatcttaggcctgggttgggaaagattttgaagatgggggtagagtgtcgcagagaactgtttagttgttgatctcagccagatgcatggaatgggaagctgtgctgtagctcccatctcagtattaatggcatatcagaactaaatgagtagcatttctcttaaaaacaagcaagtcagtaacaaaatatagcataggaaaaaagcatgtgtcactatatatattttcgtgtatgactgtgtataattctttgatctacttagatattagctgtccaattagtagtcagaagcatttgaagagagaaaaacatgccctcataactgctacctccactactgggggctaccgggatatgaggacataggacttagctctactcctttcccaaatgcaggagttataggaggactcccaaaggcagaccaagaccacaaattttacctgtccccaaatataaaggaacaaataggttttgttgctaagggagaatagaatgataggtggctatagaaggggttctcatgttgatgtaccattaactctggggcaagaagtcaaagaaaggaaaactgacactgtcttgtagaaataaacaggattgtgaggatagggagtagcagaaaagagaagggagagcgggaaaagataggccagatgctatttcaggagcctgcatcctaaaaataaatgtgctcagtagagaattcctgactgtggggtagtagaat

SEQ ID NO: 702442 - DNA, 2212 bp, Homo sapiens
tagttgcaagaagataaagtgttgagggagttaagaagggagatatttaggctgaatgaaaatattgagtggggagatgcatatctgcatatctgatgaagcaatgtgttaggggacacaggtgattagaatcaagaacaggagaaaagagtaacttttgacatatgtccctccttctgaccagctaccttgtctatcttcttgtagcacttgacacctagtctgatgtgcccattctagtccccaatgacaacaaatgccttgaacctggtccactggcaagcagaggtctgcttttgcacagacataatttttgaaactttatccttgaggagtgtccccaggaaaaattcaatgacctcagattccctgaggtacagagagataggactactctttctattttagatactcctcagtcatctctgcttttctctatgcttctgttctttctctcattctctctctcttaaaaatttcccatgattacttatcttactcatggttcaaaatgaacccctttagccatctatagcctagagaggtagaaacatagggtccattattcactcagcagaagttgtgacctgcagaagatcccttcaagaagtgtgagtagtgtagacattccagaataccaccatttctcttttaatcagaattttaatttctgcttttatccatccattttaccccataagtgatattattttatttaagagctttcagtaacactcatatttgaacaaactttgattgaatatgaaactgcatttatcaggcttgggcttgtggtgtaaaattctaatttactttaatttttatataatgggcagattgaatttaaatgatcatactcagaaaaatctcggtgtagtcaaaaccataaataaatgtgtaagattctgttactgcaaaatagcaatgttgtactgtggtcagcaatttaaacagcctcgcacatatttatagtaggcatcacrtacagggtctgtttctgcctcacttaactttgggattaagatttgaacccgacctccttgcccttgagtttatctacctctttcaaagaaaacaaatcatttctatccaaagttaattataatttacatgcagtagatttcctaaattgcttccagatctgcattttaaaaataagcacactagaaagaaatatttgctctttaaaaataatatttgtttttgtccaaatgtaccttttctttagttacatatgttcagttaattttctctgtagtttaaaatggtgcctagaacacctttaaagagttagaatggacattgctatagaagagtgccttgatgttctattgctttattactcagctattatcatctggcaatgcaaatttatttgtaaaaattggcaaaaacatagctttctgggaaagttttatctattaaccaaaagtagagaggacacacagaattcctttcctgtatcaatactgattttggctatcttaggcctgggttgggaaagattttgaagatgggggtagagtgtcgcagagaactgtttagttgttgatctcagccagatgcatggaatgggaagctgtgctgtagctcccatctcagtattaatggcatatcagaactaaatgagtagcatttctcttaaaaacaagcaagtcagtaacaaaatatagcataggaaaaaagcatgtgtcactatatatattttcgtgtatgactgtgtataattctttgatctacttagatattagctgtccaattagtagtcagaagcatttgaagagagaaaaacatgccctcataactgctacctccactactgggggctaccgggatatgaggacataggacttagctctactcctttcccaaatgcaggagttataggaggactcccaaaggcagaccaagaccacaaattttacctgtccccaaatataaaggaacaaataggttttgttgctaagggagaatagaatgataggtggctatagaaggggttctcatgttgatgtaccattaactctggggcaagaagtcaaagaaaggaaaactgacactgtcttgtagaaataaacaggattgtgaggatagggagtagcagaaaagagaagggagagcgggaaaagataggccagatgctatttcaggagcctgcatcctaaaaataaatgtgctcagtagagaattcctgactgtggggtagtagaat

SEQ ID NO: 702443 - DNA, 990 bp, Homo sapiens
tgtgtcatcttttcatcagactgtaaacatggggaaaaggttaatttctcatatgaagtgcrgagaatggtcattgagtaaccaaaatcaacatctgacctgttttgaccaacacaagaggctgttgggagtagacataaaactgaaattgccaatggtccagcagcaatcatgaatccacccaacaagttgggaaactctgagatggaaatggagttaggggatcagactcttcccaaattttactcagaagggtacaatacaggacaataataatgttgccctcaatgtaaaggaaagagtcattttccacaaaccactttactctatgctgatagaaaaatagcataaatactagcattcttataagacatttaattttgaatctacatttgatgataatccaggaaaattattgaacctgggccctcctcactacattgggctgatttagcgaatgatctgttaatgagttgttaatcacttattcaaattgggagggttgggtgattgagcaggtgctgaacctggaggaagaatctgctgcaataatacctcgcaatttctatttctctgagggaaggctcttcttgcttgaattccttattttttttcttccactttctagcagaatctcaagcaaaattgtctcctgatgtgtcctgaaattctggtggccagagtctagccttgaatgttacatgttgtttgctaatgcagacagtaattatagtacagcagcagtttggccatttcaactgaaaagccatataacttcagaaaagcaattactgatgtatcaatacatcttctggcaacaacaaactataaaactctaaacaattgtatgaaattgtatagtatatgaaaatatgtttacaggcactatctcatttgatcagatacaacaacctcatgacatgagaagatgaggaattacttttcaggtgatgcaatggaggattagaggagttaagaaactttgcccag

SEQ ID NO: 702444 - DNA, 322 bp, Homo sapiens
attgggtactatgctcrttacctcggtccaacatacccgtgtaaccatcctacgcatgtacctcctgtatctaaaataaagaattaaaattattaatgcagatttctgcgctccatcctgatctatcaaaccagaatctctgtgagtaggttccatgaatttgtattttacacactccccaagtagtgtttatgtacactaaagtttgacagttttagtctctcactgatttgccttacctattactatggccaacacatttaataagattaatgacctaacctctctgcctacagtatatgagaagtataacattagaaga

SEQ ID NO: 702445 - DNA, 322 bp, Homo sapiens
attgggtactatgctcattacctcggtccaacatacccgtgtaaccatcctacgcatgtacctcctgtatctaaaataaagaattaaaattattaatgcagatttctgcgctccatcctgatctatcaaaccagaatctctgtgagtaggttccatgaatttgtattttacacactccccaagtagtgtttatgtacactaaagtttgacagttttagtctctcactgatttgccttacctattactatggccaacacatttaakaagattaatgacctaacctctctgcctacagtatatgagaagtataacattagaaga

SEQ ID NO: 702446 - DNA, 600 bp, Homo sapiens
gggaattataatttcaacatgagatttgggtgggggcacaagccaaaccatatcatactccaagaagacaataatatataaaacaatcaatgtttgaagctaaatatagtgctaccaatacaacaacgttgtgtttattgaattaaattattttatacttctytcatttttaaatttaaattgatttaaattaaacacaattaaaataaatttcccctgtcacaccagtcacatttcaagtactgaataatgacatgtagctagtggttaccatactgtgcagcaactggtttagatcatgtctggattcaatgtccagttttcctattttctcaatgtgattgggagaaaattacttcattttctaagctttagtttctccatctggaaacgagagtgaaataacacaaccagctcacagaagttttgaaagggctaaacaatataatccaaagcaaatgcttattgcaggttttgaaacatgatttccattatacattgctaaagaagtgacattatttaacaactgctatataaatctgtgcaaacaagatggtttaataatttgcttttggcattgatgtaaatacaacacaaaca

SEQ ID NO: 702447 - DNA, 316 bp, Homo sapiens
taaaacaaaagcatattcttaaactatgtactgatgtgcatatttgraaactaaatattatgaagagaaaattgtttgtaaatgtaaattggacaattatatgcagaagcattatcaattatttttattagtctttgggaacaaaaaataatagacaatttacacacaaaagtatcactgattttttggagaatttgaaatatgcttgtgaatgagacaaaaatgtaatttttgaggtaacatatgagatggcatgctgttaaacatagtagttatattaacagttgccagacaattttagcaagttacattggag

SEQ ID NO: 702448 - DNA, 1148 bp, Homo sapiens
tgtttgctgtggtaactgacacaaagtaacacgcaataaatggtggttgctctcatccacctgttagtgatgatgctgataatgatgacaggcacactgacaaggacagttcctgattgtagcgctcctgtcattggggagagggaaaaaaaggatggcttaaaaaaawtttaagataaaaggaaacaaatttgggaaatctattctactgctctgtattggtctacaagtgagcacaatataagctttactgtgcttgtcttgagatgcaaagattgtttcttatcacaattaccctatgtgtgctaacatgggcaccactacacactggccaggtttggcggggatatgaaaagaaaagagggctgggcgtggtggctcacacctgtaatcgcaacactttgggatacctaggcgggcagatcacttgagcctaggagtttgagaccagccagggcagcatggtgaaaccttgtctctacaaaagatacagaaagttagctaggtttggtagtgtacgcctgcagtcccagctactcggaggctgaggtgggaggatcacctaagcccgcgaagtctgggctacagtgagccatgattgcgccaccacactccagcctgggcaacagagtgagatcctgttaaaaaaaaaaaaaaaaaaggaaaaggaaaagaagaagaaaaaggaaaagaaaaagggaaagggaaggggaaaggaaaaggaaaggaaaggaagttggtgaattggatatgttttatacagagtcaagtgaatgatgacctctgtccaaaacctcataaaatcaaatgtgttaggcttggtttttctcccatgccaccaaatctttcctctatttattttcaagtgaattatttttcttcctgggagaatcttcatgtaatctcccaggaagaaaaataacatatgtatattcataatacatatgaatatatataaaaataatatatattcatttactcaatttgaatgtaattaattaccagtttctaccctcagtgtgccttcttgtagagaaacattgttcctaacagctctggccaatctcctttctaacacagctgctttacacttcctccttctggtccagctgccttaggggagactgttcgacagaacttggcatgca

SEQ ID NO: 702449 - DNA, 2248 bp, Homo sapiens
ggatccttttgtaagaaatctgagcacccaattcatactgagccctacttttcctcctatttccctgggcatagagaaatagaagaaaaacttgaacagaggatattagggagaagaatcaggatgcagggcagtgattcacataagttaacttgtagacaggtgaagtgaaggaaggttttcaaatgtgtactcaaaaatgatgattgtgtgttcatatgatcaaacacaggactctcctgggtcctggttctgtcagggatactctcctaaacagctagattctgtaactaggtatatatatattttaatgctctcttctacacatgtctcaggaccacatagtcaccaagtcctcctttaaaattcctctgttaaaatttataattaaattttttaatttaaaaaatatataaaacttaacatttataatccctcctttaaaaggtatgtatttccactattcttcctattccctccctaaaaactctgcatccctaagccttattcattaattcattcattaatttaaaaatgagtacctactaagtgccagacacacaacatctttaggttcccccacttctaatctgttctacttgtatatcctgattttagggatacaagaaagacactttaccagccttaaaatgtgaagtcactgtggcctgaagctctacttttagatgcattattttctcttgaagtggtgctccagttactaataaaatgcaaattgccctgggaagtgtaatccttacctagcattaacacagaggcgattgcactgaagatggggggggggaggggcgcgggaaggggacagaaaagcaaacagccaaaagacccagaaaccaaaggggtaagtatgaagaattatttcttcaatggcaagaataacaatgccggattctcaggcgataccaccaagtagcacagttcatgctcctaaactaaattcttcctaaaaagtcctcccaccatacactttgtttcttacaaggcatccaagtacctaaattctacactgcattgcctttcaaggtttccccataacccaggctcacaacagcttgctttgtgctgtcagccttgtagccttcacctcccagggctcaccagaagtaaaacaagagaccgaagaagatggttttaaggcctcttcagttgcttccattttaaaatatttctctttagcaaatcctcttggttctagactagccagctttatcactacattttttacttacttatttattttatttatttattttttgagacggagtctcactctgtcgcccaggctggagtgcagtggtgcaatctcagctcactgcaatctctgcctcctggattcaagcaattctcctacctcagcctccagagtagctgggattacaaacgcccaccaccacgcccagctaatttttgtatttttagtagagacrgggtttcaccatgttggccaggctggtttcgaattcctgacctcaaatgatccgcctgccttggcctcccaaagcactacatcttttaaatgtttcacctagcaacctcatttgtacccccttaaacacccagctgcaatgctgctcctcttgaaagcttcagttcttataaatgtgccctatgcttgaacactcggagctcataaacttgggtcacaagctaccgtctactggttgtttcttgtacattagtcttgtgggccaagtacaaatgccttcaagaacaggatgtgcatctcaaacttctgttaccacccaccaacatgccaattcatgaaacagaaactgctttctcagaagctcctccttgaaaatgctcaccattccgatgccatagcatcccaaagtctaccttagtgcaagcttggtacaagcaatctcaaagggaccccggtctcacccattaaattcaactgataatgctcacagctgtaatgcaaagtgcttaaaaggtcacattttaaaagatcaaattgcaccataaaagccataagaggcagtagccatctttccccagggcctcagatagccctgtgactgctcttccaagtgttaaaaagctagagtcctccaaaaaagaaacactataaacagagtaaggctgttacaggattcttattattcttttgtctctaatattagttgtgaatgtccttgtatctatgggctttccttgagttcagcctattgtgctgggctcataaaaaaaaaaaaagtattttataaagtaacaaagtggc

SEQ ID NO: 702450 - DNA, 2248 bp, Homo sapiens
ggatccttttgtaagaaatctgagcacccaattcatactgagccctacttttcctcctatttccctgggcatagagaaatagaagaaaaacttgaacagaggatattagggagaagaatcaggatgcagggcagtgattcacataagttaacttgtagacaggtgaagtgaaggaaggttttcaaatgtgtactcaaaaatgatgattgtgtgttcatatgatcaaacacaggactctcctgggtcctggttctgtcagggatactctcctaaacagctagattctgtaactaggtatatatatattttaatgctctcttctacacatgtctcaggaccacatagtcaccaagtcctcctttaaaattcctctgttaaaatttataattaaattttttaatttaaaaaatatataaaacttaacatttataatccctcctttaaaaggtatgtatttccactattcttcctattccctccctaaaaactctgcatccctaagccttattcattaattcattcattaatttaaaaatgagtacctactaagtgccagacacacaacatctttaggttcccccacttctaatctgttctacttgtatatcctgattttagggatacaagaaagacactttaccagccttaaaatgtgaagtcactgtggcctgaagctctacttttagatgcattattttctcttgaagtggtgctccagttactaataaaatgcaaattgccctgggaagtgtaatccttacctagcattaacacagaggcgattgcactgaagatggggggggggaggggcgcgggaaggggacagaaaagcaaacagccaaaagacccagaaaccaaaggggtaagtatgaagaattatttcttcaatggcaagaataacaatgccggattctcaggcgataccaccaagtagcacagttcatgctcctaaactaaattcttcctaaaaagtcctcccaccatacactttgtttcttacaaggcatccaagtacctaaattctacactgcattgcctttcaaggtttccccataacccaggctcacaacagcttgctttgtgctgtcagccttgtagccttcacctcccagggctcaccagaagtaaaacaagagaccgaagaagatggttttaaggcctcttcagttgcttccattttaaaatatttctctttagcaaatcctcttggttctagactagccagctttatcactacattttttacttacttatttattttatttatttattttttgagacggagtctcactctgtcgcccaggctggagtgcagtggtgcaatctcagctcactgcaatctctgcctcctggattcaagcaattctcctacctcagcctccagagtagctgggattacaaacgcccaccaccacgcccagctaatttttgtatttttagtagagacagggtttcaccatgttggccaggctggtttcgaattcctgacctcaaatgatccgcctgccttggcctcccaaagcactacatcttttaaatgtttcacctagcaacctcatttgtacccccttaaacacccarctgcaatgctgctcctcttgaaagcttcagttcttataaatgtgccctatgcttgaacactcggagctcataaacttgggtcacaagctaccgtctactggttgtttcttgtacattagtcttgtgggccaagtacaaatgccttcaagaacaggatgtgcatctcaaacttctgttaccacccaccaacatgccaattcatgaaacagaaactgctttctcagaagctcctccttgaaaatgctcaccattccgatgccatagcatcccaaagtctaccttagtgcaagcttggtacaagcaatctcaaagggaccccggtctcacccattaaattcaactgataatgctcacagctgtaatgcaaagtgcttaaaaggtcacattttaaaagatcaaattgcaccataaaagccataagaggcagtagccatctttccccagggcctcagatagccctgtgactgctcttccaagtgttaaaaagctagagtcctccaaaaaagaaacactataaacagagtaaggctgttacaggattcttattattcttttgtctctaatattagttgtgaatgtccttgtatctatgggctttccttgagttcagcctattgtgctgggctcataaaaaaaaaaaaagtattttataaagtaacaaagtggc

SEQ ID NO: 702451 - DNA, 1607 bp, Homo sapiens
tttttgtagagatggggtttcgccatgttgcccaggctggtctcgaagtcctggctcaagtgatccacccgccttggcttcccaaagtgctgggattacaggcgtgtgtcaccatgcctggccaagtctagcatttaaacctttaactgaatgtaagggatgaagaaaagggaatgtgatttattttttatttttattttttgagacggagtctcgctctgtcgcccaggctggagtgcagtggcgcgatcatggctcactgcgagctccgcctcctgggttcatgccaatctccaggctcagccagtagctgggactacaggcacccaccaccccgcccggctaattttttttttttttttttttttgkatttttagtagagacggggtttcagcatgttagccgggatggtctcgatctcctgaccttgtgatccgcccgcctcggcctcccaaagtgttgggattacaggcatgagccaccgcgcccggctgggaatgtgatttattaataagatcaatgaattaaaacattgaagttgctctcatccctgcttccttccttcctctaagcatccagagagccctctgatcctttgggatcacagacatgggatatttttactctccagcatgaacacataggtggatttactgtgaaactactgaagcttacacttcagggtccctggcttcctcaaacagggcttccaagccctatatctaattttgcacttctttcttaagagttgcctgtaccaaatatataagcctcagggccccaaacctggatccagcctgagtgaatgtttttttagagccaggtctgatagaagcctgtttttaaggaattaccaggaactgagcatgctgtttttggccctcaggggtttctctcagaactaagaatttgggggctgtcctcagtcacaggtgcagcctgaagtctgttcccgccatgttcactctcctctatttaccatcacctgcccctgctgcgtcttcctttaaaatacagccctgggccctaagctttgtgctgattcaagctctttggaattcaagacatccaggaatccgacgctccaagaattttcccaacgacctctcagtgggccattcaggcaggaaaggatacacacattcctaatggggccaggggctgtgacttagcctgtgtgtggctgagagcctgctgaatacaaggtgctggcagttggcagggcttcccagggtggggacttcttgctgagctcatcagcaggcccagctctgtacccatttgtccagggaaaaaccaacccctaatggaactgtttgttttatactctctcatcgaagtcataaatgactcacaactagaatgttattaacgtgagaacagaggcctacctggcagaataattggttttggtcatttgctcagagtgccaggcaaatccacaaagcatatcaaattacaggttagaaacctgatgaataaacaagaataatactgtgagttctcaagggtacgtcctgtacctgttttgcccactgtcatatctccggcaagacacagtgaatacagcccctgacacattggaggtaatctataaagagttact

SEQ ID NO: 702452 - DNA, 1206 bp, Homo sapiens
gttgcagaaaacctcaggattaccattcttgttagtccaactcgttcattagtaacagtggcctcaagagctgagcccccatgcctggccagtctttccaagagatgcaacatgctaacagcaacccctgccctgatctggctggctgactgccgtgacctccacttggcccccgaggccccatcagctatcggaatactgtcctggcatctggcaactggtcattttatgacctgggtaaaggaagtgtggggtgttctttccttcttccttcttycttgccagagatctgttgtttcctgggtaggaagttccttttgccacatgaatggcgatcaatacggggcctggcctcacagactaatcttagtggccttagctgaggaagactgtctgcccaggtcccctccccctgcagaccatagggcgccgtggccatgggagcgtcaaagatctgctttccttcttgtgatggcccctgtagaacttcctcatgggccagaatcccggcttaaaagggagcctctctccaaaagtgcatgaacacgcttattccaaggaaaggtctttctctactaagaaaaatacgctttacagcctcccagaaatgaggacagcaataatattattttttccagttggtgcttgtatacatatatataccgttttattaaaatacgttttgggcttgagactttatagttttcataaaataactgccatgaacacgccagtcacccagtatctccacataacaggagccaccctgtgtgcagcccttgatcagggaagcttagcacagggaggttaagttacttggccaaggttgtacatctagtaggtgttggattcaaactcacaaagtctacctttagagtccaaactttcacccatttccctgtactgccacctctcactaccagctagcattttctttaagaaggagatgtattacatatatgaggaagaagatatatatattactatatcctcttttatatataatatataccctattatatacacccatatatatataattacctatagatatacacaactacatatacctatatatattctatattctatatatatataatatataatatataaattatatatagaatatatattatatatagaatatatattatatatagaatatagaatatatataatatatatagaatacagaatatatat

SEQ ID NO: 702453 - DNA, 1206 bp, Homo sapiens
gttgcagaaaacctcaggattaccattcttgttagtccaactcgttcattagtaacagtggcctcaagagctgagcccccatgcctggccagtctttccaagagatgcaacatgctaacagcaacccctgccctgatctggctggctgactgccgtgacctccacttggcccccgaggccccatcagctatcggaatactgtcctggcatctggcaactggtcattttatgacctgggtaaaggaagtgtggggtgttctttccttcttccttctttcttgccagagatctgttgtttcctgggtaggaagttccttttgccacatgaatggcgatcaatacggggcctggcctcacagactaatcttagtggccttagctgaggaagactgtctgcccaggtcccctccccctgcagaccataggscgccgtggccatgggagcgtcaaagatctgctttccttcttgtgatggcccctgtagaacttcctcatgggccagaatcccggcttaaaagggagcctctctccaaaagtgcatgaacacgcttattccaaggaaaggtctttctctactaagaaaaatacgctttacagcctcccagaaatgaggacagcaataatattattttttccagttggtgcttgtatacatatatataccgttttattaaaatacgttttgggcttgagactttatagttttcataaaataactgccatgaacacgccagtcacccagtatctccacataacaggagccaccctgtgtgcagcccttgatcagggaagcttagcacagggaggttaagttacttggccaaggttgtacatctagtaggtgttggattcaaactcacaaagtctacctttagagtccaaactttcacccatttccctgtactgccacctctcactaccagctagcattttctttaagaaggagatgtattacatatatgaggaagaagatatatatattactatatcctcttttatatataatatataccctattatatacacccatatatatataattacctatagatatacacaactacatatacctatatatattctatattctatatatatataatatataatatataaattatatatagaatatatattatatatagaatatatattatatatagaatatagaatatatataatatatatagaatacagaatatatat

SEQ ID NO: 702454 - DNA, 1403 bp, Homo sapiens
caatgcggaaaaggaaacttaaaggcatatttaaggtcacaaatctaattaagtagcagagcttgaactcaaactcaaagttaatctaggggggttgaatttaagggagttatcattaaatacatcaatacaaaaaaaattccaatattctctctctaaggttgcataactccctgtggcttccataggctatttggaaacaaatgtgaatatacatggtttctttctgtctattctttggctagttagaggtttcagcagttcttacctgcttatacaaaaggcagacagatacaattacaagggcggtttgaaataagtccagaatcttcctacccactgaccatgcagaatccaaacccttaatatgcataatgaaggcattacttcactttactttgtaatttctcctaaaacgcacacaaaccattacctcattcaaaatggcttggattgaaatagctgatttaaactgatgtttaaatcttagaacgaagccaggctgctgtctgtgtaagaggctgcactgccttattactgttttattttgattatatcagcaagtgagaatcaataggtcagacaggacctgtgaattgatgtttattcatatgcatgccttccagctgaatgtgattagaaatgatagtgtcattatgtaagtgctaatagtacctaaaatgtttgaatgctcactacgtactgagcactagtgtacatgctctacatggattacttcaaaacaaccctatgggcagggacggttattgaccccattttacaggtgaggttaatatcactttgcccaagggtcggcacctagcaattggcagtgccatgcaggcatttttacttcagagttagctctaaacatctaaatagtcttggcatgaaattctattattattggaggtcaaagggcatgactacattgtaagcagtacaatggaattgttttggaacctgaagtctcagcttcaatttctagtgcaccatttatcaatcrgtgtccttgggctaattacctcatttgctagtggaagataatagcattacctacctcacaggttggtatgaggtggataaattaattcatatgaaacattttagcataatgactaaaaaataataagtactcagttattattatgtgagttacctaactggctccatgagttgattcaggctctaaaaataggcaacagatgcattaggcagctttgattgctttctgtaacttgacatagcagctttacgttactcaatgatttagtacaatttaacatttgtagagctcctttctcacaaagataattgatctcaccaatcatcagccaacttgtgaactggctcagaatgagaaaacccataaatttcagatgcagaaacaggcaagcagtgaa

SEQ ID NO: 702455 - DNA, 518 bp, Homo sapiens
gagatttaattcttgygttggataaaggtcagaaacctcagtggaaaatcatggaaaatgcctagaaagtttctagccttacattagcacaaaatgggatcaatgtatttcagtcctagtcagagttgtcacagagtttctttaaagctttaaatttttattttaaactactttgtcttactaactgtctcagtagatttagaagttgttattaagaaatcattagggctatgcttcacattttaaacaaattttatttaaagatagctaagatgtcacatttggttacagctgaatgaataataattgaggtataaaaattttaaaaatcatttttagataatcgccctactgaattatatcaatcttatgattctatagttcttaaagcaattaattgctttttttcaaataaattgtattgtgtgtatttgaggtttacaacatgaagtcagaggatacatataaatggtaaaatggttactatagtgaaagagtaacataactatagtttcaca

SEQ ID NO: 702456 - DNA, 655 bp, Homo sapiens
tgttcttaaaaactaacattgtctctctcctagtactgctactggtcggtcttcgttcttagagctcccaagatggtggcaggccactcccgagatggtggcaggccgctcccgagatggcagcaagacttttattctttgacctggggttcttggcctcacggattccaaggaatgtaatcttgggccatgcggtgagtgttacagctctattagaagccgtgggtcatgaaagagaaccgtggaacccagcgactagtgttcagctcaattaggatgaacccaggcacttagccatgcaggaacaatggcgagcctctagcctgatccagagcggcaatgggcaactcactggatcagaagtgcagcagacaccctgccggatctggaagggtggaagtcagtggcaggtctgctacggcagcgatcggcagtggttgamggcgagcaaaagctcacctggaagtggaacaaacacggaccagaagagtgcgcagttgcaagatttaatagagtgaaaacagagctcctatacaatgggaggggacccgaagtgggttgccactgccagctcgaatgcctgggtttatatccggataattgtccctccctctgtgctctcaggtgatagatgattgactatttctttacctcc

SEQ ID NO: 702457 - DNA, 655 bp, Homo sapiens
tgttcttaaaaactaacattgtctctctcctagtactgctactggtcggtcttcgttcttagagctcccaagatggtggcaggccactcccgagatggtggcaggccgctcccgagatggcagcaagacttttattctttgacctggggttcttggcctcacggattccaaggaatgtaatcttgggccatgcggtgagtgttacagctctattagaagccgtgggtcatgaaagagaaccgtggaacccagcgactagtgttcagctcaattaggatgaacccaggcacttagccatgcaggaacaatggcgagcctctagcctgatccagagcggcaatgggcaactcactggatcagaagtgcagcagacaccctgccggatctggaagggtggaagtcagtggcaggtctgctacggcagcgatcggcagtggttgacggcgagcaaaagctcacctggaagtggaacaaacacggaccagaagagtgcrcagttgcaagatttaatagagtgaaaacagagctcctatacaatgggaggggacccgaagtgggttgccactgccagctcgaatgcctgggtttatatccggataattgtccctccctctgtgctctcaggtgatagatgattgactatttctttacctcc

SEQ ID NO: 702458 - DNA, 605 bp, Homo sapiens
tttttatctgggctcactggacttttcgagtcctcatatgaattttttcctttctaccatctagttttccacatataagcctaaaaaatgaattatgacttgctactatgagatcacatgcaaataaaagtgactcgatttgcccaatactagtttcctcaaagcactagccaaaccactcaggcccatggacaccagcacctccgcaaagggaagcacatcactgtgattatgcagaattcaccagcatcagccacaggattctctgcctctgaggctaatggcaattagctgagggcttgccagccagtcctctccaacagctcaactccagccscagacccagcagcacaccttccatcccacggcttcctccccaggtcagaacccacagaggggtcttgcctgtgcaaatacagaattcagggcagttttatttctcatcaaaaaacccaaaaccacagaccacccaaatgtgtctgaactgggaaacagacaactaaaccataacccatctacataatggaacccaactcagacatcgaaagcacacatcatggatgcacgcaagacacgggtgaatccacccagtattacattaagta

SEQ ID NO: 702459 - DNA, 605 bp, Homo sapiens
tttttatctgggctcactggacttttcgagtcctcatatgaattttttcctttctaccatctagttttccacatataagcctaaaaaatgaattatgacttgctactatgagatcacatgcaaataaaagtgactcgatttgcccaatactagtttcctcaaagcactagccaaaccactcaggcccatggacaccagcacctccgcaaagggaagcacatcactgtgattatgcagaattcaccagcatcagccacaggattctctgcctctgaggctaatggcaattagctgagggcttgccagccagtcctctccaacagctcaactccagccgcagacccagcagcayaccttccatcccacggcttcctccccaggtcagaacccacagaggggtcttgcctgtgcaaatacagaattcagggcagttttatttctcatcaaaaaacccaaaaccacagaccacccaaatgtgtctgaactgggaaacagacaactaaaccataacccatctacataatggaacccaactcagacatcgaaagcacacatcatggatgcacgcaagacacgggtgaatccacccagtattacattaagta

SEQ ID NO: 702460 - DNA, 615 bp, Homo sapiens
gacctttgggctcagagcattgctacctctgatcctgatgacaaatgccaatttgggtttgtgggtacatagaaagttgccagcttttcttgccatcctagctattttactctcagctctgtacatttgtctatattccttgtgatagtgcttcatttttttcctacaaaagcttcctccttgcctttcaaagcatcttttgggcaaacttctctctcgggctctgcgaaattcctccactttttcttaagggtttctggaacagcaggaaacttcttctctttgacaccctgtatggtttcagccagaaaagagctaaatatgatattttatacaatgatttttttttcttttgagacagagccttgctctgcaacctctgcctcagcctcccgagtagctgggattacaggcgtgggccaccatgcccagataagttttgtwtttctaatagagacggagtttcaccatgttggccagtctggtctcgaactcctgacctcaggtgatctgcctgccttggcctcccaaagtgctgggattacaggcgtgagacaccgcgactggccaaaatgcccattgaccccgacgtgataggaacgatttttttctttt

SEQ ID NO: 702461 - DNA, 2014 bp, Homo sapiens
  misc_feature 386, 387, 388, 389, 390, 391, 392, 393, 394, 395, 396, 397,398, 399, 400, 401, 402, 403, 404, 405, 406, 407, 408, 409,410, 411, 412, 413, 414, 415, 416, 417, 418, 419, 420, 421,422, 423, 424, 425, 426, 427, 428, 429, 430, 431, 432: n = A,T,C or G
  misc_feature 433, 434, 435, 436, 437, 438, 439, 440, 441, 442, 443, 444,445, 446, 447, 448, 449, 450, 451, 452, 453, 454, 455, 456,457, 458, 459, 460, 461, 462, 463, 464, 465, 466, 467, 468,469, 470, 471, 472, 473, 474, 475, 476, 477, 478, 479: n = A,T,C or G
  misc_feature 480, 481, 482, 483, 484, 485, 545: n = A,T,C or G
gcaagcagtttgggtttaaaaatatgtttatttctttaaaacagtagtactattggacttggtcttgctgcatattttttagcagttacctgtggctcagacgcgctccattcaggccctttacatcttggacttgacttttcctcatggatttggaaggctgttttagcttcaaaatctgcctttccttcaagtaaagaatttctattcagaaactttgagtttccataactcaccttcaattatctagtgtggaaaataatttgaatctcatggcatgggtatgagggattatgaggggtagaaatgaagtgtttccgtgggagacatggctgactaaaataaacgcagagagaatgtcttcttcgaactttgatgaactactnnnnnnnnnnnnnnnnnnnnnnnnnnnnnnnnnnnnnnnnnnnnnnnnnnnnnnnnnnnnnnnnnnnnnnnnnnnnnnnnnnnnnnnnnnnnnnnnnnnnctctgtcgcccaggatggaatgcagtggcatgatcttggctcactgcaacctctgcctcncaggtacaagcaatcttcctgcctcagccttctgaggtagctgagattacaggtgcccaccaccacatctggctaatttttgtacttttagtagagacagggtttctccatgttgggcaggctagtcctgaactcctgatctcaagcgatgcacccaccttggcctcccaaagtgctgggattacaggtatgagccactgtgcacagccgtgactactacttctttacaaattacaactttatcttcattctctgtctctataaataagattaattgagatactcaatcacaaagttgttcccactttctgaaagcatccagtctagaacaaatccccattcccttagacccacactcaagtcacccaaccaaagtccaaatattacacaattccccatggtgcatagtctctctctctctctgcagagagtgattaactcaatttattcaactgttggtatgctcttgatggtctttggttagaaggcattgacatgagtaacatgtcaagtaaatgcacatatctgatggcttgacaataaaatatatatcaagttataatctgtgatttacaaatagcacactgtagtctgcttaagaaaatgtaacaagagtgatgagataaggctagtgaaaatrataggtctaatatttcatgcctaagcatgtatattttatccaaggaaaaagggagcaataaaaaatgttaagaaacacaatagaagtttagaaagatcacactggaaacactaggacatataatgttagttactttccatttgtattatgttggtcacttcaggactagttaccatatatcaaacatggaggacattacttcagtttttatagtaagtagctgagcccagacagaaaactagtgccaagttcagtccatatgcctaaaattgagaccgagaggaagtagataaggcaatgtaagttgattgtatagtatcatttcttcttctagagcatgaaaaatgaatccattagaaaactttcatacattctgtaatgatggaatatcaagttattggaagaagaagaaggatagattttattttaaacaaagaaattgaagttctaaaaattaagagtgtgagttttctcaaaacattttaaaatcttttttcaaatccctggccctaccattgatctactcattctttgcaaatggccttgttatttcatcaaattccctttgttgcaattgagtatgattatttcttcactacctctctgctgttacagagattaagaactgtcactacgtcttggacatcatcattttgtaccttcttttgtgccatgacaaatcatttatttctcatcccttttctcttgaatttttgatatgttcatatttgaaatgatagaaccaaataagtcgtcagggaagagagttactactactactgagaatttttaaggccaagagaaagccctgaatggtcaaacacaacct

SEQ ID NO: 702462 - DNA, 2014 bp, Homo sapiens
  misc_feature 386, 387, 388, 389, 390, 391, 392, 393, 394, 395, 396, 397,398, 399, 400, 401, 402, 403, 404, 405, 406, 407, 408, 409,410, 411, 412, 413, 414, 415, 416, 417, 418, 419, 420, 421,422, 423, 424, 425, 426, 427, 428, 429, 430, 431, 432: n = A,T,C or G
  misc_feature 433, 434, 435, 436, 437, 438, 439, 440, 441, 442, 443, 444,445, 446, 447, 448, 449, 450, 451, 452, 453, 454, 455, 456,457, 458, 459, 460, 461, 462, 463, 464, 465, 466, 467, 468,469, 470, 471, 472, 473, 474, 475, 476, 477, 478, 479: n = A,T,C or G
  misc_feature 480, 481, 482, 483, 484, 485, 545: n = A,T,C or G
gcaagcagtttgggtttaaaaatatgtttatttctttaaaacagtagtactattggacttggtcttgctgcatattttttagcagttacctgtggctcagacgcgctccattcaggccctttacatcttggacttgacttttcctcatggatttggaaggctgttttagcttcaaaatctgcctttccttcaagtaaagaatttctattcagaaactttgagtttccataactcaccttcaattatctagtgtggaaaataatttgaatctcatggcatgggtatgagggattatgaggggtagaaatgaagtgtttccgtgggagacatggctgactaaaataaacgcagagagaatgtcttcttcgaactttgatgaactactnnnnnnnnnnnnnnnnnnnnnnnnnnnnnnnnnnnnnnnnnnnnnnnnnnnnnnnnnnnnnnnnnnnnnnnnnnnnnnnnnnnnnnnnnnnnnnnnnnnnctctgtcgcccaggatggaatgcagtggcatgatcttggctcactgcaacctctgcctcncaggtacaagcaatcttcctgcctcagccttctgaggtagctgagattacaggtgcccaccaccacatctggctaatttttgtacttttagtagagacagggtttctccatgttgggcaggctagtcctgaactcctgatctcaagcgatgcacccaccttggcctcccaaagtgctgggattacaggtatgagccactgtgcacagccgtgactactacttctttacaaattacaactttatcttcattctctgtctctataaataagattaattgagatactcaatcacaaagttgttcccactttctgaaagcatccagtctagaacaaatccccattcccttagacccacactcaagtcacccaaccaaagtccaaatattacacaattccccatggtgcatagtctctctctctctctgcagagagtgattaactcaatttattcaactgttggtatgctcttgatggtctttggttagaaggcattgacatgagtaacatgtcaagtaaatgcacatatctgatggcttgacaataaaatatatatcaagttataatctgtgatttacaaatagcacactgtagtctgcttaagaaaatgtaacaagagtgatgagataaggctagtgaaaatgataggtctaatatttcatgcctaagcatgtatattttatccaaggaaaaagggagcaataaaaaatgttaagaaacacaatagaaktttagaaagatcacactggaaacactaggacatataatgttagttactttccatttgtattatgttggtcacttcaggactagttaccatatatcaaacatggaggacattacttcagtttttatagtaagtagctgagcccagacagaaaactagtgccaagttcagtccatatgcctaaaattgagaccgagaggaagtagataaggcaatgtaagttgattgtatagtatcatttcttcttctagagcatgaaaaatgaatccattagaaaactttcatacattctgtaatgatggaatatcaagttattggaagaagaagaaggatagattttattttaaacaaagaaattgaagttctaaaaattaagagtgtgagttttctcaaaacattttaaaatcttttttcaaatccctggccctaccattgatctactcattctttgcaaatggccttgttatttcatcaaattccctttgttgcaattgagtatgattatttcttcactacctctctgctgttacagagattaagaactgtcactacgtcttggacatcatcattttgtaccttcttttgtgccatgacaaatcatttatttctcatcccttttctcttgaatttttgatatgttcatatttgaaatgatagaaccaaataagtcgtcagggaagagagttactactactactgagaatttttaaggccaagagaaagccctgaatggtcaaacacaacct

SEQ ID NO: 702463 - DNA, 2014 bp, Homo sapiens
  misc_feature 386, 387, 388, 389, 390, 391, 392, 393, 394, 395, 396, 397,398, 399, 400, 401, 402, 403, 404, 405, 406, 407, 408, 409,410, 411, 412, 413, 414, 415, 416, 417, 418, 419, 420, 421,422, 423, 424, 425, 426, 427, 428, 429, 430, 431, 432: n = A,T,C or G
  misc_feature 433, 434, 435, 436, 437, 438, 439, 440, 441, 442, 443, 444,445, 446, 447, 448, 449, 450, 451, 452, 453, 454, 455, 456,457, 458, 459, 460, 461, 462, 463, 464, 465, 466, 467, 468,469, 470, 471, 472, 473, 474, 475, 476, 477, 478, 479: n = A,T,C or G
  misc_feature 480, 481, 482, 483, 484, 485, 545: n = A,T,C or G
gcaagcagtttgggtttaaaaatatgtttatttctttaaaacagtagtactattggacttggtcttgctgcatattttttagcagttacctgtggctcagacgcgctccattcaggccctttacatcttggacttgacttttcctcatggatttggaaggctgttttagcttcaaaatctgcctttccttcaagtaaagaatttctattcagaaactttgagtttccataactcaccttcaattatctagtgtggaaaataatttgaatctcatggcatgggtatgagggattatgaggggtagaaatgaagtgtttccgtgggagacatggctgactaaaataaacgcagagagaatgtcttcttcgaactttgatgaactactnnnnnnnnnnnnnnnnnnnnnnnnnnnnnnnnnnnnnnnnnnnnnnnnnnnnnnnnnnnnnnnnnnnnnnnnnnnnnnnnnnnnnnnnnnnnnnnnnnnnctctgtcgcccaggatggaatgcagtggcatgatcttggctcactgcaacctctgcctcncaggtacaagcaatcttcctgcctcagccttctgaggtagctgagattacaggtgcccaccaccacatctggctaatttttgtacttttagtagagacagggtttctccatgttgggcaggctagtcctgaactcctgatctcaagcgatgcacccaccttggcctcccaaagtgctgggattacaggtatgagccactgtgcacagccgtgactactacttctttacaaattacaactttatcttcattctctgtctctataaataagattaattgagatactcaatcacaaagttgttcccactttctgaaagcatccagtctagaacaaatccccattcccttagacccacactcaagtcacccaaccaaagtccaaatattacacaattccccatggtgcatagtctctctctctctctgcagagagtgattaactcaatttattcaactgttggtatgctcttgatggtctttggttagaaggcattgacatgagtaacatgtcaagtaaatgcacatatctgatggcttgacaataaaatatatatcaagttataatctgtgatttacaaatagcacactgtagtctgcttaagaaaatgtaacaagagtgatgagataaggctagtgaaaatgataggtctaatatttcatgcctaagcatgtatattttatccaaggaaaaagggagcaataaaaaatgttaagaaacacaatagaagtttagaaagatcacactggaaacactaggacatataatgttagttactttccatttgtattatgttggtcacttcaggactagttaccatatatcaaacatggaggacattacttcagtttttatagtaagtagctgagcccagacagaaaactagtgccaagttcagtccatatgcctaaaattgagacygagaggaagtagataaggcaatgtaagttgattgtatagtatcatttcttcttctagagcatgaaaaatgaatccattagaaaactttcatacattctgtaatgatggaatatcaagttattggaagaagaagaaggatagattttattttaaacaaagaaattgaagttctaaaaattaagagtgtgagttttctcaaaacattttaaaatcttttttcaaatccctggccctaccattgatctactcattctttgcaaatggccttgttatttcatcaaattccctttgttgcaattgagtatgattatttcttcactacctctctgctgttacagagattaagaactgtcactacgtcttggacatcatcattttgtaccttcttttgtgccatgacaaatcatttatttctcatcccttttctcttgaatttttgatatgttcatatttgaaatgatagaaccaaataagtcgtcagggaagagagttactactactactgagaatttttaaggccaagagaaagccctgaatggtcaaacacaacct

SEQ ID NO: 702464 - DNA, 1211 bp, Homo sapiens
taaattgaaaagtgcttttcaagcattaggtgaatgctgcatgtaaacatatcagaatgacttttaggattaaataaataaataagcaaacaaacataaataaataaagctcttagatggaaagagccaactatttacaaaggaataccaatcggatggagagcagattctttcacgtgcaacaagtgaccttagaagaaaaagatgttttcctactgccaagaaaaccaagacatttctaccaagctaaactrttattagaataaaggccaaataaagacaccctcagaaaataactaaggtagtcttccctacagatacttaccaaaaaaaataataataataaattaaaaggtgaatttaccgagatgaaaaacagacacagaggaaaagatggactgtaagacaaaaagaaggaacatacaaaattaaactaactattgactataaaaggataggaaactgaatgtattgaataaactatttagaattagtgaaaatacagccataatgacaatgaataattggattaggctcacatttaaaatgagagattatgagaatggacaaataaatgagatatcattccacacttactgcttagaaaatatttatctaaaaacaaaattacatgaaaatattaaaggtaattaaaaagatttactaggcaaatactagtaactatgacaatgacccttaagatgtagcagtgtgaaactcagtaaatacagaatttaagcaaaaagcatcaactggcataaaagcacatactacatatgaacaaaagaaaatattcaaaaggcacagataatcatgagcttatttctaacaatgtagcctaatatacaaagatgagaggagagagagagagcacgcatgaaagggaagcagaatccagcagaatttgacaaagcaattgacaagttcacaatgatagtgtcagaaactgataaatcaagcatacacaaaagatagtaaacatacagatttaaacaacaaacctgttttaacacctaaagagatagacatagatatatactgtgtgtgtttataaaaatactgcaaacaataaagtaaatatgtatacttttaaaagtataaataaaacatttactaaagcaagcaacagagttccaggaaaaaggaaaacaacttgtggtgctataactggggacactaacaaccagctttcaccaaggagaggacaataa

SEQ ID NO: 702465 - DNA, 1836 bp, Homo sapiens
ccggccttggccagcgcagaaaggggctcccgcagtgcagcggcgggctgaagggcttctcaagcaaggccagagtgggcgccaaggccgaggaggcgccgagagctgccggcacgctgtcacctctcaacgagatgtgctggggggcagagctggggttgtgagaccaccaaaatgcatgccagttcctgacgcagtgttaccgagtgaaagggctcgctgccccatgcactagaagccgatactatggcaccaggtttttgagaaaacgaaagcttgttatcgcagttcgaccaacaaggagacagaagtccagctcaaatctttctgtgccagctttaaggcagtgtcttcattagaaaatgtttaagccgggcgcggtggctcacgcctgtaatcccagcactttccgaggccaaggcgggcggatcacgaggtcatgagatcgagaccatcctggctaacacggtgaaaccccatctctactaaaaaatacaaaaaaattagtggtggcagacgcctgtattcccagctactcgggaggctgacgcaggagaatggcgtgaacccggcaggcggagcttgcagtgagcggagatcgcaccactgcactccagcctgggcgacagagcgagactcccgtctcaaaaaaaaaaaaaaaatgtttagcgggtggattctgagatgaataggtgattagtggaagggaaggaaaggtctggaaagtcctcgggcctccacagtggtatcttcatgcctcttcatgggtcataggtgcaaatttggggggcgctagtgtgaaaggtgcagtggaaaggctgtgaggtcagcgggctcattctgcatagactccrgctggccatatggattccaactgatttcagccagtttttttaatctcataagcagaggaagtttcagcatttcagcaagaggtttcttttcttatctgccatcctgcaaacttaagaatttctgttagtcattggtttctttctctttggggcatagtttcaacagagtcctgaaaaagctcaaaaattgaaggcaccaattacctctgaatgcacagacatagagtaagattggacacagaaaatcagctgaaaatagctaaaggcagcagttagacccccagatctctttccccaatctgcacagccaggaaattacctctgcctaatcctgggggaaatataagattatttttggctgggcacggtggctcacgcctgtaatcccagcactttgggaggcagaggtgggctgatcacaaggtcaggagttcaagaccagcctggccaatatggtggaaccctgtttctactaaaaatacaaaaattaggcaggcatggtggcgggcgcctatagtcccagctactcgggaggctgaggtaggagaatcacttgaacctaggaggcagaggttgcagtgagccaagatcgcgccactgcactccagcctgggcgacagagccagactccgtctcaaaaaaaataaaatgaaataaaataaagattattttctggggaaaccaggcacagctgagtgtcaggttgcaattctatgctgaaaacaacatactggacagggggattccccgcccccacacacccaagcttcctggacaccagcagcctggcttacaccctctgagtcagagataagagatctggggagactgagcataaccaacagacatggcctagagatgctggcatctggcatccccatcacccccagcaaagtcctctagttgaaaagttccagtaatgcacacagtttccaatgagctcacagggccttactttaactatgacagccaagcaccacca

SEQ ID NO: 702466 - DNA, 711 bp, Homo sapiens
tgttggccgggcactgtggcccatgcctgtaatcccagmactttgggaagccgaggcaggcagatcacctgaggagttcgagaccagcctggccaacgttgtgaaaccccatctctactaaaaatacaaaaatcagtggtggatggtggcgggtgcctgtaatcccagctactctggaggctgaggcaggagaattgcttgaacccaggaggtggaggttgcagtgagccgagatagcgccattgcactccagcctggatgacgagtgagattctgtctcaaaaataataataataaaaaaaaaattttaaaaaaggttctctgttcaatttctaaggtgctagggtgagggctggaacataggaactttgaggggagcatggttcagtccataacaagtcctggatagcaaagtggatagcgagtcggctgtgtgagagtaactcatctctgggctctggattccaggggtttggacatgaagtcatccactgagcatggggctctacgtgggttcctgaacgtttacccaccagagtgcgtatgcaaaatgtgcctggtatgggatgatgaagtggatgtgtatgatggtgatggttgcacaatggtgtgtatgtacttagcgcgaccaagctatacaattaaaaatggtgtaaatggtaaatgttatgtcttgtctatttttccacaaccaaaaaaaacgtggatggc

SEQ ID NO: 702467 - DNA, 1379 bp, Homo sapiens
acatgggaatgattgagagaaaaacaggaggtgcttgatttggtttgtatctgcatgtaacaaaaccactgaaaagaataaaatttcaaaactttattcttttaattcattgagtaaaaacaacactccgggaaaatgagccaagtaataaatagcctgtgacgccccaaaggctcacacacgtgcctggatgtgacaagctcaggctctgggaggtctgccctggtctggacatgtgcagtgtgcttaagaccatggaggaggcgtgggggctctttgctccactgcagctcctgcctctccaggtcatttagttaccagaaaaaatgaccagtttattaatactccaaacatagtagccataattggaaaatgcgtccactgcagtggctgggcctgggtcctcttcccttttcagctttatttcccagcatgaagggagaagttgtacaatcctagagaagacttgctcctgagaacaggcatggggggaaaaaccgagcccagtcatgagtaggatctggacaaagatgtctaagaattaggacctcagtccacatgcaggtttagcctacggcttcaggggaatgaacatactgtactggaagtctgccctgatcactctgtgtccttgagcagaattatgcatggaatccatgcaaaggcattgtatcagacccaatttattgggcccatctgctccccaggccttgagccacttatgcaattgagccacagctgctactaccaacacctcatctcctaacaccaccagctgtcccagccttcactaggatgagatcccagccctggcaaggcctccattgttyttgctgaagccagagtcgcagcaggtctggccacaagccttggcggatcagacccacgaacctctgggcattcccaccaccccctaaggcgggcgaagcaccaccacacaggatctgggtccctctgtggctgcctggagaagctgatgatacagcctggaagtggaatgagtgcatcctgggaaggactttgagccatgagagacataaggcaggaaagagataacttcttctccctaatgaaactactccagtgctcagtggttccagatgtcttgcatttttggatgaggttatggtcagcctagttagtgcgccatctttcatttgcttccccacctttcctgcctcacctcccttttcctctcacttttgctgccctgggattgtaccttcctccaataaagtgttagtaaatgcactttacacagtccgttttctaaggaacccaagctaagacaatctcctttcctactcttattctgcactaatcccccacaggaaaaccttctaatgtttctaataagtatttccttttttgtatatata

SEQ ID NO: 702468 - DNA, 599 bp, Homo sapiens
ccatgcacccccaccccaaggttatgccctcacctcccctcttgaaataaataaataatgtcacattacttgttgcacaagctaagggagaagtggacctctgaggagaagaaaattcaggattcagtcgacatgtatgtttaggagccaggaaaatataggtgagactggattctgagtgtgctagaccaaaaggaacagaacaaaagtttaggtaaaggaaagtttatcactatgggacatttttgcagaatataggatttaatactgttgcaaggacctgctgctcaagctaccaggagggttccagaagcaagaaaatgtgattacccacattcagtgaggtggaagtgccagaattacactggcagagagtagcaaaatgtgatggaattgttctatatcctgattgtagtggtggttacatgaatctagtcatgtgttaaaggtcacagattataaattaaaaaattaattttatagtatgtcagtgaaaactttgtcacaactaatatatagtcagttaatagaaaacaatgctctatcacattacttatgaaagaaatgcaaattcaaataacaagaarcacaatttctcc

SEQ ID NO: 702469 - DNA, 2296 bp, Homo sapiens
atgatacggcttatattaactctttaaaagcattcaattgcatcattattatagttgtgcatatttagatattaattatctccagtcatactatgaagaattcatctctatactgtataacacagcctaagaaaaacaatttttccaacaagattatttaggatgaaggaaaatgtgaaatgcagatgtggttttaacaagactcaacaatacacactctttcatctactgaactaatgcaaaagttttggacagttttatggcattatcttcactgaaatgtggagactcattcctttattggccttacatgtttttttgtttgtttttgttttgcctccttgacaaataccagcttgccttctgtaggtgctgggaaatatgaaaatcaacccctctctgacatacacacatacaatccctgtcccagtcttaatcaagtgaggaggattcaccatgtaaactaatccaaatatacaataagcaaagtagaagagtgtaaaagttattctggaaacctgaaagaaagaactcaacctgaaagagactcgatagtcaaggaattgtatttactgaggtgtctcttaaaagatggccactatcaataccaaattatacttcgggaccattttaccacctccttcccatgtattataaatgttacagggtcaacagtaagcatgcacctttcagtgcaacgagcattgctcctattaaaaaccttctcagattggtactgagttctcaccctgttcttaccactctcatttccaggtagaggaggccttgtagaattctaagacaaaatgaagttagtaaggacactgtagatggaactttggaagaaaactgctttctttcatctcatgttgctttctttcatgtcatgggctgatagagaaattggtgggtgccttcaagcttgggggagccccctgccattyatagggctaataagaacaactatatttatgcctacatccagggatagtttcattacccccagtgtttctgatgcagaaacggaatgaatggggaactattcagctaaagaagcaagtagagctcatatcttgaagagccttatgttttcctttgaagacaacgttaagtcactgaaaggttttaagcaggaaaataatattttttgttagtatttgtgttccagatatatcagttttgtggcaaggcatagaacgattggaagaaggagagactgcagatagatatgttaaaaactattgcaaataaatcaatgaaggagagcagagaatagctttgggagacagacttgataactgatttgatgaagtaaaagaaaaaagaaaatatgtgagaattttttttcagtgtttgaagttttattttggtatatgatttaagaaatattgtttccccaaatatttaattattccctcatcgtttttgaataattacttgttctcccactgatttgaaatgtgggaagctattatttgttgacttttggcactgtgttgaaatatcttacatatacatatacacatatatacatatatacatatatgtaaatgtataaaattgcttttaatcttcacaacaactctttagggtagaaattattattcccattctacacaattttttaaactggccaggattatcccacggttaatcattactagagttcttactattttaataaggaaaacattattgcagaacacacagactacttttaaagcattatgcaaatgtatacttcaattttcataacatattcaactaatttccattcaattaacatgtatcaaactcttactatgtggagaacacaaagcactaaaaggtacaatccttgccttcaaaacactttcagttatgaaaataagacatataaatatggaaagtgaaatgaatcaaaactatacaattggagtcaaatgaatataggcagtaattaccagagaaaaggatttatacaagttggatcactggggaaagaatcagaggaggggctgagattgagttaggccttgaatataaaatacgaagtagaaaagatgcgagaagcctatgagctgaaatgcctggcatagagtagatgctcaattaaaaaaatgagccccaaagtaggaggtacaacaggatcaaagaaatgagcaagcaaaattcaagatctagcctgtagttgaacccatttcatctagtagcaaaaattatttagaaggctgattatggtctatcgatgacctcaaataccaacataagcaatttgtacataattatgtctttaaatatatgcacaattacctcc

SEQ ID NO: 702470 - DNA, 2296 bp, Homo sapiens
atgatacggcttatattaactctttaaaagcattcaattgcatcattattatagttgtgcatatttagatattaattatctccagtcatactatgaagaattcatctctatactgtataacacagcctaagaaaaacaatttttccaacaagattatttaggatgaaggaaaatgtgaaatgcagatgtggttttaacaagactcaacaatacacactctttcatctactgaactaatgcaaaagttttggacagttttatggcattatcttcactgaaatgtggagactcattcctttattggccttacatgtttttttgtttgtttttgttttgcctccttgacaaataccagcttgccttctgtaggtgctgggaaatatgaaaatcaacccctctctgacatacacacatacaatccctgtcccagtcttaatcaagtgaggaggattcaccatgtaaactaatccaaatatacaataagcaaagtagaagagtgtaaaagttattctggaaacctgaaagaaagaactcaacctgaaagagactcgatagtcaaggaattgtatttactgaggtgtctcttaaaagatggccactatcaataccaaattatacttcgggaccattttaccacctccttcccatgtattataaatgttacagggtcaacagtaagcatgcacctttcagtgcaacgagcattgctcctattaaaaaccttctcagattggtactgagttctcaccctgttcttaccactctcatttccaggtagaggaggccttgtagaattctaagacaaaatgaagttagtaaggacactgtagatggaactttggaagaaaactgctttctttcatctcatgttgctttctttcatgtcatgggctgatagagaaattggtgggtgccttcaagcttgggggagccccctgccatttatagggctaayaagaacaactatatttatgcctacatccagggatagtttcattacccccagtgtttctgatgcagaaacggaatgaatggggaactattcagctaaagaagcaagtagagctcatatcttgaagagccttatgttttcctttgaagacaacgttaagtcactgaaaggttttaagcaggaaaataatattttttgttagtatttgtgttccagatatatcagttttgtggcaaggcatagaacgattggaagaaggagagactgcagatagatatgttaaaaactattgcaaataaatcaatgaaggagagcagagaatagctttgggagacagacttgataactgatttgatgaagtaaaagaaaaaagaaaatatgtgagaattttttttcagtgtttgaagttttattttggtatatgatttaagaaatattgtttccccaaatatttaattattccctcatcgtttttgaataattacttgttctcccactgatttgaaatgtgggaagctattatttgttgacttttggcactgtgttgaaatatcttacatatacatatacacatatatacatatatacatatatgtaaatgtataaaattgcttttaatcttcacaacaactctttagggtagaaattattattcccattctacacaattttttaaactggccaggattatcccacggttaatcattactagagttcttactattttaataaggaaaacattattgcagaacacacagactacttttaaagcattatgcaaatgtatacttcaattttcataacatattcaactaatttccattcaattaacatgtatcaaactcttactatgtggagaacacaaagcactaaaaggtacaatccttgccttcaaaacactttcagttatgaaaataagacatataaatatggaaagtgaaatgaatcaaaactatacaattggagtcaaatgaatataggcagtaattaccagagaaaaggatttatacaagttggatcactggggaaagaatcagaggaggggctgagattgagttaggccttgaatataaaatacgaagtagaaaagatgcgagaagcctatgagctgaaatgcctggcatagagtagatgctcaattaaaaaaatgagccccaaagtaggaggtacaacaggatcaaagaaatgagcaagcaaaattcaagatctagcctgtagttgaacccatttcatctagtagcaaaaattatttagaaggctgattatggtctatcgatgacctcaaataccaacataagcaatttgtacataattatgtctttaaatatatgcacaattacctcc

SEQ ID NO: 702471 - DNA, 2296 bp, Homo sapiens
atgatacggcttatattaactctttaaaagcattcaattgcatcattattatagttgtgcatatttagatattaattatctccagtcatactatgaagaattcatctctatactgtataacacagcctaagaaaaacaatttttccaacaagattatttaggatgaaggaaaatgtgaaatgcagatgtggttttaacaagactcaacaatacacactctttcatctactgaactaatgcaaaagttttggacagttttatggcattatcttcactgaaatgtggagactcattcctttattggccttacatgtttttttgtttgtttttgttttgcctccttgacaaataccagcttgccttctgtaggtgctgggaaatatgaaaatcaacccctctctgacatacacacatacaatccctgtcccagtcttaatcaagtgaggaggattcaccatgtaaactaatccaaatatacaataagcaaagtagaagagtgtaaaagttattctggaaacctgaaagaaagaactcaacctgaaagagactcgatagtcaaggaattgtatttactgaggtgtctcttaaaagatggccactatcaataccaaattatacttcgggaccattttaccacctccttcccatgtattataaatgttacagggtcaacagtaagcatgcacctttcagtgcaacgagcattgctcctattaaaaaccttctcagattggtactgagttctcaccctgttcttaccactctcatttccaggtagaggaggccttgtagaattctaagacaaaatgaagttagtaaggacactgtagatggaactttggaagaaaactgctttctttcatctcatgttgctttctttcatgtcatgggctgatagagaaattggtgggtgccttcaagcttgggggagccccctgccatttatagggctaataagaacaactatatttatgcctacatccagggatagtttcattacccccagtgtttctgatgcagaaacggaatgaatggggaactattcagctaaagaagcaagtagagctcatatcttgaagagccttatgttttcctttgaagacaacgttaagtcactgaaaggttttaagcaggaaaataatattttttgttagtatttgtgttccagatatatcagttttgtggcaaggcatagaacgattggaagaaggagagactgcagatagatatgttaaaaactattgcaaataaatcaatgaaggagagcagagaatagctttgggagacagacttgataactgatttgatgaagtaaaagaaaaaagaaaatatgtgagaattttttttcagtgtttgaagttttattttggtatatgatttaagaaatattgtttccccaaatatttaattattccctcatcgtttttgaataattacttgttctcccactgatttgaaatgtgggaagctattatttgttgacttttggcactgtgttgaaatatcttacatatacatatacacatatatacatatatacatatatgtaaatgtataaaattgcttttaatcttcacaacaactctttagggtagaaattattattcccattctacacaattttttaaactggccaggattatcccacggttaatcattactagagttcttactattttaataaggaaaacattattgcagaacacacagactacttttaaagcattatgcaaatgtatacttcaattttcataacatattcaactaatttccattcaattaacatgtatcaaactcttactatgtggagaacacaaagcactaaaaggtacaatccttgccttcaaaacactttcagttatgaaaataagacatataaatatggaaagtgaaatgaatcaaaactatacaattggagtcaaatgaatataggcagtaattaccagagaaaaggatttatacaagttggatcactggggaaagaatcagaggaggggctgagattgagttaggccttgaatataaaataygaagtagaaaagatgcgagaagcctatgagctgaaatgcctggcatagagtagatgctcaattaaaaaaatgagccccaaagtaggaggtacaacaggatcaaagaaatgagcaagcaaaattcaagatctagcctgtagttgaacccatttcatctagtagcaaaaattatttagaaggctgattatggtctatcgatgacctcaaataccaacataagcaatttgtacataattatgtctttaaatatatgcacaattacctcc

SEQ ID NO: 702472 - DNA, 1102 bp, Homo sapiens
tgcacttccaaagtcttaaaatgatttctgttcatcaacaagaatcttttattatgatttcattaaagcacctgcacttggtcattgtatccactagaaaataagatgttacatataaacatataatcaaaacaaaatcattcttcactgtgattgtttcatatcattttatactttcttaaatccaaccaagatgaaatttgtttccttatggcaataagttcagctatacttttttcctcattataagtagttacatttataacaactctcctacagcatcttgagcaaccaagaacaagtgatttgctatacacaagtaaaggtgaaggaatttcgaaatgyggaagatctgtacagtctttttagatttgctagaatagtataatatgactttaacatttgaaactttttataagaaatgctaatattttgtattaaatttcatagaatggtaagtaatgaatgggaatatttcatatacattttattcgagagagtaaaataaattagctcttgtttgactatatagatattttaaaataagacaatataaggtaattgttagttcttaactgctttgtcacagctaactattttcaataagagattttttaaaataaaatatatttttatgacgtcttaatgtagcatagcaaatgaaaactttatcctatttaatttaatagttacctagttggctagtttagaaagagattaatttatgaactctttaagaaacacctctcagaatgggaagacctttctgcatataaaaaatacattgttcttcatctccttgcccgtaaattggagaatgtgattatcaataaaacttcttggattaattatctaagaagtctgagtatccctgaaaaggtgacaatgaatcaaatatgtctccttttccttctgtattcccgcctgactgctaaggcatcatttaaggtattgcacaataactcattttaagctgcttaacaagaatcatgaattatggaactgcttctatatccagctctatcttagaatactatgtctacattttgcctctgtgtcttatgaagaaatgaatggtcccgagaaaattcatccaaaatgt

SEQ ID NO: 702473 - DNA, 1337 bp, Homo sapiens
agtgggatgtctgcccacatcatctgttataatgatctgctcctactcatagggactctttcactgaggctctctttttacaatcttacatacccacctgcttacataggaaatataattctccccttatgtgatcctgagctgctcttaataaacatgatggtgagaaatgctccaggcctgttttctgctcactatttaatagcttcccaaaagtgaaagagcagtaattaggtaagaatacatttttttgtcattgatgggtaaaagaaaaaaaattatggttgagggctgacagaaagttgtgaaatacagactatatttgctacatctcttaatgaataaagtcacaattcattgcaatgtgtgtaaccaacacaactggaatatttttggccttttaaagttcagtaatggtgttaatatttatgcaagatatatgaaggacccccaagttgatatcaataaggtagagatcaaacatccaaatattttttctactgtcaggaaaatattttttgaaacagtgcttacacatgactccaattgtcggaatcctgtgggagaaagtcaatgatataactttattaaaaagtaaactgagtctgtaatggtagctacctcaaatcttgaagggccaaagtaagcaagggataaggagcatcagctaaaaggccacaaaaagggcataggacttggaagagccaagcacaggagcacagaggcattcctttgtgtgtggatggtggctgtatctttaagggtaccttgagagagggcacatgggaagaatgatggtattttcctttaaaagctttttgggttgtacayagattgtgggatttagaaacagcagactttactattttttaattatataactttgtacaagtcacttaatgtcattgattctcagcctcttcagaaatagactagacattttagtatctctcacgtagctgttaagataaaaaattaaatacagtgatataagagggccttataagagaaccagaacatacgaatgatgtttttgcaaatctattttttcctcttgtgcttcctcttagcactctgaacttgaaattttagtgatcaacatcccagaaaggcttttttaaaaatttcttgttggtgtttctttttccccaagaagaaagagccagagagaaaatagctaaagaattatgaatttacttcatagctttaattagtggcatacatattagtgtagtgtctaaaagagtttgcttgatcataatcgactgtcccagtattatgccttacaacacatttcattatcatacatatgaaataagacatgtgtttataagaac

SEQ ID NO: 702474 - DNA, 1309 bp, Homo sapiens
tgttattttaatatgcatgtatttgattactagtgagactgatcatcttttaataggaatagcaggcactgtgaggccttccatatcctccagcttccacctctgtagccactggctgcttactcagaggacctgttgaaacrggaaagttcctgactcccccaacacaggatgtgcaacagaggtgtggctccactgtgtgtgctcaaaccccttatgggagaggcggcacgcatatgggcaggtacgggagccagggcaagcgcccctgggctctggccccacagcagtgtccaggggtggaagcctgtgactcccaaagcccaagtgggcgtgtgtcatggtgcgctcctttagccttgctgttcgtggatgacttaagtgttaaccaggtcagtgccctcttggtacccaggtgattgtccggagtccaggaagaatccggtggcacatggacttgaaggatgaatgcggggattttattgagtggtggagatggctctcagcaggatggatggggagctagaagcagaatgaactggaaagatgatcttcttctggaggttggctgtccagtggcccacctcctctccaaatgtccccagccaaaatcttctcggcattcagacgctccttctcttctgtcatgccgtgctgccattcttctgctcttctgttcgtctccttgtggagccaggggtttggggtatgggtacatgatagggggtgtggtgggccaaaagtcaactttgggtgcaaaaacaggaatgcctgtcccactgagggccgcaggtctccaggcttggggaggggcatatgccagggagctgccctcttctttccagcatttccctgtctcctgtccagatcactgtgactgctgagagtgttactatggtttacagcaggaagaagctgtgcaagagtagcaggaagtgccagagaattaacactccaaggagcaaccaagttgaggtataggtgcccagtggcaccctgttgaggggtaaatatcccgcttgttaggtgcggtaactctggggaatgttttacactgtctcccagagctccctggcaggactgaatcccagttgcccacaaaggaaatggcttgaggtaccctttgctggcttccttcctttccctatttcacttccccacttcctgtcagtgttttctaggatcatctcccaagtaaacaacttgaacttgaatccttgtctcaggatctctgtctgggctagggaacccaaaccaagacaatacgtttttctttgtttgccttatttagtcaattacctgatcattc

SEQ ID NO: 702475 - DNA, 1309 bp, Homo sapiens
tgttattttaatatgcatgtatttgattactagtgagactgatcatcttttaataggaatagcaggcactgtgaggccttccatatcctccagcttccacctctgtagccactggctgcttactcagaggacctgttgaaacaggaaagttcctgactcccccaacacaggatgtgcaacagaggtgtggctccactgtgtgtgctcaaaccccttatgggagaggcrgcacgcatatgggcaggtacgggagccagggcaagcgcccctgggctctggccccacagcagtgtccaggggtggaagcctgtgactcccaaagcccaagtgggcgtgtgtcatggtgcgctcctttagccttgctgttcgtggatgacttaagtgttaaccaggtcagtgccctcttggtacccaggtgattgtccggagtccaggaagaatccggtggcacatggacttgaaggatgaatgcggggattttattgagtggtggagatggctctcagcaggatggatggggagctagaagcagaatgaactggaaagatgatcttcttctggaggttggctgtccagtggcccacctcctctccaaatgtccccagccaaaatcttctcggcattcagacgctccttctcttctgtcatgccgtgctgccattcttctgctcttctgttcgtctccttgtggagccaggggtttggggtatgggtacatgatagggggtgtggtgggccaaaagtcaactttgggtgcaaaaacaggaatgcctgtcccactgagggccgcaggtctccaggcttggggaggggcatatgccagggagctgccctcttctttccagcatttccctgtctcctgtccagatcactgtgactgctgagagtgttactatggtttacagcaggaagaagctgtgcaagagtagcaggaagtgccagagaattaacactccaaggagcaaccaagttgaggtataggtgcccagtggcaccctgttgaggggtaaatatcccgcttgttaggtgcggtaactctggggaatgttttacactgtctcccagagctccctggcaggactgaatcccagttgcccacaaaggaaatggcttgaggtaccctttgctggcttccttcctttccctatttcacttccccacttcctgtcagtgttttctaggatcatctcccaagtaaacaacttgaacttgaatccttgtctcaggatctctgtctgggctagggaacccaaaccaagacaatacgtttttctttgtttgccttatttagtcaattacctgatcattc

SEQ ID NO: 702476 - DNA, 1309 bp, Homo sapiens
tgttattttaatatgcatgtatttgattactagtgagactgatcatcttttaataggaatagcaggcactgtgaggccttccatatcctccagcttccacctctgtagccactggctgcttactcagaggacctgttgaaacaggaaagttcctgactcccccaacacaggatgtgcaacagaggtgtggctccactgtgtgtgctcaaaccccttatgggagaggcggcacgcatatgggcaggtacgggagccagggcaagcgcccctgggctctggccccacagcagtgtccaggggtggaagcctgtgactcccaaagcccaagtgggcgtgtgtcayggtgcgctcctttagccttgctgttcgtggatgacttaagtgttaaccaggtcagtgccctcttggtacccaggtgattgtccggagtccaggaagaatccggtggcacatggacttgaaggatgaatgcggggattttattgagtggtggagatggctctcagcaggatggatggggagctagaagcagaatgaactggaaagatgatcttcttctggaggttggctgtccagtggcccacctcctctccaaatgtccccagccaaaatcttctcggcattcagacgctccttctcttctgtcatgccgtgctgccattcttctgctcttctgttcgtctccttgtggagccaggggtttggggtatgggtacatgatagggggtgtggtgggccaaaagtcaactttgggtgcaaaaacaggaatgcctgtcccactgagggccgcaggtctccaggcttggggaggggcatatgccagggagctgccctcttctttccagcatttccctgtctcctgtccagatcactgtgactgctgagagtgttactatggtttacagcaggaagaagctgtgcaagagtagcaggaagtgccagagaattaacactccaaggagcaaccaagttgaggtataggtgcccagtggcaccctgttgaggggtaaatatcccgcttgttaggtgcggtaactctggggaatgttttacactgtctcccagagctccctggcaggactgaatcccagttgcccacaaaggaaatggcttgaggtaccctttgctggcttccttcctttccctatttcacttccccacttcctgtcagtgttttctaggatcatctcccaagtaaacaacttgaacttgaatccttgtctcaggatctctgtctgggctagggaacccaaaccaagacaatacgtttttctttgtttgccttatttagtcaattacctgatcattc

SEQ ID NO: 702477 - DNA, 1309 bp, Homo sapiens
tgttattttaatatgcatgtatttgattactagtgagactgatcatcttttaataggaatagcaggcactgtgaggccttccatatcctccagcttccacctctgtagccactggctgcttactcagaggacctgttgaaacaggaaagttcctgactcccccaacacaggatgtgcaacagaggtgtggctccactgtgtgtgctcaaaccccttatgggagaggcggcacgcatatgggcaggtacgggagccagggcaagcgcccctgggctctggccccacagcagtgtccaggggtggaagcctgtgactcccaaagcccaagtgggcgtgtgtcatggtgcgctcctttagccttgctgttcgtggatgacttaagtgttaaccaggtcagtgccctcttggtacccaggtgattgtccggagtccaggaagaatccggtggcacatggacttgaaggatgaatgcggggattttattgagtggtggagatggctctcagcaggatggatggggagctagaagcagaatgaactggaaagatgatcttcttctggaggttggctgtccagtggcccacctcctctccaaatgtccccagccaaaatcttctcggcattcagacgctccttctcttctgtcatgccgtgctgccattcttctgctcttctgttcgtctccttgtggagccaggggtttggggtatgggtacatgatagggggtgtggtgggccaaaagtcaactttgggtgcaaaaacaggaatgcctgtcccactgagggccgcaggtctccaggcttggggaggggcatatgccagggagctgccctcttctttccagcatttccctgtctcctgtccagatcactgtgactgctgagagtgttactatggtttacagcaggaagaagctgtgcaagagtagcaggaagtgccagagaattaacactccaaggagcaaccaagttgaggtataggtgcccagtggcaccctgttgaggggtaaatatcccgcttgttaggtgcggtaactctggggaatgttttacactgtctcccagagctccctggcaggactgaatcccagttgcccacaraggaaatggcttgaggtaccctttgctggcttccttcctttccctatttcacttccccacttcctgtcagtgttttctaggatcatctcccaagtaaacaacttgaacttgaatccttgtctcaggatctctgtctgggctagggaacccaaaccaagacaatacgtttttctttgtttgccttatttagtcaattacctgatcattc

SEQ ID NO: 702478 - DNA, 669 bp, Homo sapiens
acttaggggtgttaccaaattcttttggctttatacaaatcctggggagccttgcaacagaagaggctctccagccgcttgcttgagctcgctcccattttgtaattgtacttccgcctcttcataaatctgtgccttcgttactctgttctttagttgctttgtttgccttttgttgctttgttcctttgttgcttcgttcccttgttgcttcattctctttttgctttgtttgtgcrttttgttcaaatttttgttcaacacaccaagaacctggacaactcacagttaagaccttccatctggtaaaagtgatggtaattgttaagacatatgttctatttatttatttatttgtttatttatttttgagacaaggtctcactctgttgcccgggcttttgtagtggcacaatcatagctcactacagcctcgatctccctggcttaatcaatccttctgcctcagcctcccaagtagctgggacaacaggtgtgtacccccatgcctggctactttttaaattttttatagagatggggtctcactatgttgcctagtctggtctccaactcctgtgctaagtgatcctcctgccttggcctcccaaaatgctgggattacaggcctgagccactgcgtccagcctgctgattgttaaagagtat

SEQ ID NO: 702479 - DNA, 626 bp, Homo sapiens
aaaaactcttgtaaactctaataatagattctaaacctccaaatatgagaatctatagaaatgtactctgcctggtggtagaaatttgaattaagggatactaaggaaagttgatattagttcattaaagtatctgccatgctatcactacagacaaggaatatacgctaatatmactgaccaataattttatagaatctgcagttccacaaaaatgttttagtaaatagtgtgaaacatgagaggaaatggtaatttttaattttcttcttctttactagaggggctgaattactcatggcgtcccaaatctctcttaatgcatagtatgaggtctgtagttgttaagactgactcaacattttcttaaaagaattctgaattgaatctttctgaagaagaaaaaaaaaagatcacttaccatttcattatttttcatcctcattcacctctgaacttcctggttctgtctggggccaaagtaaaaatgccaaaacaccacgggaaaggctgctctcacagtatttctggctcaccaaaaatttttggagaaagccagtttccatgagatttcagttccaattttatagacccaagaaaactcaagatagttcagataaagttca

SEQ ID NO: 702480 - DNA, 597 bp, Homo sapiens
gaaaactctgcaacagagatggcacgtatgaattgctgtgatctggagttgaagacaagaacaaaagtaactctagagcagaattctttgaccaaagtcatcttactggttggcggaggctctcagtctacttgcatccggtgcttgagagttcagacaggcaaagatgagaggtagcatctagtcaacatccatttcttgagcacttactacatgtcagccactttgcttagtccccggttttactgtgctctgctagraagtggtgaagagattcggcgggatcttcttaggaccaatcctacaaagttccagatggaactcattttgatttgggggacggtttacttgcagggattaggtggagaaacagggcctgctactcaagaggaatgagaaactgtaactaacaggaggtagactgggaaggagcatggcaaagtcaccccttttcacagggcaacgctccaaagaccacgctcaagctggggtggcagggctctgaacatggggccccgacccgggcctcggcctggggccacgtgacgcgcgtgtttacgttgagtgacgggcgctgtgttgggcgggccttggcgg

SEQ ID NO: 702481 - DNA, 527 bp, Homo sapiens
ctctggtcctgcccaactcattctctgtatgtttctgcctttgactcacattccttgaggcacaattccgaggcttcctggatgacagtcaccatgaactccatctcccctaccagctgtttcctcccccatgctcccactctggccaccaacttgcccaacccactgcctgtggctatgcctttgtagagaagaggaggggctggcttggatggaagggcatctcccgtccccgtgggtcctggaatgctcatgtgcatgtctgggccctcaaaatgagcctgaaaatgracccatgatcttcctgctaaacattcccattccccttccctatttcaggaggcagcaactccatccttccaaacatgcaggacaaagttttggagtcctctttgagttgccgcttcacaccccatcacaagtctcatgggctctgctcacctgcaaaacataccctaacttaggccacttaccctacctccatcgcaaacgccctcgtcgacactatcaccaccttgtgcttggac

SEQ ID NO: 702482 - DNA, 527 bp, Homo sapiens
ctctggtcctgcccaactcattctctgtatgtttctgcctttgactcacattccttgaggcacaattccgaggcttcctggatgacagtcaccatgaactccatctcccctaccagctgtttcctcccccatgctcccactctggccaccaacttgcccaacccactgcctgtggctatgcctttgtagagaagaggaggggctggcttggatggaagggcatctcccgtccccgtgggtcctggaatgctcatgtgcatgtctgggccctcaaaatgagcctgaaaatggacccatgatcttcctgctaaacattcccattccccttccctatttcaggaggcagcaactccatccttccaaacatgcaggacaaagttttggagtcctctttgagttgccgcttcacaccccatcacaagtctcatgggctctgctcacctgcaaaacataccctaacttaggccacttaccctacctccatcgcaaacgccctcrtcgacactatcaccaccttgtgcttggac

SEQ ID NO: 702483 - DNA, 1131 bp, Homo sapiens
acaaccaacgcagtgtaggagggttggggcaagaaggtggatttcttttgaatctgagaagctgtgtggattgagggcatcacacctcagctctcagatgcccagaatcacaggaacacaccatctgattcctccttattcgtgtggcagctacgacagcttcagatgtgcacagcacaagcaccgcccctaacatttccactgttatctgtaaaccataaaagcagaaatgcaacctgcacatcatgggcttacactcccaggctccccaagcctgcatctcaaatacagcctcgaatccaactttcagccagaaacatggaggtggaggagggtgagccccatttcatagaggagaaaatgtaggctcaaagggtgacacagaactgaatccactgctggatgtctccaaagtctgtgttaatttttaatagaccatgttgcttcccaattaaatcagaattacttctagggagttggtaattctcatgtctgagcatcagagttgttcatgttgcattgttacagtgacacacctaggagatgcacagggaaagcagtgcatacacattgggtgtgtgtaaatttgtactccactctatctgcaaaaaaggctcctgtaamatatgcacacaattgtatcctgagccctgggcagtgtgtgaggtgtaattgatgctgtaaaatatttttgataaggtattcagagtaagacattccatacagaaagtcctgttactttatattaagattctataattcacggactggagagatgttgcttaagagctgaacattctatggaatttaagagtctttgggaaagttattaatttgtgaaatgcagtgctgttctgaaaagcacagctccagttatatacaccaaattgtgcctattcgctattttttcactgatgaatgaggtgagaatgatcgaaacaagaataacttattagagttgtcgctattacaacttagttttgaagtaaagtgctgatgctagaaaacctgagctctgtttctcacccatcgctggctcataaagactatcttagtgttatttgctcaatgggggatttcctgcactgtttacataacactgcgcttttatgacgagctctgtaattattt

SEQ ID NO: 702484 - DNA, 914 bp, Homo sapiens
tttcttcgatttctgttgaaaaagataaccggaagagatttgtctccacatgttttcccttgagaccatgataactcccctgcttctttgtcataatataatgcacagggatcttgattattttgatatcccatagaacatcatgtgtgggcactccctcagtaacagtgtgctcattgtacacggtaaggaaaacttcccatcatgaactgggtagcatctgagtcaccagatcatagaggtgggcacagcacctgtagttacatggaaaagatctaaatgagactgactcaaacaagtacasaaggtacaagtaaatggcatgagcacgtagctttctccccgtcaaggtgcctcttccttatgcttcactacttctccctctacccacactgatgacctcatagggaattcctgctcaccagtctccagtttatggaggggttttcagggtgtaaaatccactaggagtggccttcaaagagtggtgaagggaaatcctcatttgggcagactttgggtagtacagtcagatggctgcctatttcacctggaagagaagagcaggagtaaggctcaacattgtcattggcagaggttaacaggtaagtgactggctagaaacttggaaagaccaatactggaaaattggtgatagggaagcctgggctagagatgtgtgggtgggtctctcagaatgagcacagagaagacaatcatttcttacaaaaatgcccaccagagggcatccactccagtgccagctctcagtaatgactaagtgtggatgccagttagcctctttccccagccaccccagtgcttgctcaggctcttatcccaagtggccctgaaggtatggctggggtcaagaagcctggactttccccagcgaggcttatttggttcctgac

SEQ ID NO: 702485 - DNA, 677 bp, Homo sapiens
aaatacgtgcatgcacacacacacacagatgtatatataaacatagcataaatatacatatatatgtatatgcatacataaatgtaatatgtgcatatatccatgtatacacatatatatgcatgtgtcatttccaatgttgtactgcctcactaattttggtaatttgaaaataatacatttctatggtaatacaagagcagagatatactcggtatcaaagtggtactaaatactgtttatacagcctgtttcatgagatgctgaagatgtactgtaaacagtaatacttacacgaaattaaagtctaccagtgttatccttgggctgccaattgattgtggttcatggatttcatttactttgtgtgagtgcatcaatgttcttttaaagcgcagggagagtttacaactataatttttactaatgattgctgataggtttttcatgatttagatatcaggaatcttgaaatcaaaactaatagcaatagacaagaagtgataaacagatacttagaaaggtataaggaaacaagagaagggcgcttcattacaagaatgagcttggggagcaggtgtgaccagagagtgkagaagctgtgctaaaagccaggctttgatgtaacttggaggaagtatttagaacagttagagaatagccacttcctagagcca

SEQ ID NO: 702486 - DNA, 605 bp, Homo sapiens
tattattttaaaatatctaattttcctataccatttccttcagtttggagagcactgtctaattgctttcttccctactgaaatgrtactagatgattaaccacgttaaagaaaaaggtcctccacacccacacatccatgtctcacctgaaagattcctgcccttgtcatgatgaagtgaacatgactactatgatcaaggttgtatctccatagcagctaggacattaaatggtgagatgcaggaaatttacacacactcatgcttgtgtagccatttcattcatagtgtggagatctgatttcagtgtataaatgattcgtaaatcagtttgtatcaaatgcgtagtcatatggatcccttaacagagagtaaaagacaaatacatgtgaattaggattcctggttttgaaatgatagtaatcacattataataatcttaaaatatttttattaattgaacactcaaacatattgtttaataggtgctaggcagtatggtaagcatgtgacatgaattatcttaatcctcaaaataagcctatgaattgtgtactattactaattaccatgctataaatgagaggcgtattaatctattctt

SEQ ID NO: 702487 - DNA, 610 bp, Homo sapiens
ctttttttcctgatgcttttcccttgggctaacattctcaaatgaacatgtggaactcaagccctttacttaggttctgcttttagggttcaaattttggcttccctgttttctaccatgtcatcttgaacaggttacctaacatcgctgcgagaatccactgaaagattgtagagggaattaagtgcaattacaaatataaagcatctggcttgccacagcctgagagtccaagggaagcgtcatatacttctgtatatccaaggacagaactaaataaaggagagggattaattggcacctccaggcagtttccagtcagtttatgaaagagatattcatgtgaaaacatttaatttccaacccgcctgtttccatgaatgatggtaaaaataatacaatcttactttcacatcaattatgccagtttcttgttgtctcactactakgaagaactttctcaaattaaagaaaatttggaaaactcacacccagaattaaagtaagatactgaacctgtataaaactccaaatgttcaccattccttgtcaagaattttatctaggaaaaaagaatactggattatctttctaccaaaatgccaggaag

SEQ ID NO: 702488 - DNA, 643 bp, Homo sapiens
ttgttttaatttttttagctttcaaataagtgagaacatgtgaagtttgtctttttgtgcctggcttatttcacttaacataatgacctccagttctatccatgctgatacaaatgacaggatctcattatttttcatggctgaatggtactccattgcatacatgtaccatattttctttatccattcatctgttgatggacatttaggtygtggaagcaagcatttcttaacacagtggaagcaagcatttcttaacacaactctctctcttcctcaacctggtagaggttggtgtccctaaagtattgttggtaataatgctgccaccatcatactagttcctcagtgcctaccgtgagccacatgtctgacctaacacaggcctctctgctacaggacttctcagagccttaactatatgaacatacatttatcaatctatttgaagaatctagtatgcagtatttcgaattcttatttgacagataatgcttttcgcaagcatgtccttaaactgctattctatggaaacactggttggagtatctcccgtgcaacctctaatgacaagcgctgtgctgcacagggtggtactctttcaaatgaagttgcaggccaggcgtggtggctcacgcctgta

SEQ ID NO: 702489 - DNA, 612 bp, Homo sapiens
aataaaataatttttttaaaataagaatacaattggccgggcatggtggctcacacctgtaatcccagcactttgggaggctgaggcggkcagatcacttgcagtcaggagttagagaccagcctggccaacaaggcgaaaccccatctccactaaaaatacaaagatcagctgggcacggtagcgcacacctgtagtcctagctacttgggaggctgaggcaggagaattgtttgaacccaggaggtggaggctgcagtgagcagagatcatgccactgcagtctaccttgggtgacacagtaagaatctgtctcaaaaaaagagaatacaattctaagggaattgtcccttagaataaaatccattgtccttaggataaaatccaaattcccttggctactaaaaccttgctgcaatccaccccctacctcgctctccagcctccattctgggctcactactccatcataccacattgtgggcagtcatgcgaccactcctccagccctcccaccagactgctccctagaagctcatcactcccagacccaacagtgcgtggcccacaataaccctcaagtgcttctactgaaaccattaaattgggttc

SEQ ID NO: 702490 - DNA, 545 bp, Homo sapiens
gcagtttttaaattaggagggtgtggtggcacaagcctatagtcccagctactgggaaggctgaagtaggaggatcgcttgagcccagaaggtcgaggctgcagtgagctatgatcatgccactgcattccagccttggtgacagagtgagacaccatctcaaaaacatggtgtgggggctgggtgctgaggcttatgcctcccagcactttgggaggcygtggcggatggatcacttgaggccagaagttcaacaccagcctggccaacagcaaaaccctgtctctacaataaaaagaaaaatagaaaaaataaacaaataaacatggtggtggggacaggaagccccctgttgttcatctctaggctctttcccagtatttatactcagattcatgctgttgcctgcaaaaaaggttggcccccagttgcctctggataatatgatttagaaaatttgctctggcagtttgcagacaattgctgccgtaaataattgttcaaaacttcatggctgggtgcagtggctcacacctgtaatccca

SEQ ID NO: 702491 - DNA, 643 bp, Homo sapiens
gaacaaaaaaccaaacactgcatattctcactcataggtgggaattgaacaatgagatcacatggacacatgaaggggaatatcacactctggggactgtggtggggtcgggggagcggggagggatagcattgggagatatacctaaggctagatgatgagttagtgggtgcagcgcaccagcatggcacatgtatacatatttaactaacctgcacaatgtgcacatgttccctaaaactkaaagtataataaaaaaaaaaaagaaaaaaaaataagaaaaactaatccgtcattctgccaaataaagatgcctctgggaaatccaaaaaaaaaaaaaaaaaaaaagcaatcacaatgttgccacaactgttgagctagacatcaaattataatatcaggcagacaaacaggaacacattactagctacccatagatttctaggggtaaagtggtaactttccacatttgtggaaaagtgatctttactcaggaacataatttttctatgtctaggggaaagatccttaatgttaagtctgagaatcccattcagcaggccttactgagcttcactcctccccacaaaagcagccacccttgataaggcacactagtgataacaaagttcacacatctata

SEQ ID NO: 702492 - DNA, 643 bp, Homo sapiens
gaacaaaaaaccaaacactgcatattctcactcataggtgggaattgaacaatgagatcacatggacacatgaaggggaatatcacactctggggactgtggtggggtcgggggagcggggagggatagcattgggagatatacctaaggctagatgatgagttagtgggtgcagcgcaccagcatggcacatgtatacatatttaactaacctgcacaatgtgcacatgttccctaaaacttaaagtataatawaaaaaaaaaagaaaaaaaaataagaaaaactaatccgtcattctgccaaataaagatgcctctgggaaatccaaaaaaaaaaaaaaaaaaaaagcaatcacaatgttgccacaactgttgagctagacatcaaattataatatcaggcagacaaacaggaacacattactagctacccatagatttctaggggtaaagtggtaactttccacatttgtggaaaagtgatctttactcaggaacataatttttctatgtctaggggaaagatccttaatgttaagtctgagaatcccattcagcaggccttactgagcttcactcctccccacaaaagcagccacccttgataaggcacactagtgataacaaagttcacacatctata

SEQ ID NO: 702493 - DNA, 618 bp, Homo sapiens
ctccagcctgggcgacagagtgagactccgtctcaaaaaaaaaaaagggtggaagttacacacttttgaaagatgwgtgcctctactccagggcttattctattctgctgcctatgtactttgttgtttcttttgcctggaattcaggcttctctccctttcgtaggatgtggtgaatcctgctggatttcgagatttagcttgaagattctttttttctataactttcctatgaaataccccataacattaaaccagagtcatttcttactcctctaggcactttgttcattttgttcttatggccctattcccattttcttctggccagtatagttagttctaatatgtaatatattatgaatgttattttcacttgattttaaattcctacagggttagaagtatatcctaatgtttgtattctcagtacctaacaggattcttagaacattataaatactataaattctgccagaatgtttattctgcacatgggcaaataatagctaacatttactgagagcttaccatgtgttaggcttcgttctaagaacttgatatttaatcctcgtaatagccctatgagcttgataaatttgttactttcactttata

SEQ ID NO: 702494 - DNA, 1098 bp, Homo sapiens
ggcaagaaaaataaataaaatgctttcattttgtgaaagaataaataaaaacgtacttgctgatggcatgattgttaaagtagaaaatttaattgaatcgacaactctttgctataaactggagatggttgatatgaattagagctgatagttttagagatctgaaaaactatcagaaacttagaggatagctctggctattagttttaagaatgttgcccataagaatagaagcagatagggtgtggtggacaactgttagccaaatattgagttcattcagatagatgaacaaaatccctgaaaattggtaggtgggaatgcagaggtccatatataagtaaacgtcataactcaggtaggatgttattaacaagtggctatgatgaagtgttctaaaagcgtagaaggaagcaaagtttgtgctgagaggcgctgataagagaaggaaaagctctgtttgctagtgtatggaggaagaaaaaatgtgcagggaaatgctggagcatggagaagacttcttaagaaagataaggttcaatatgattcactgagaaggctctgtaatgataaaggtgaggctgagttggccatgggaggcaggaagtaatgatgtaggagaaaaggggtagatgcttggtgtttggacctgtgtgttcattatagtgaaaggagggcaagatgttgtagaaacaagttactgatggtagagaagggttggcgaataggcagcagaggaggtcccacaggctgactttagttatcggggatccacaactgttcacgtgctggagtttgaggtaccggcattcgctgacatcttcaaacttactgcccaggtccagaattcttttggttgttcatagcaggtgygtatctctctctgtgtgtgtgtgtgtgtgtgtgtgtgtatgtgtgtgtgtaagtaaagaagaacaaagggggtggaaggagggtactgaaataaacagcaaactccaatagtaataaaggtaacttggaaaagaattgaggaagtcagaaatccacatgtgtatgtagacttcagtgtggaagatggcagaatagctggactaggcctccagtgaatcattcaca

SEQ ID NO: 702495 - DNA, 1038 bp, Homo sapiens
tcatagtcttcaatcactcgctcttttgtttctaagccagtaactatcagggttaaataaaatccgaatggaaagaaatgtctctgctataaattaaaatcttcattaaaaaatgagttttacatctgactattacacttctgtaggaaccaggaatatgggagtgaccactgatatttagaacataaagctattgtacaggaggaagagaaaaatgcagagaacagaacagcagcatgtaatgctgtgttatggagagtattattttatgggatatttctccatgagttaartcctgtcatctcagcaagggcatcaggagctagctgaatatactgctgggatggttccttgaaacgtgggagtaatgacgatctacagtaaatgagggagaaatgccagaattattttggcagtgttttaaaaagaatatcaaaaaagatcagagagatgatcagaaaggagtatttattaaaaacaaaaacaaaaacaaaaacagaaccttattaggttactctggtttcctatgtggcctagagggcactcctttcagggaaataaagaatacatttgttagggaagcaggaccctaggacagccagagtgacaccaatttgagatcgactccatcttaaaactagcaaggcacattccttgtcagtcatgacctctagttgtaagatgtttgcagctagggaacaagtttggtaatgcctacaaggacacactcccacaacaacagaaagtccagatgtcccattacccataacaatatacgctttcaagataattatagttatgctttgatgtacttacacactaaaatgtcaaggatagctttctttaaataagtaaaataatacattttgtcatgctgtcagcccacctgcacgtaggcacagcttagtttaatctttacatagacaagacccctatataagaaaaacttaaaaaaaaaaaaagatgatgtattgctccgttttcttctggggacgccatactctgtaatgaagtaggtttcaataaactatctcttct

SEQ ID NO: 702496 - DNA, 1038 bp, Homo sapiens
tcatagtcttcaatcactcgctcttttgtttctaagccagtaactatcagggttaaataaaatccgaatggaaagaaatgtctctgctataaattaaaatcttcattaaaaaatgagttttacatctgactattacacttctgtaggaaccaggaatatgggagtgaccactgatatttagaacataaagctattgtacaggaggaagagaaaaatgcagagaacagaacagcagcatgtaatgctgtgttatggagagtattattttatgggatatttctccatgagttaaatcctgtcatctcagcaagggcatcaggagctagctgaatatactgctgggatggttccttgaaacgtgggagtaatgacgatctacagtaaatgagggagaaatgccagaattattttggcagtgttttaaaaagaatawcaaaaaagatcagagagatgatcagaaaggagtatttattaaaaacaaaaacaaaaacaaaaacagaaccttattaggttactctggtttcctatgtggcctagagggcactcctttcagggaaataaagaatacatttgttagggaagcaggaccctaggacagccagagtgacaccaatttgagatcgactccatcttaaaactagcaaggcacattccttgtcagtcatgacctctagttgtaagatgtttgcagctagggaacaagtttggtaatgcctacaaggacacactcccacaacaacagaaagtccagatgtcccattacccataacaatatacgctttcaagataattatagttatgctttgatgtacttacacactaaaatgtcaaggatagctttctttaaataagtaaaataatacattttgtcatgctgtcagcccacctgcacgtaggcacagcttagtttaatctttacatagacaagacccctatataagaaaaacttaaaaaaaaaaaaagatgatgtattgctccgttttcttctggggacgccatactctgtaatgaagtaggtttcaataaactatctcttct

SEQ ID NO: 702497 - DNA, 1038 bp, Homo sapiens
tcatagtcttcaatcactcgctcttttgtttctaagccagtaactatcagggttaaataaaatccgaatggaaagaaatgtctctgctataaattaaaatcttcattaaaaaatgagttttacatctgactattacacttctgtaggaaccaggaatatgggagtgaccactgatatttagaacataaagctattgtacaggaggaagagaaaaatgcagagaacagaacagcagcatgtaatgctgtgttatggagagtattattttatgggatatttctccatgagttaaatcctgtcatctcagcaagggcatcaggagctagctgaatatactgctgggatggttccttgaaacgtgggagtaatgacgatctacagtaaatgagggagaaatgccagaattattttggcagtgttttaaaaagaatatcaaaaaagatcagagagatgatcagaaaggagtatttattaaaaacaaaaacaaaaacaaaaacagaaccttattaggttactctggtttcctatgtggcctagagggcactcctttcagggaaataaagaatacatttgttagggaagcaggaccctaggwcagccagagtgacaccaatttgagatcgactccatcttaaaactagcaaggcacattccttgtcagtcatgacctctagttgtaagatgtttgcagctagggaacaagtttggtaatgcctacaaggacacactcccacaacaacagaaagtccagatgtcccattacccataacaatatacgctttcaagataattatagttatgctttgatgtacttacacactaaaatgtcaaggatagctttctttaaataagtaaaataatacattttgtcatgctgtcagcccacctgcacgtaggcacagcttagtttaatctttacatagacaagacccctatataagaaaaacttaaaaaaaaaaaaagatgatgtattgctccgttttcttctggggacgccatactctgtaatgaagtaggtttcaataaactatctcttct

SEQ ID NO: 702498 - DNA, 371 bp, Homo sapiens
tattgtttatagtacctatgtaaatgtaaataatatgtaaatagttacactgtattactttaaaatttgtattgttttctattactgtatttttctttctcttgttttttcccaaatattttttatctccagttggttgcatctgcagatacagagagcctattgtatttccttttctttcctagtaatataattctattacttcatttatactaatttcagttccttcctttcgttaaaattatatatatatataattaagaaaaatgcacttgtgtaacacaaatatattgctcttaaagctttaatttatctagcyttaaaaactgcatgggaatacagaggtaatagcagtagccatccatagatat

SEQ ID NO: 702499 - DNA, 596 bp, Homo sapiens
taatagttacattttcaatccactaaataataattaaatcaaaattagagtataatctgtatgtgtcaaatggttggctcattaggttttctaaagaagagtgtttgatatattgctaaatatgaactttaatattttacaatamaagatagagaaaaatgttccagaatgataaaaccttcagtaggatacgctgaagttaatgtgaagaaactacagcaggcagcgtgctttatgctgctactgcgtagaatatcaattatataacatcctccctaattatgaaattctttaattttcttactgttttaaaattgactcacttttcaactttgactgtattctctttaaactttttttttttttttttttttggaatagaaacatttttggtttaactcagtgaaaattattcttataaccagcaagattcccagcccgagctcaggtctctcttccttttcttataaagcctccagtatcaatcccatgatacaccatttgtccattaacccattaatccattaatccatgagtggattcatctattcatgaggactacttttcatcttttcatgaggaccaagccctcatga

SEQ ID NO: 702500 - DNA, 637 bp, Homo sapiens
acatcagtgattatgatatctcataacctttctttttaatgaataagytgttttccaccatttttgagacctctgctaaagttcttataaattaatttatacaaatagagttttgttttctctcatgacctatttccagccatgggaagtctcctacaaaagagatacttacttatgtccttatttgtgttaacaagcaagactttttcatcatgctgacaaccttctaggaatgttatttcagtcctactcagtatccaagatgagttcctaaaacatacccaaagaatatttagaaaaatggggccagtggtgatcaagtcatcatatatgttgttgctgtggcatgatgaacatgagttcaatgtttcttctgtgagaataacaagtcctgaagtttctcctacaactttccattggtcattgtcagatctgagagaataactaagagttttgttgtcttgtgctgacatgctcatggtttaatttgtagatgcagccttccttggaatattaatccttttacaagtatcttttccatttgttgtatctcccatttcaacttattacattttcttccacctaaagttggctttaaactcagcagctatatcaatcgcccacaaatctggtaata

SEQ ID NO: 702501 - DNA, 637 bp, Homo sapiens
acatcagtgattatgatatctcataacctttctttttaatgaataagttgttttccaccatttttgagacctctgctaaagttcttataaattaatttatacaaatagagttttgttttctctcatgacctatttccagccatgggaagtctcctacaaaagagatacttacttatgtccttatttgtgttaacaagcaagactttttcatcatgctgacaaccttctaggaatgttatttcagtcctactcagtatccaagatgagttcctaaaacatacccaaagaatatttagaaaaatggggccagtggtgatcaagtcatcatatatgttgttgctgtggcatgatgaacatgagttcaatgtttcttctgtgagaataacaagtcctgaagtttctcctacaacttkccattggtcattgtcagatctgagagaataactaagagttttgttgtcttgtgctgacatgctcatggtttaatttgtagatgcagccttccttggaatattaatccttttacaagtatcttttccatttgttgtatctcccatttcaacttattacattttcttccacctaaagttggctttaaactcagcagctatatcaatcgcccacaaatctggtaata

SEQ ID NO: 702502 - DNA, 1338 bp, Homo sapiens
tccgcctgcctcggcctcccaaagtgctacgattacaggctcgagccaccgctcccggccagcaaaccccaatctttatagaaaggctagttgcatatagatttactggcaaaaagaaaataaaatccaatattatatcaaaatgtaattatttaaatgaagctaaaaattctgaaagataatatcttccaagactcaattattcactgccttttcttcatcaggaccaaaaataaattggttttgatcagtcaggagtctgacaaaaatggtaccaggctcatttctcagtgagctttcagytgatttgtacatttcacgatcccctcaacaaaggctgaagagcaatgtatgtgtttcccttctaagaatggtgcctcaaataagtagaagccctgcgaaagcatcagtatagacatatgtttgtaaaacacatcccagaaaataaatcaatagattattttagacattggcctccttccttacctcttcccttattttggtgttcctatacattgccctaaagatttgatacaagctttgcactaggactagcttaaaacagtaaacatttaattcctttctagatgtttcaactaagtattattgacagagtttgacttcattaagactgggatgttacagtggtatataaattcgaacgtttcatacaccaatatatagaaaggatataacatctttttaaaaactgaacttactctgaaagtgagactggccaatccattcatattacatagaactagtgatactctgataccagtgaattttgacataaaatacaattaaagttgccttaagttttatatagagaatattttgaaaaaggtgatataaagtccatttaaaatacagaatataatgtaaatttgaaagaataatggtaaccatatttatagaatgctataatgttactgtgtacatcattcttagtaaagtttattcttattaataatttttgtataataatgtacatgaaaatattttcatgaattgctacttatttcattgttgatattcttgtaggtactcaaaactaacagattgtcacataaagacattcaatacctattggataaatgaattactaaatgaatacttggacattatttttaccctatataagaaaattctcagcataggagaaaataggtaaaaaataatttattgcatacctaatcttgtttctaagtctgtcttacccctttgcacctaaaattattttcgtctatttttttctcttggttttaccagcattttcaaagtacgtggaatatttatttaaagtttatgtggaatatttattctttagtgtgctaa

SEQ ID NO: 702503 - DNA, 1338 bp, Homo sapiens
tccgcctgcctcggcctcccaaagtgctacgattacaggctcgagccaccgctcccggccagcaaaccccaatctttatagaaaggctagttgcatatagatttactggcaaaaagaaaataaaatccaatattatatcaaaatgtaattatttaaatgaagctaaaaattctgaaagataatatcttccaagactcaattattcactgccttttcttcatcaggaccaaaaataaattggttttgatcagtcaggagtctgacaaaaatggtaccaggctcatttctcagtgagctttcagttgatttgtacatttcacgatcccctcaacaaaggctgaagagcaatgtatgtgtttcccttctaagaatggtgcctcaaataagtagaagccctgcgaaagcatcagtatagacatatgtttgtaaaacacatcccagaaaataaatcaatagattattttagacattggcctccttccttacctcttcccttattttggtgttcctatacattgccctaaagatttgatacaagctttgcactaggactagcttaaaacagtaaacatttaattcctttctagatgtttcaactaagtattattgacagagtttgacttcattaagactgggatgttacagtggtatataaattcgaacgtttcatacaccaatatatagaaaggatataacatctttttaaaaactgaacttactctgaaagtgagactggccaatccattcatattacatagaactagtgatactctgataccagtgaattttgacataaaatacaattaaagttgccttaagttttatatagagaatattttgaaaaaggtgatataaagtccatttaaaatacagaatataatgtaaatttgaaagaataatggtaaccatatttatagaatgctataatgttactgtgtacatcattcttagtaaagtttattmttattaataatttttgtataataatgtacatgaaaatattttcatgaattgctacttatttcattgttgatattcttgtaggtactcaaaactaacagattgtcacataaagacattcaatacctattggataaatgaattactaaatgaatacttggacattatttttaccctatataagaaaattctcagcataggagaaaataggtaaaaaataatttattgcatacctaatcttgtttctaagtctgtcttacccctttgcacctaaaattattttcgtctatttttttctcttggttttaccagcattttcaaagtacgtggaatatttatttaaagtttatgtggaatatttattctttagtgtgctaa

SEQ ID NO: 702504 - DNA, 1338 bp, Homo sapiens
tccgcctgcctcggcctcccaaagtgctacgattacaggctcgagccaccgctcccggccagcaaaccccaatctttatagaaaggctagttgcatatagatttactggcaaaaagaaaataaaatccaatattatatcaaaatgtaattatttaaatgaagctaaaaattctgaaagataatatcttccaagactcaattattcactgccttttcttcatcaggaccaaaaataaattggttttgatcagtcaggagtctgacaaaaatggtaccaggctcatttctcagtgagctttcagttgatttgtacatttcacgatcccctcaacaaaggctgaagagcaatgtatgtgtttcccttctaagaatggtgcctcaaataagtagaagccctgcgaaagcatcagtatagacatatgtttgtaaaacacatcccagaaaataaatcaatagattattttagacattggcctccttccttacctcttcccttattttggtgttcctatacattgccctaaagatttgatacaagctttgcactaggactagcttaaaacagtaaacatttaattcctttctagatgtttcaactaagtattattgacagagtttgacttcattaagactgggatgttacagtggtatataaattcgaacgtttcatacaccaatatatagaaaggatataacatctttttaaaaactgaacttactctgaaagtgagactggccaatccattcatattacatagaactagtgatactctgataccagtgaattttgacataaaatacaattaaagttgccttaagttttatatagagaatattttgaaaaaggtgatataaagtccatttaaaatacagaatataatgtaaatttgaaagaataatggtaaccatatttatagaatgctataatgttactgtgtacatcattcttagtaaagtttattcttattaataatttttgtataataatgtacatgaaaatattttcatgaattgctacttatttcattgttgatattcttgtaggtactcaaaactaacagattgtcacataaagacattcaatacctattggataaatgaattactaaatgaatacttggacattatttttaccctatataagaaaattctcagcataggagaaaataggtaaaaaataatttattgcatacctaatcttgtttctaagtctgtcttacccctttgcacctaaaattattttcgtctatttttttctcttggttttaccagcattttcaaagtaygtggaatatttatttaaagtttatgtggaatatttattctttagtgtgctaa

SEQ ID NO: 702505 - DNA, 1150 bp, Homo sapiens
tttttaaatacaaagaaatgtaatttccggtgttgaaggtggacgtcattaattgcttaatacaatttccttagtgctgagggagttctcgctcagttaattcacacaagacgtggttgtttaaaagggtctggaagctcctcctttgtgatcataatcccactcctgctaagtgccatgatgtccaccgtgattgtaagcttcctgaggccttcaccagaagctgaacagatgttagcaccatgcttcctgtacagactgcagaaccatgagccaatcgaacctcttttctttataaattacccagcctcaggtattttatactaacgcaaaaacagcctaacacagttgakaactttttagtcatctctcagagatagtgcttcaccaaatgaataataatttgtgttaatttcctattgctgtcttagaagtaacactacaaggttagtgacttaaaatggcacatatttataatttacagttctagaggcctgaaatctaaaatgaattggaggagctctaggacccatcatgcccactttctgtttgtgaagacatatatttggttagaggagctaagttctatccactagccatatatattaaggtatctacctgaacaggcactatgtttgaagtttttatttctgtgtgtgtgtgtgtgtgtgtgtgtgtgtgtttatgtaaagacagatcaggttgtgtttgagtgatgagcagggttgtatgaacaagagtataagagatgtatttccaaattctaaagaaatttagataagattttgctttgttagtttctgtttgtttagctggttttgaaaaaaaatagataatagatctgctatttaaaatgtttaaaataacatttaaaaaatgttgtcatctgttccatcagaaagtatgtgattttagagcacctgtcacaacaatattagcattcgcacaaggaattaaatcggtaaacagtattggggtacctaaagacaggtggaagacagtaaacttaggcaaggtggagctatagctagaacaactgcgtagtagacacttcatggtgattctagttatcagactcatctgtgataacaataataccctagttttatttaatttctcagaaattccagttgacatttggatggaactt

SEQ ID NO: 702506 - DNA, 1638 bp, Homo sapiens
gacattaacgaagatgggggaagttgagtaacgacaggagcgaaaattagtagttaaaatttggacatgttacttttgacatgtttattcaagtagaaatttagaatagttggatatatgttcggattattagatagaggtgaaagtgggaggcataaaatcagaaaatttcaatctatatcttagatacagatatagatatagacgtgtatagtaacatggaaaattgctaagaataccgaggacctgaatttaactagaaaagaaaaaagcctggacaactctaaaacagagagcaagaaaagaagagaaagaaccagtaaagaagactgggtaaagttaaagaacaaccaacagaataaagaatcctggaggctaattatgatacttgtgccaaactgaaaggaatgatcaatatccaccactgactaaggtgaggtattattacttttttcttgtttgtttgcttgcttttattgttaattctattttattttctttactaaatttggtatttaagtcattgaaatagattcaatgtgcctgagagcaaaattgaatggaataatatctccactgtgtattaaaatgyaaatagtgtagacaggttattcatactgaaagaaattcagatataaatacagacatattctaaaaattattgaactttctaaataaaacaatgaaattaagtttaattatatttgggataatggttactcaattgattttaatttaattctattttagtttgaaataatcagagctaattaatttagtttggtaagtacacattaagaataaattatcttcaaattttaacaaccccatagttcatgagaataaagtaacagaaacaaatcttactgagaatattgtgtgcatctagtaaaataaattccaaattcaacagggtgaatattatgatgtctgtttttctgaagaatttcaatgattcatttagtttgctagtaaggaaataataaaatctggtccatctggctcctgaatgcatttttcctattatggacatttcatagattactggaaaagtatagaaagtattagtgttacacagatctgttaatttccttcattcaatcagatcctctgattcattgcttttaagtcaggtatataaaaacaatcacataccagttaatattaattcttctagctctgtcctccttacaaagactaccatagggcagtcatttcacagatcaagaaaagtgagaactttgaaactaacttcattatttctcaaaaaaagacagccaaataatatttcgcaagttaaaatatttaatgtctcattctatctaatgacaatctgactctctcatatcaatcagagatctacagcttgtaggtagcttggtttgttgcagtgttcttagtatttcaagcatggtaagcccaggcaagctatgtaactacgaatttcctcatctctcctgccacatattgtcttctttttttaaacagccattacatgtacagtcagtataggtcttcttagagctgatttacttattgttatttaaccttgtagtgattatagaataaagtgatcataagaggccttgctcgatgcctaacatttttaatcacctcaacccactctacatatcctat

SEQ ID NO: 702507 - DNA, 630 bp, Homo sapiens
tcaatctgtggctggtgtcataggaaggaacacactgactttggggctagtctttcctgggaccctctgagtgaccgcctatcccacatcaggaccctggaatatgaagaaatgagaagtggccagatcttccacttggaacacttgaccagcctccattcttcctacccacttcattttttcctttttaaatttaatagagtcggggtcytgctgtgttgcccaggctggtattgaactcctggcttcgagcaatcttcccacctcagcctcccaaagtgctgggattacaggtgtgagctgctgcaccccgccacctacccacttcccatatgaaacattcctactcaggctcatgaggaagaatcatacactggcagtggtaaaggaacactagaggtcattctagatgccttgtcttgagcctgcagcattccccagggttgaccatggaaagctttggttcactgaatgcatctggctcttccgcagctcccagctttggctcacttggctccctctggaacattctcccctctctgaccacttcatctaaacctgcccccctctagggattccctctcacaggggccgggcttttccctcgtagctctgagcaccgtttgcaag

SEQ ID NO: 702508 - DNA, 923 bp, Homo sapiens
ccccactccccccatcccctcgcgggtgcagggacagccgtggtccaggcccaggggactacccactaagccttctccagggcagccagtctggccggtgggctgggggtggtgcagtctgcagcacatccaggtggcgtgaagtgctcactggagcctgcccttgctgtggtcatgaaacttgctcccctcaaaaaactccaccagctttaaagatatgcagctttaaaaagatatgcaaaaataaatactatatttacactgatgtgttttatgacttccaatcaaaacaacaagaggacatggggagggggcctcagacgatggtccgagccctttttttgttgtttttgttttttgagacagagtctcgctctgtcgcccaggctggagtgcagtggcgcgatctcggctcactgcaagctccgcctctcaggttgatgccattctcctgcctcagcctcccgagtagctgggactacaggtgcctgctaccacgccctgctaaattttttgtattttttttttttttagtagagatggggtttcaccgtgttggctaggatgggctcgatctcctgacctcgtgatccgcccgcctcggcctcccaaagtgctgggattacaggcgtgagccaccgtgcccagccatggtccaagcccttttgaggcggggcagcttcagtattgacgcccccacccttgcctcacggcatcacttgcaatttcacactctcagggagggcagtgatgccagtgctggacgactttcctggggctgatgcctcacgcctgggcactgataaatgtgagtccgccttggcatcagtgcactcgggagaacaccagcttcggggcaccgagacccgcagctcactgtcccaccagtcagcatctcrctgccgctgaacagtgttggatca

SEQ ID NO: 702509 - DNA, 950 bp, Homo sapiens
ttcccaaatatttgtgatcctcagtttgttggatctgcagatgcagaacctgtggacagagagttgtagtattgctattttgactagtaaaactatctggctattctcatttttatagatgaagaaacagttcccaaagaaagaaaatttgcctgtatagaatcacataaacaccaggccagaataacaactctccaacccttaaggcatatattccaaattttgccaaccaggaattcacttaatgggcatattgtagacatgcagatagataattataaaattaataatttttacatgtttatcatacatggttttacatgttttagaaaaatattgataaaatatatttttaaattaattttaagtattccatatcagcacaatctttcatttgggttcaatgacacatttagcttgagtaatattctggttccacatctaagctaattaattaatatattttcattwacatcaattagaaaatcacaactcatgcactgtacagactgttggtaactgttgcagtgttttgttctactaaggagtacagatatttccaccaaggatgaacccagatattatggaaaaatttactaaacgcctcgcttggaatttattggaaacctaagttatcctttaagtctgggagatgcaatgtttcgaattaagagaagtgggaaatagattcttcattcatttattgcttatatttacctccagttgttacatatgcccaacatttatgcttccttgatgaaaatcatacatgctagtaaacagtcagatcttagtgatccagtctcagcagtattatccagttttaaaaaattctatttcttatttctgtcattgaccaggaagagacagattcagtctgaaaagagaaaagcctatgcaatatgccatctgtctaagccaactgattatcacagacatggtctttactc

SEQ ID NO: 702510 - DNA, 950 bp, Homo sapiens
ttcccaaatatttgtgatcctcagtttgttggatctgcagatgcagaacctgtggacagagagttgtagtattgctattttgactagtaaaactatctggctattctcatttttatagatgaagaaacagttcccaaagaaagaaaatttgcctgtatagaatcacataaacaccaggccagaataacaactctccaacccttaaggcatatattccaaattttgccaaccaggaattcacttaatgggcatattgtagacatgcagatagataattataaaattaataatttttacatgtttatcatacatggttttacatgttttagaaaaatattgataaaatatatttttaaattaattttaagtattccatatcagcacaatctttcatttgggttcaatgacacatttagcttgagtaatattctggttccacatctaagctaattaattaatatattttcattaacatcaattagaaaatcacaactcatgcactgtacagactgttggtaactgttgcagtgttttgttctactaaggagtacagatatttccaccaaggatgaacccagatattatggaaaaatttactaaacgcctcgcttggaatttattggaaacctaagttatcctttaagkctgggagatgcaatgtttcgaattaagagaagtgggaaatagattcttcattcatttattgcttatatttacctccagttgttacatatgcccaacatttatgcttccttgatgaaaatcatacatgctagtaaacagtcagatcttagtgatccagtctcagcagtattatccagttttaaaaaattctatttcttatttctgtcattgaccaggaagagacagattcagtctgaaaagagaaaagcctatgcaatatgccatctgtctaagccaactgattatcacagacatggtctttactc

SEQ ID NO: 702511 - DNA, 543 bp, Homo sapiens
actaaaaatataaaaaaattagctaggcctagtggcccgtgcctgtagtcccagctattcrggaggatgaggtagaattgcttgaacccaggaggcggaggttgcagtgcaccaagatcacgctactgcactccaggctggcgacaccagagtgagactctgtctcaaaaaaaaaaaaaaaaaagaaatcaacactttctgggtaaggcagctactccctcacaggaaacatttggaaatgtggggacttgatttttagtgtctcagtgacaggacactaaggccatttaatgcttatgtgctaatcaaactgtaatgcttggggagtgctggagcaagatggatgaacagagggttcccctggtcatcccctacaggaacaccaagtttgacactatctatacaaagggaacaccatcataggaaccaaataccagattagtcctgtgcctggttttgacttcatgtctctgaaagaggcagtgaagagggtaggaaagacagtcttgaattgctgacaccaccattcccccatccttcagc

SEQ ID NO: 702512 - DNA, 543 bp, Homo sapiens
actaaaaatataaaaaaattagctaggcctagtggcccgtgcctgtagtcccagctattcgggaggatgaggtagaattgcttgaacccaggaggcggaggttgcagtgcaccaagatcacgctactgcactccaggctggcgacaccagagtgagactctgtctcaaaaaaaaaaaaaaaaaagaaatcarcactttctgggtaaggcagctactccctcacaggaaacatttggaaatgtggggacttgatttttagtgtctcagtgacaggacactaaggccatttaatgcttatgtgctaatcaaactgtaatgcttggggagtgctggagcaagatggatgaacagagggttcccctggtcatcccctacaggaacaccaagtttgacactatctatacaaagggaacaccatcataggaaccaaataccagattagtcctgtgcctggttttgacttcatgtctctgaaagaggcagtgaagagggtaggaaagacagtcttgaattgctgacaccaccattcccccatccttcagc

SEQ ID NO: 702513 - DNA, 543 bp, Homo sapiens
actaaaaatataaaaaaattagctaggcctagtggcccgtgcctgtagtcccagctattcgggaggatgaggtagaattgcttgaacccaggaggcggaggttgcagtgcaccaagatcacgctactgcactccaggctggcgacaccagagtgagactctgtctcaaaaaaaaaaaaaaaaaagaaatcaacactttctgggtaaggcagctactscctcacaggaaacatttggaaatgtggggacttgatttttagtgtctcagtgacaggacactaaggccatttaatgcttatgtgctaatcaaactgtaatgcttggggagtgctggagcaagatggatgaacagagggttcccctggtcatcccctacaggaacaccaagtttgacactatctatacaaagggaacaccatcataggaaccaaataccagattagtcctgtgcctggttttgacttcatgtctctgaaagaggcagtgaagagggtaggaaagacagtcttgaattgctgacaccaccattcccccatccttcagc

SEQ ID NO: 702514 - DNA, 1111 bp, Homo sapiens
  misc_feature 410, 411, 412, 413, 414, 415, 416, 417, 418, 419, 420, 421,422, 423, 424, 425, 426, 427, 428, 429, 430, 431, 432, 433,434, 435, 436, 437, 438, 439, 440, 441, 442, 443, 444, 445,446, 447, 448, 449, 450, 451, 452, 453, 454, 455, 456: n = A,T,C or G
  misc_feature 457, 458, 459, 460, 461, 462, 463, 464, 465, 466, 467, 468,469, 470, 471, 472, 473, 474, 475, 476, 477, 478, 479, 480,481, 482, 483, 484, 485, 486, 487, 488, 489, 490, 491, 492,493, 494, 495, 496, 497, 498, 499, 500, 501, 502, 503: n = A,T,C or G
  misc_feature 504, 505, 506, 507, 508, 509: n = A,T,C or G
aaaatttcaccaccctgacataccctcctataactggactcccacaaagggtcctgatcctgtgaaacttgctgctcaagaggaacagagcagcgttctctctgcccacaggtaaataccaaaaagagatgcctaatttcatctcccagagcctccaaagaatcattctgtgtgaggactgattgaataggggtgaaaaaccggaaagtgttactacagtgagggtcccctcacatagaaacatcaggagcacaacaaaagttccaccttaacaccaggctgaggggccatgtccaccaggaaagcataagctacctcatgagaacaaggatgagaaacacagaaactggttggacaagatgttattaatgatataaacatccctaatagtatgatagaaattaactggnnnnnnnnnnnnnnnnnnnnnnnnnnnnnnnnnnnnnnnnnnnnnnnnnnnnnnnnnnnnnnnnnnnnnnnnnnnnnnnnnnnnnnnnnnnnnnnnnnnnccaacacagccaaacccccacggaaaaaccccatctctgctaaaaagacaaaatcagctgggcgtagtggcacacgcctgtaatcccagctactcaggaggctgaggtaggagaatcgcgtgaacctgggaggcggagatttcagtgagccaaggtcatgccaattgcactccagcctgggcaaaaagagtgaaatgccatctcaaaaaaaaaaaagaaagaaagaacgaaagaaagaaatcccatttccattttacaacaaagatcacagagactctaagagattaaactccttatgcttattattagccggtcagtgctagcactgatttcaaaattaagtctaattccaaagcctgctctacttagcagctyctaggtgctaaaagaatttaaggaggttatgtagtcagctagggctgccatcacagaataccacagactgagtggcttaaacaatgggaataaattttcttactgttctggaaggtgagaagaccaagactcaggttctgacattgtttagtttctagtgaggattctcttcctggcttgtagatggcatattctactatgtcttcatgtggtctttccttgctgtg

SEQ ID NO: 702515 - DNA, 1111 bp, Homo sapiens
  misc_feature 410, 411, 412, 413, 414, 415, 416, 417, 418, 419, 420, 421,422, 423, 424, 425, 426, 427, 428, 429, 430, 431, 432, 433,434, 435, 436, 437, 438, 439, 440, 441, 442, 443, 444, 445,446, 447, 448, 449, 450, 451, 452, 453, 454, 455, 456: n = A,T,C or G
  misc_feature 457, 458, 459, 460, 461, 462, 463, 464, 465, 466, 467, 468,469, 470, 471, 472, 473, 474, 475, 476, 477, 478, 479, 480,481, 482, 483, 484, 485, 486, 487, 488, 489, 490, 491, 492,493, 494, 495, 496, 497, 498, 499, 500, 501, 502, 503: n = A,T,C or G
  misc_feature 504, 505, 506, 507, 508, 509: n = A,T,C or G
aaaatttcaccaccctgacataccctcctataactggactcccacaaagggtcctgatcctgtgaaacttgctgctcaagaggaacagagcagcgttctctctgcccacaggtaaataccaaaaagagatgcctaatttcatctcccagagcctccaaagaatcattctgtgtgaggactgattgaataggggtgaaaaaccggaaagtgttactacagtgagggtcccctcacatagaaacatcaggagcacaacaaaagttccaccttaacaccaggctgaggggccatgtccaccaggaaagcataagctacctcatgagaacaaggatgagaaacacagaaactggttggacaagatgttattaatgatataaacatccctaatagtatgatagaaattaactggnnnnnnnnnnnnnnnnnnnnnnnnnnnnnnnnnnnnnnnnnnnnnnnnnnnnnnnnnnnnnnnnnnnnnnnnnnnnnnnnnnnnnnnnnnnnnnnnnnnnccaacacagccaaacccccacggaaaaaccccatctctgctaaaaagacaaaatcagctgggcgtagtggcacacgcctgtaatcccagctactcaggaggctgaggtaggagaatcgcgtgaacctgggaggcggagatttcagtgagccaaggtcatgccaattgcactccagcctgggcaaaaagagtgaaatgccatctcaaaaaaaaaaaagaaagaaagaacgaaagaaagaaatcccatttccattttacaacaaagatcacagagactctaagagattaaactccttatgcttattattagccggtcagtgctagcactgatttcaaaattaagtctaattccaaagcctgctctacttagcagcttctaggtgctraaagaatttaaggaggttatgtagtcagctagggctgccatcacagaataccacagactgagtggcttaaacaatgggaataaattttcttactgttctggaaggtgagaagaccaagactcaggttctgacattgtttagtttctagtgaggattctcttcctggcttgtagatggcatattctactatgtcttcatgtggtctttccttgctgtg

SEQ ID NO: 702516 - DNA, 726 bp, Homo sapiens
ggaaaatgagaatctttgagaagatatgctggtatgtggggaaagagagaaatatttggtcaagatgtatgcatgggtgaaatgggtatgtgggtttctcttactaggagtttttagtgatacaatgtcagagtcccaaaagaccttccaggtaaagccatcctcatcgtcatccagatgaggaagctgagacatggagacctcgctgggtgaccccatcggcccccacaagtcctgtgccctcctgccccgctgtcttcccccagctataaaaggctgttaccaaatttaagagataatgaagaatcactatattctgcacatgtcttcatcagcttaagtatgttcgtttaataaattaaaacacgggctgggcacggtggctcatgcctgtcatcccagcactttgggaggcggagggtcgattacttgagatcaggagtttgagaccagcctggccaacatggtgaaaccctgtctctactaaaaayacaaaaaaattagctgggcgtggtggagcacctgtaatcccagctacttgggaggctgaggtgggagaattgctggaacctgggaggcagaggttgcagtaagccgagatcgcaccactgcactccagcctgggcaacagaatgagaccctatctcaaaaaaacataattaattaaaacatgaataaaggtaaaagcaaactcttaaatccgtacacctgagagtgtagtacaga

SEQ ID NO: 702517 - DNA, 726 bp, Homo sapiens
ggaaaatgagaatctttgagaagatatgctggtatgtggggaaagagagaaatatttggtcaagatgtatgcatgggtgaaatgggtatgtgggtttctcttactaggagtttttagtgatacaatgtcagagtcccaaaagaccttccaggtaaagccatcctcatcgtcatccagatgaggaagctgagacatggagacctcgctgggtgaccccatcggcccccacaagtcctgtgccctcctgccccgctgtcttcccccagctataaaaggctgttaccaaatttaagagataatgaagaatcactatattctgcacatgtcttcatcagcttaagtatgttcgtttaataaattaaaacacgggctgggcacggtggctcatgcctgtcatcccagcactttgggaggcggagggtcgattacttgagatcaggagtttgagaccagcctggccaacatggtgaaaccctgtctctactaaaaatacaaaaaaattagctgggcgtggtggagcacctgtaatcccrgctacttgggaggctgaggtgggagaattgctggaacctgggaggcagaggttgcagtaagccgagatcgcaccactgcactccagcctgggcaacagaatgagaccctatctcaaaaaaacataattaattaaaacatgaataaaggtaaaagcaaactcttaaatccgtacacctgagagtgtagtacaga

SEQ ID NO: 702518 - DNA, 777 bp, Homo sapiens
ttctgcagatctgaaccaaataatttgagacaacttaaatatattatttttatcttgtttacgcatgatatctctgattatggaagaaataatagttttaactgtttaattttgactggagaatagggaatttctgcttatttctgcttagttcagcatttacacttgcctattgttatacaaaaatatgtatttttagtaatgagtatttaaggatttcaaacctatagttaagattaatatttctggactagaatatttatatgccaccagcaatattatatataacttaaaatttatccctttacacaaatggattgaccgctgtacattcccttaagagtaaaattattttcttgccccaaaatgggagcatgtttgtggatttttactgagccttggaataaggagctgagtaagcatttggaagagggtttgaatgatgttcctgtgaaaatggatgttaattggtctccggcttgaatcagttataaatatggaggtgaccctgattaaccaacagcagggaagcaattgtatctttattgcctatagcagtctcagtgaagtactggactcaactttctccaaaatttatcagatgagatacgcttttaaagaatctagwttagttgtcatatctatctctgtacctcatttcttcaagacaggaggaatgatgaggctaaaggttgattataaaatattaatgctagccttaattttgcctcattttgttgcttatctgaaaagaacaagcctacagactaaatttgg

SEQ ID NO: 702519 - DNA, 2108 bp, Homo sapiens
tgcagtttctccacttccttgccaacacttgttattgtccatctgtctgattacagctatcccagtgggtggccgtcatgaagtggtacacctgctgtggtacctgctgcaggcaaggtaattttcaaaaattcattatttttaacatgttttattaaaaattatttttaatacagaactcatagaggttaacatacaaaatttcttcacatgtatatactgatttgattcctagcttctaaaccaacaacgatcccatctatgttttagcacaatgattattcctgttttacagacaaagaaatggaggctcacagaggttaagaagttctagggctgggatttgaacccaggggttctaaaagcacatgcttttagccacagtgttatcctgtttcaacasctactaggtgcctgcataaacatgagcagataagatgggagaatgaaggtatttgaaatatgtggatttaaagcatctagtaatgattatgaagatgctgaagggatatggctttggattacagcaataggcaagatgttatctgttaatagactaaagaacagagaagtgatttctgtgactatagagcaatttaaaggaagagctgagattaaacagtcccacatctgcttcactgctttgggtaagttatcatttttatccttccatttggaaaatgagaacattagcgatgatgaagagaaccaaaccaggtgctaaatatagttaccttttggtccttacacttgcaagaacgagaccagtttctcttgaatgattgatcatattatcctaatacagctagatacattattttagtttttgtgattttagcaaaatcaaaatagagccagatacattattttagtttttgtgattaaaataatgcattttaaaataaaataataattattttaaataatatattttaaataatgtattgtaaaataaaataattattttaaataatgtattttaaaataaaatacatattttagtttttttcctttctcttccttgtagttgaagaaaaattatttcacaaaaataaaaattattttgaattttggccacagtaaaaagcagttctgggaattcaaattccttatgccctagttaaacattattagtcaaaagctactgctcactagaacccctttctagaaatctatcctgtaatactgcatatataattcttacatctttatctaggatatttccaattttcaaatttgtatatgtgacctaattaaacaaaatagctcaagaggactgatattctaaataactaattcataaatgttgctaaaagtggtataattttataatttcctgaagagaaactagacaaaatttcctgtaacattacaaatcttaaaagaaacagggtagttttaagtgtgacagagttaattcatgaatgagatatatagactagaatactcatttttaaaaaatgtttattttgaagcaaaggatcattatctcaatctttagcttgtacctggcagcctgtatttaaagggtttattcttcatggtgatggggtggggtggatgtagctaagatagcagttccagttttaccacttttattaattttgtgctggggttgaagtgctccacaggaaaaaaaaggagcattgtttctatgaactgtataaaggggagggaaggaggaaatgttagaaggatgatttctcaattttatttcttaaaaggcactcttgtggttgcatttcctccaaacccaaccttttgtgttcagtttgattaaaatgcatccttcttggtctaacagtatctggaaaactcgagaaggctttttcctaaaccatcagtaggtcaagcaagaaagttagcagagctgattctgctgatgtaccttccataactgacagtattcatctttgaaatgatcaagccctggtattttgactgaaaatgtgaagtcttttataaggaaatgaaaaaaatctactaattttttataaacaccctaaattctgagtttttgcatacatgccacttgatcttcataattatatcagtaataccactgcataaaaacatcagtcagaggaaatctaatttaatgtgaaaat

SEQ ID NO: 702520 - DNA, 943 bp, Homo sapiens
tgcacatttataggcagcgatgcaaaaaacaaaacaaacyccaagttctctgttccttctcctatgtgtcctcaattgagctcagccccttcagtatgctggttgtacaaatttaagccaaccctgcctgccgtcttgcatgccatcatgactggtgcacaaatactgggagctctttcatggagctcatttgtgaggaggcttttagtggaactctccttcctgacacaaatgatattatccgattgtcttcttagggctaccaccccagttccactcctaccccagcaatccaccttatttcttcttactggtggagtcctcgccctggcatgtggccctgttggatgaagtccctttaagatggttggagcctgactctgtcatgccttctaattcaggaaactcacacctccttacccctgaccatgcccatctctggaagcacaggctaccttatcctgacttcatgggcagctctccatagttggttgccgtcactattctttacaagggaagcaggaaccagtctccatattttcaaatcctccaaagctcctggagccacatctcaggttctctcaagaaatctctaagtgtgttccacctgatgtgttcactggagaggattctataagcttcttcagctcaacaggtctcagtcagggagtcaaatgtgatctgcccagtctctacagatggaacttccctcccttgatgagagaagtggaactcaatctgaggaaagtaaaaagcaaagcgaggctgggcacggtggctcacccctgtaatcccagcactttggaaggccgaggcgggtggatcaactgaggtcaggagttcgagaccagcctagccaacatggtgaaaccccatctctactaaaaatacaaaaattagccgggtgtggtggtggatgcctgtaatcccagctactcgggag

SEQ ID NO: 702521 - DNA, 2581 bp, Homo sapiens
tcctttgcccactttttgatgggtttttttttctttttttgttrtaaatttgtttaagttctttgtagattcttgatgttagccttttgtcagattgatagagctctttagtttaattagatcccatttgtcaattttggcttttgttgccattgcttttggtgttttagtcatgaagtctttgcccatgcctatgtactgaatggtattgcctaggttttcttctaggatttttatgtctttcagtcttatgtttaaatctttaatccattttgagttaatttttgtataaggtgtaaggaaggggtccagtttcagttttctgcatatggctagccagttttcccaacaccatttattaaatagggaatccttttcccattgcttgtttttgtcaggttttgtcaggtttgtcaaagatcagatggttgcagatgtgtggtgttatttctgaggcctctgttctgttccattgatctatttttaagcacagatatttagattccaaagctgacatttctaaccatgatgtcactgtctgctacttaaggtaaggaaattgataacttcacttaattaggcaaaaattaaatcaattgcattgaaattggaaggagtgaacaagtgagaaaccagtgtgaatgcctacatatggtggaattttcaaattttcaattttgttaaggtttcctctatgtaagtattgatttctcttttaaatataattaaaatgtgaatttatttaaaagtttaatataagtatgcatacttactcatttgttgagtgcatatttgaacatgatgttcttctaaacaccagagatttgccagtgatagcatcagaaattgaataaggaaattatttagaaggcataactaataggtcttataatgattctaatgaagaattaagaaacgaataataagtggggaattgcaagttgtatttgtctaagaaacactttcatggaaagtttgaatattgtcacaaaattaatagttgaaaacaaactctgttggtcttacggcttaattttgtctcaaaagtaattggggataataagaaattctgagacctccatattgacttatagaaagcaactttcacttatgctgcctcctcagaaactgtttattacctgctttatagtattctgagtaacgaagtcaatcacatcatattctctaatataaatacatatattttaacaataaaataacaatttaatttataacatgttgagattagtttttttaattaacccaggaaactcaaccaaactatttctgcttaacaatattgaaaacaaagaatgatttaaactttactaatgtttacatagtaaatactaatatttgaataagataaaaataaaatgcaactatcaaaaattcaagtttcaaaatccatataatgttcagataattttttttgcagtggattatgtgttatgattcattcactttctctgctatatccttgaagaatgactttatggactgcacaggctgcaaagctgaaaactgcctttccctcactccacagcagtttatgtttcagatgtgactttgaagagacttgcttccaaacctgagttaagtggagcaagagagttaggatataaataaagactcttgctggtgcatatcactgcagaggcagggcagttttgtaaatatcaacttccagatttagtgatttcctgagatgtcagtagctttcagctttaggtagaagcagtgtgacctttgctaatatagtgtctgttcttctagccattattagaataatttaccaaggtcccttaaataacatactataaattatacatgtcatataaatatgcttgcttctaaagattaagggacagaagtaaactcattcctgagaatcactttttagattggtaaatatacctattcatgttgcatttactaagaaaattttacacactgtatcacttaaatttaatttcctgtgacttaagttgatcattctctattgcttggagatcttaccccttctgcatcaacatatatatttaccacattctttttaaattgcttagtaagtcagagtatattaaggaacataatgtacttaattgggctcatatttttgtacataattcatttttagaaaagatttctagaagcagaattgctatgccaaaatatgggaatttttgaacatagaagatattgaaatatgccctccaaaaaggctgtaatcatttacattatattcaacaacatatgaatatgtacactgtacaacactcaatttgctattgataataaaagtggtagatctaagaccaaaacacaggcagtcagtcagtgcagtggcttaaggattcgaccattagttatctagaattattgcatgaaggactgctcattttgcttacgtgtattttggtctgaattcggaatttctactggattttattggacatttttcttttaatttctgcaaggttttgtgccatgatattctattcatgtttatttataacaagatttatattttattaatcttatagggaatcacattctgaagtactgatatggtcttttc

SEQ ID NO: 702522 - DNA, 598 bp, Homo sapiens
cgaggtccatatcttccagagctatcaagcccactatcaacagacgatttaactagaaataattaaaaccaggcaatcatctggcctactttgtgtctcctacaccactcatcaactatgtggctttgaggaagtcacttaaaytgaagcatcccttctctcatattaaaactgggttaataacacctacttctcaggaaaaattatgtataaaatcaccagtacatcgtatatatttatgaatgtctgctcctgttatatctaacatcttttaaaaataattacgtaatctttcctcataatatacatttaaaataaacaatattaaataaaatttctactttgcagagaaaaaagatgaaagtaacatatcaaaaaggatgaggaagtgttaaactgttttcagttgaaagagctaaacctaggagaagctaaagttttttttttcagtttaatagtgttgtttatatggagacaaaaagtgctataatttaaatctttagcatgctattctgtattagagtactaatgttgtggcttgtcaatttagcatttttatttcatggattccttgaataattaataagtgagaacattg

SEQ ID NO: 702523 - DNA, 598 bp, Homo sapiens
cgaggtccatatcttccagagctatcaagcccactatcaacagacgatttaactagaaataattaaaaccaggcaatcatctggcctactttgtgtctcctacaccactcatcaactatgtggctttgaggaagtcacttaaactgaagcatcccttctctcatattaaaactgggttaataacacctacttctcaggaaaaattatgtataaaatcaccagtacatcgtatatatttatgaatgtctgctcctgttatatctaacatcttttaaaaataattacgtaatctttcctcataatatacatttaaaataaacaatattaaataaaatttctactttgcagagaaaaaakatgaaagtaacatatcaaaaaggatgaggaagtgttaaactgttttcagttgaaagagctaaacctaggagaagctaaagttttttttttcagtttaatagtgttgtttatatggagacaaaaagtgctataatttaaatctttagcatgctattctgtattagagtactaatgttgtggcttgtcaatttagcatttttatttcatggattccttgaataattaataagtgagaacattg

SEQ ID NO: 702524 - DNA, 818 bp, Homo sapiens
acatctattccaaactatgtaatattcccaagcatcctcaaacccttcttgaggaaaagaaaaatttaaacaatatgagaaaatctggcttatctatacaagaaaactgttagactgatttcagccttctcatctacaacactatattctgaaatttaattaaatagtagttttaaatctgaaaagaaaagaaaaacatactaagyttaaaagtaagagaggctatgagacatattggctattaaaacatttggatatctatatatatcctattgcaaaaatatttaaattatttcaacaaaatggaaaaaagcaattgaaggaagaggacaatataggatataagaaattactttaggtgattattaccagattaagtaaagaaaaattagcaagatcttgattcttggtaaagtctcctttgagcaataatattactgcatttgattacatcttataatatagtaataatcaaatttaaatattgtttatttatattcaatgtgtagaatcaagctataggaaaaaaatcactgaattatggataactagcacgaagtaaatatattaaatttaacaatgcaaaacaatactatatgtaacaaactacaaattagtgggtatgaattttggaaggaaaaataactccctcgtattttgtattcgactatgtgtaaaacaaggttatcttacagctgaactgagatagctccataactatctggaaatcgagtatgacccttggtcaaaataaggatgggaggtactaatttggaatttgcattgtgctgtttaaagctggaaactgaaaggcaatt

SEQ ID NO: 702525 - DNA, 1159 bp, Homo sapiens
caaatgctccatttttcttagtcactttgacatattaataaaccaaaagtgatttggcttttctttgaagatttgtttaaactattctacttaagcaagagttataagtaattcaaattctagttatgttcagtcttataaagaactacttgatggcatcaacattaagtataaagaaatttaatgtttctaagcaatattatttttcttcatgaaacctgacacaatgaaaacaactgagttagggacaattctggaaaaaatttgtcataagcaaataccattataaatcactgtatagtatttttacctgtcaagatgattcattagttattattccatttttagctctgaccattgacatataatcaagaaccagacaacaaaactggataggtctgtaaaactatgaatctaccaacattccaggctggccactgaagtgacagttttagaaagataaaacttttctgcaaatgaacttttattgaaaactgagggctaaaaagtttaataaaaaatctgtttaataaactggatgtgcagtgtcctattttctttgccaccatattcttcaacttttcatcactccattccaggacctcatcaaatgtgagaattcctgctatcaacagtttcttaaagtttacttatatctgtcctactaatttcttttggaatctgagctgaggccgggcgcagtggctcaagccttaatcccagcactttgagagactgaggcaggcagatcacgaggtcaggatatcaagaccatcctgracaacatattgaaaccccatctctgctaaaatacaaaaaattagctgggcgttgtggtgtgcgcctgtagtcccagctactcaggaggctgaggcaggggaatcatgtgaacccagaaggtggagactgcagtgagccaagatcaagccactgcactccagcctggtgacggagtgagactccatctccaaaaaaaaaaaaaaaaaaaaaaaaagtaatttgagctggttctatgttggcttttatcgcatgggaggatgtgaatcgttagcgggaatattatttatatatcatatccattattggcctctgatatatgagatattaaatatattttctgtgtctccaactagctataattattttcaacagcagtcat

SEQ ID NO: 702526 - DNA, 1121 bp, Homo sapiens
tatgtgaatatttgacatatataggatgcaaaataataaatttactaaataatgacaaatacaattgtgagctgacatcttaattttctttcttagtaaaaataactccaccatcaaaccacctgattttcactyggggaagcaaccttcctctattctttttccaaggtgtgtcactgcctggacctggacttattacatcatcttaaagcaggttgtaccttgacctttgctcaagcaaagataatcattaagaactgacatcatagcatttcaaatacttggcacttagcatagcacacaaaatattagatacgcttattattaattttaatgttttaataactggtagagcaaataatccttaaaaccaatttccctttctttttcataattttcttaccttttcttgaatatttttcttataagcttctcacaaactttagaatctgcttttatagttctaaaagaccatgtcctgtattgtaatctgttgaaattcatttgattaataatggaagaatgaatggaataacgaaatgtttatgatattacaaagtgacatggcatgcttgtgtgtttctgttctatctctctccccttactgtgatccaaaaggtgctcatgagaaacttctgcttccaccctacgtgctgaaaacctgctgtttgaaacaagtatttgaagacaagactctcttccatttctctgatagctgagcaatcagatatctctttagatatcttttttacaactctgcttattcttccttgcacttggcagcttgtccttgtgaactgagaagaaaaagaatagagacctctcttcattctgttattttaaacttaaaattatcttactacttcttgcaacctcacacactgtaatattatttaataattacagagaagtaatagacagaatgtattccaaagtggggaaataataaataccaaatcacaaatagtttcttctggacctaacggagaaagtttaatgctactagagtatgtatggatatagtggtgatagtgggatccaatgaaataccatcttgctcttcttcatctccagcataatcaatgatgttattccaaagattagtgagcactattcaatca

SEQ ID NO: 702527 - DNA, 1121 bp, Homo sapiens
tatgtgaatatttgacatatataggatgcaaaataataaatttactaaataatgacaaatacaattgtgagctgacatcttaattttctttcttagtaaaaataactccaccatcaaaccacctgattttcactcggggaagcaaccttcctctattctttttccaaggtgtgtcactgcctggacstggacttattacatcatcttaaagcaggttgtaccttgacctttgctcaagcaaagataatcattaagaactgacatcatagcatttcaaatacttggcacttagcatagcacacaaaatattagatacgcttattattaattttaatgttttaataactggtagagcaaataatccttaaaaccaatttccctttctttttcataattttcttaccttttcttgaatatttttcttataagcttctcacaaactttagaatctgcttttatagttctaaaagaccatgtcctgtattgtaatctgttgaaattcatttgattaataatggaagaatgaatggaataacgaaatgtttatgatattacaaagtgacatggcatgcttgtgtgtttctgttctatctctctccccttactgtgatccaaaaggtgctcatgagaaacttctgcttccaccctacgtgctgaaaacctgctgtttgaaacaagtatttgaagacaagactctcttccatttctctgatagctgagcaatcagatatctctttagatatcttttttacaactctgcttattcttccttgcacttggcagcttgtccttgtgaactgagaagaaaaagaatagagacctctcttcattctgttattttaaacttaaaattatcttactacttcttgcaacctcacacactgtaatattatttaataattacagagaagtaatagacagaatgtattccaaagtggggaaataataaataccaaatcacaaatagtttcttctggacctaacggagaaagtttaatgctactagagtatgtatggatatagtggtgatagtgggatccaatgaaataccatcttgctcttcttcatctccagcataatcaatgatgttattccaaagattagtgagcactattcaatca

SEQ ID NO: 702528 - DNA, 1121 bp, Homo sapiens
tatgtgaatatttgacatatataggatgcaaaataataaatttactaaataatgacaaatacaattgtgagctgacatcttaattttctttcttagtaaaaataactccaccatcaaaccacctgattttcactcggggaagcaaccttcctctattctttttccaaggtgtgtcactgcctggacctggacttattacatcatcttaaagcaggttgtaccttgacctttgctcaagcaaagataatcattaagaactgacatcatagcatttcaaatacttggcacttagcatagcacacaaaatattagatacgcttattattaattttaatgttttaataactggtagagcaaataatccttaaaaccaatttccctttctttttcataattttcttaccttttcttgaatatttttcttataagcttctcacaaactttagaatctgcttttatagttctaaaagaccatgtcctgtattgtaatctgttgaaattcatttgattaataatggaagaatgaatggaataacgaaatgtttatgatattacaaagtgacatggcatgcttgtgtgtttctgttctatctctctccccttactgtgatccaaaaggtgctcatgagaaacttctgcttccaccctacgtgctgaaaacctgctgtttgaaacaagtrtttgaagacaagactctcttccatttctctgatagctgagcaatcagatatctctttagatatcttttttacaactctgcttattcttccttgcacttggcagcttgtccttgtgaactgagaagaaaaagaatagagacctctcttcattctgttattttaaacttaaaattatcttactacttcttgcaacctcacacactgtaatattatttaataattacagagaagtaatagacagaatgtattccaaagtggggaaataataaataccaaatcacaaatagtttcttctggacctaacggagaaagtttaatgctactagagtatgtatggatatagtggtgatagtgggatccaatgaaataccatcttgctcttcttcatctccagcataatcaatgatgttattccaaagattagtgagcactattcaatca

SEQ ID NO: 702529 - DNA, 1121 bp, Homo sapiens
tatgtgaatatttgacatatataggatgcaaaataataaatttactaaataatgacaaatacaattgtgagctgacatcttaattttctttcttagtaaaaataactccaccatcaaaccacctgattttcactcggggaagcaaccttcctctattctttttccaaggtgtgtcactgcctggacctggacttattacatcatcttaaagcaggttgtaccttgacctttgctcaagcaaagataatcattaagaactgacatcatagcatttcaaatacttggcacttagcatagcacacaaaatattagatacgcttattattaattttaatgttttaataactggtagagcaaataatccttaaaaccaatttccctttctttttcataattttcttaccttttcttgaatatttttcttataagcttctcacaaactttagaatctgcttttatagttctaaaagaccatgtcctgtattgtaatctgttgaaattcatttgattaataatggaagaatgaatggaataacgaaatgtttatgatattacaaagtgacatggcatgcttgtgtgtttctgttctatctctctccccttactgtgatccaaaaggtgctcatgagaaacttctgcttccaccctacgtgctgaaaacctgctgtttgaaacaagtatttgaagacaagactctcttccatttctctgatagctgagcaatcagatatctctttagatatcttttttacaactctgcttattcttccttgcacttggcagcttgtccttgtgaactgagaagaaaaagaatagagacctctcttcattctgttattttaaacttaaaattatcttactacttcttgcaacctcacacactgtaatattatttaataattacagagaagtaatagayagaatgtattccaaagtggggaaataataaataccaaatcacaaatagtttcttctggacctaacggagaaagtttaatgctactagagtatgtatggatatagtggtgatagtgggatccaatgaaataccatcttgctcttcttcatctccagcataatcaatgatgttattccaaagattagtgagcactattcaatca

SEQ ID NO: 702530 - DNA, 1116 bp, Homo sapiens
aaaactactcacatttaaaggtctcattcaaggtaggtcagctctacagtaccgcttcccagatgtgtcagaagtttggaggtgttgcttgaagccttcactgaagaattgcttctgccatctaggtttgtttttaaataacatgtgattagacttgtttctatttacaggtctctacacacctggtttatcagccctgtggttcaaagagcatccgtttaaagccagtagacaagactgatgtcaagttattgctactgggaattctgtctttacatttactgttaaattcaagataacatctaaggatacagatgaaaaacataaattgatgatggcactgaataatgatgttaattatcatttaacacgtgtatattatgttgcagacacaatgcagacacaaagcgtttactctttttcagctattacctcatttgggtttcacaataatcctgtgagaaataatatctccatttcacagaagaaaacatgaggmtcaaatcgttaagatgcatttcagattcatgcagtttataagtggtggagcccagatacaaacagaggattgacgaactccagggtttaggctcttactaatacgtaagaagcaggtaccaaccagcaccggcagcctaaacagtttctggaggaatttcaggttggagatagattaatacaaatggatctacactggcagagagaatagaaaagtttaaaaaagtgtttttttctgtaaaaatattaatggcaaaatagaagacaacgtgataaggagcagtgaaaatcacagaaggagagctgggggagagacagctatggaggattttgagaccatccagagaagaaaacaatgactccctgtgcttatgagaagagagctggagacacatcatgaactttttcaaatgcttccagcataccatagcttacattgtcaccagaatgatttaagagaaacctatgttagaagtccttttggtggcaactccgtaatctgctcagtgtccaacaagactctttccagccaccaaataaacaattctaaggcatagctctgatggttaattttatgtcataggaaatttattttaacctgcttttatttcatgggtg

SEQ ID NO: 702531 - DNA, 1116 bp, Homo sapiens
aaaactactcacatttaaaggtctcattcaaggtaggtcagctctacagtaccgcttcccagatgtgtcagaagtttggaggtgttgcttgaagccttcactgaagaattgcttctgccatctaggtttgtttttaaataacatgtgattagacttgtttctatttacaggtctctacacacctggtttatcagccctgtggttcaaagagcatccgtttaaagccagtagacaagactgatgtcaagttattgctactgggaattctgtctttacatttactgttaaattcaagataacatctaaggatacagatgaaaaacataaattgatgatggcactgaataatgatgttaattatcatttaacacgtgtatattatgttgcagacacaatgcagacacaaagcgtttactctttttcagctattacctcatttgggtttcacaataatcctgtgagaaataatatctccatttcacagaagaaaacatgaggctcaaatcgttaagatgcatttcagattcatgcagtttataagtggtggagcccagatacaaacagaggattgaygaactccagggtttaggctcttactaatacgtaagaagcaggtaccaaccagcaccggcagcctaaacagtttctggaggaatttcaggttggagatagattaatacaaatggatctacactggcagagagaatagaaaagtttaaaaaagtgtttttttctgtaaaaatattaatggcaaaatagaagacaacgtgataaggagcagtgaaaatcacagaaggagagctgggggagagacagctatggaggattttgagaccatccagagaagaaaacaatgactccctgtgcttatgagaagagagctggagacacatcatgaactttttcaaatgcttccagcataccatagcttacattgtcaccagaatgatttaagagaaacctatgttagaagtccttttggtggcaactccgtaatctgctcagtgtccaacaagactctttccagccaccaaataaacaattctaaggcatagctctgatggttaattttatgtcataggaaatttattttaacctgcttttatttcatgggtg

SEQ ID NO: 702532 - DNA, 2149 bp, Homo sapiens
ttcaggttttcaactgattggatgaggttcacctacattatggaggacagtctgctttactcaaagtccatcaatgtaaatgttagtgtcatctaaaagtactctcacagaaagacccataataatgtttacccaaatatctgggcacactgtggttcatccaagatgacacataaaattaaccatcatggacatcttaatttgaggcagccagtgtgtctgcactctaggggaagggtcggcaaactacagtccacaggacaaatctgtttttgtaagtaaaggttttgggaattcagccacacttgttcatgtacatattgtctatggctgcttttgcagtaccatgccaaaactgagtgttctaatgagaccatatggcctacaaaaccgaaatttgactctgtctgtacagaatggctgatccctgttttaggcagttatgtgcccagctaaatactgggattatttagagagagagaaaggaaattgtggtaggcagatagcaatcttgatccacagcagcataaaggacttgctgctgagatcttctaagaaatctcccagccattcagcagcaatttttttgtgcaatctatgagatactgaaggaattacaaagaagtacaagccatttcccccaatctcaggaacttagtggattaactttgtggaaagcaatggtctttggacccagagagggctgagtttaggctgaattattagccatgtgatcaaacttctcaaaacttcagttttctcatctctaaaatgagcatggccctattacctcatcaggttgctgtataaattaaataaggtcatttatatggtgtctagcatatcataaaccctttcttcttgtctgatagtgaaaacaatgataactaatagtaattaaactttatctgtgtgctgggctctaggcaagggttcttcatgtattaactcatttaatcctcacaacagctcttcgaggtaggaacaatcattatccccattgtatgaatgagaacattgagagatgaggtatcttggcaaagagtgcctagttagagcagagctgtgattcaaacccagcttgcctgatttctgatcccaagagcctgcccgccagtctgtcccacagccttcccatgtcagagccctcctgccatcatctccttccccctctggctgtaagacattcacagtgtaactgagaaagcagagcacattcaaataaaaaacaaattcataacataaggcagtggaggtgaagtgccaagtgagcggtatcacttagatactgagaggttccagtcccccagagcggtcaggggaggtatcaaagcagggatggggccaaattgggtcatgatggacctacaggatttagaagacaggaagacactgtgcagccatagggagtggagtgggcaaggcttggaggtgggaaagaaatagcacaattaaggaataacaggtaaataatcctggctaaatcacaggattcttaccgggagtccagagagagcaatttggaaatgaagattagaattaaatgaaggagcttgaatgtctgtctaaaaagcttcactgtattcggtagacactgagtagtcattggaaggttttgaatggtgaaatcacrtgatggcagcagtgtctttaagaataatgtggtggttttgggagtgatgactgaggcccagaggctgggagactagttgagaggcttttgaaatgatctagacatgacgtaatgagaacttgaagtggagtgttagcacaggcatggatggaatggcaggaaggtaggagacatcacatgagcagaaccggggcacttggtgacttcgtctgggagtgaggagggggaggggcaggatgactgccaggctttcagcctgggtgatgggagaattttattctaaatagaagcagaagaggtaaaggggagctccatctgccaccccacctccatgaggtctctgtctccactgagcatcttcacttactagccgtcaccagatacctgtgagcagccagccatctcctctttcttctttgctgcaaggtgccacttccaccagagaagaacctagggcagtgaggaagcatggcctttgggtcaaagaggtagaatttatatctgctccatccgtca

SEQ ID NO: 702533 - DNA, 3243 bp, Homo sapiens
  misc_feature 1641, 1642, 1643, 1644, 1645, 1646, 1647, 1648, 1649, 1650,1651, 1652, 1653, 1654, 1655, 1656, 1657, 1658, 1659, 1660,1661, 1662, 1663, 1664, 1665, 1666, 1667, 1668, 1669, 1670,1671, 1672, 1673, 1674, 1675, 1676, 1677, 1678, 1679: n = A,T,C or G
  misc_feature 1680, 1681, 1682, 1683, 1684, 1685, 1686, 1687, 1688, 1689,1690, 1691, 1692, 1693, 1694, 1695, 1696, 1697, 1698, 1699,1700, 1701, 1702, 1703, 1704, 1705, 1706, 1707, 1708, 1709,1710, 1711, 1712, 1713, 1714, 1715, 1716, 1717, 1718: n = A,T,C or G
  misc_feature 1719, 1720, 1721, 1722, 1723, 1724, 1725, 1726, 1727, 1728,1729, 1730, 1731, 1732, 1733, 1734, 1735, 1736, 1737, 1738,1739, 1740: n = A,T,C or G
tggggtttcactatattatccaggctggtctggaacttctgacctcaagtgatccacccgcctccgcctcccaaagtgctgagattacaggtgtgagtcattgcacccacccaaaaatcttttactttaaatgttaaaatgtagctttttttttttttttttttttttttgagacagagtctcgctctgttgcccaggctagagtgcagtggtgcgatctcggctcactgtaagctcggcctcccgggcttacgccattctcctgcctcagccttctgagtagctgggactacaggcacccgccaccaagcccagctaattttttgtatttttagtagagatggggtttcaccgtgttagccaggatggtctcaatctcctggcctcgtgatccacccgccttggcctcccagagtgctgggattacaggtgtgagccaccacatccagccaagatgtagctactattttattaaatgtttgtttgtttgctggtttgtttgtttgttttttgagacgagtctcactctttcgcccaggccggagtgcagtggcactgtgtcggctcactgcaacctccgcctcctgagttcaagcgattctcctgcctcagcctcccaagtagctgggattacaggcacatgccaccgtgcccggctaatttttgtgtttttagtagagacagggtttcaccatgttggtcaggctggtctcgaactcccaaactcaagtgatctgccagcctttgcctcccaaagtgctgggattacaggtgtgagccactgtacccggcctaaaagatacattcgtaacaatttataacactttaggaagtaatgtaaacattttggggaaaatttctttaacattttgggggcataacttaaagaaaggcctgaactacctccaaatataaatttggaaatgttgagaatttgactgaaaataagctattctgctgggcatggtggctcacacctataatcccaccactttgtgaggctgcggtgggaggattgcttgagccctggaattggcgaccagcctcggcaacatagtgagyccccatctctataaaatttttttttaattagctgggcgtggtggcacattcctgtagtcctagctacttgggagattgaggtgggagaatcccttgagaccagaaattcaagcctgcaaagagctatgattgtgccactgcattctagcctgtgtgacagagtgagaccctgtctccaaaaataaaataaaataaggcattctaataaagttaaccagaacaatctgaaatcttttatgttcttttcaagaagtcatggtaaatcttaccatgactgaaattcaaggaactttgaacacctgaaagtatccagaagaatcagcgactaaaattggacagacaaaaaatgtaaaatatcatagttttatgctccatcatatattcactagctcctactgcttgcctgaaaatatacacttctttgtgcatggctcacaattcttctttgagtacagctattgttgatacattgagctcacaagcttcaagtggccgaaattgttgcttcttgagaatgtttatagatctctctaaacgagaaacagaaaacaatattcttcctttgtttcttgcttggannnnnnnnnnnnnnnnnnnnnnnnnnnnnnnnnnnnnnnnnnnnnnnnnnnnnnnnnnnnnnnnnnnnnnnnnnnnnnnnnnnnnnnnnnnnnnnnnnnngactgctagaggatcccctaaatatataatataataatataatatataatatataatataatatataagatataatataatatataatataatatatatatagtatttttaatgggaacaaggtttcattatgttggtcaggctggccttgaacccctggccttaaatgatccgccccccttggcctcccaaagtgctgggattacaggcatgagccactgcacctggcctactgtatatactagattctaggtgtggattctaccatctttctaattcatttgtggtcctatggagtgttaggtgagttgatgaccgcgagttagatgttgcatcccatcaacagcgtctgtgcctgggtagggttgtcacatctggtgtggcccctgttgcgtttgttcttctacttaagaaacacagtttcttctcattccatttagattcatccagggtttaatgaatgaggaggcctcaagtatggttttccttcctgatccccttcctgtgattggctagagaaggggatggcccttggcaattgtgaggcggggggcgggcaggcatcactcatctgtggaaggagttggggaggaggcctctttcttcactcatgaatgaatgcttcacttcactgctgtcaggtggggctgcctgagaagcagtgtggtgacattctcaggaggggtgggggtggtgcctcacctaagaggtggcctcttccatgactgatagaaagatgttgcagactggggccacctggcctgattgtaatcccctaacacatagggtgaggacagagtcctcacacccactactgaaatttcagggatgggccctgtgctagtagaaagcagggggtggggagctggggacaagaaaaacaaaatcatttggttaaaaagcttgcttgactgggcaccaaacccaggcactctggtttcacagtccatggtctaatcactgcactgcatggcctttgtagctacttctgacagtgtcacaggagccctaggtaggaaggaagagtaggtaccacctcctctgcacggggtgcccccaaccccaagtactgtttatttaagacactgacttttgtgaatgattttacttggatacagagaggggaaggaaaggaggactgagctaacaaaaatatagtttgaagacaaaacaaaagaaaacaaaaacctgtgtgcctgacatgacgcagtggagaaagaaagggctgaaaattatttgggctaacatcatggagaagctgaaggaagagaaagagttttgattcaagtctagactcttttcttcctccctcctctactgcagagcaccaaggaagactcacaaggctcatgggtgacctagaaaatctcacctctcctctccatgtctcaggccctcatctgtataaggaaaaagttgagccagttgatgaaccagaggtgatgtctctgagatccattcggttttaatctcttgtcctccaaggggagagggtcaggggca

SEQ ID NO: 702534 - DNA, 3243 bp, Homo sapiens
  misc_feature 1641, 1642, 1643, 1644, 1645, 1646, 1647, 1648, 1649, 1650,1651, 1652, 1653, 1654, 1655, 1656, 1657, 1658, 1659, 1660,1661, 1662, 1663, 1664, 1665, 1666, 1667, 1668, 1669, 1670,1671, 1672, 1673, 1674, 1675, 1676, 1677, 1678, 1679: n = A,T,C or G
  misc_feature 1680, 1681, 1682, 1683, 1684, 1685, 1686, 1687, 1688, 1689,1690, 1691, 1692, 1693, 1694, 1695, 1696, 1697, 1698, 1699,1700, 1701, 1702, 1703, 1704, 1705, 1706, 1707, 1708, 1709,1710, 1711, 1712, 1713, 1714, 1715, 1716, 1717, 1718: n = A,T,C or G
  misc_feature 1719, 1720, 1721, 1722, 1723, 1724, 1725, 1726, 1727, 1728,1729, 1730, 1731, 1732, 1733, 1734, 1735, 1736, 1737, 1738,1739, 1740: n = A,T,C or G
tggggtttcactatattatccaggctggtctggaacttctgacctcaagtgatccacccgcctccgcctcccaaagtgctgagattacaggtgtgagtcattgcacccacccaaaaatcttttactttaaatgttaaaatgtagctttttttttttttttttttttttttgagacagagtctcgctctgttgcccaggctagagtgcagtggtgcgatctcggctcactgtaagctcggcctcccgggcttacgccattctcctgcctcagccttctgagtagctgggactacaggcacccgccaccaagcccagctaattttttgtatttttagtagagatggggtttcaccgtgttagccaggatggtctcaatctcctggcctcgtgatccacccgccttggcctcccagagtgctgggattacaggtgtgagccaccacatccagccaagatgtagctactattttattaaatgtttgtttgtttgctggtttgtttgtttgttttttgagacgagtctcactctttcgcccaggccggagtgcagtggcactgtgtcggctcactgcaacctccgcctcctgagttcaagcgattctcctgcctcagcctcccaagtagctgggattacaggcacatgccaccgtgcccggctaatttttgtgtttttagtagagacagggtttcaccatgttggtcaggctggtctcgaactcccaaactcaagtgatctgccagcctttgcctcccaaagtgctgggattacaggtgtgagccactgtacccggcctaaaagatacattcgtaacaatttataacactttaggaagtaatgtaaacattttggggaaaatttctttaacattttgggggcataacttaaagaaaggcctgaactacctccaaatataaatttggaaatgttgagaatttgactgaaaataagctattctgctgggcatggtggctcacacctataatcccaccactttgtgaggctgcggtgggaggattgcttgagccctggaattggcgaccagcctcggcaacatagtgagtccccatctctataaaatttttttttaattagctgggygtggtggcacattcctgtagtcctagctacttgggagattgaggtgggagaatcccttgagaccagaaattcaagcctgcaaagagctatgattgtgccactgcattctagcctgtgtgacagagtgagaccctgtctccaaaaataaaataaaataaggcattctaataaagttaaccagaacaatctgaaatcttttatgttcttttcaagaagtcatggtaaatcttaccatgactgaaattcaaggaactttgaacacctgaaagtatccagaagaatcagcgactaaaattggacagacaaaaaatgtaaaatatcatagttttatgctccatcatatattcactagctcctactgcttgcctgaaaatatacacttctttgtgcatggctcacaattcttctttgagtacagctattgttgatacattgagctcacaagcttcaagtggccgaaattgttgcttcttgagaatgtttatagatctctctaaacgagaaacagaaaacaatattcttcctttgtttcttgcttggannnnnnnnnnnnnnnnnnnnnnnnnnnnnnnnnnnnnnnnnnnnnnnnnnnnnnnnnnnnnnnnnnnnnnnnnnnnnnnnnnnnnnnnnnnnnnnnnnnngactgctagaggatcccctaaatatataatataataatataatatataatatataatataatatataagatataatataatatataatataatatatatatagtatttttaatgggaacaaggtttcattatgttggtcaggctggccttgaacccctggccttaaatgatccgccccccttggcctcccaaagtgctgggattacaggcatgagccactgcacctggcctactgtatatactagattctaggtgtggattctaccatctttctaattcatttgtggtcctatggagtgttaggtgagttgatgaccgcgagttagatgttgcatcccatcaacagcgtctgtgcctgggtagggttgtcacatctggtgtggcccctgttgcgtttgttcttctacttaagaaacacagtttcttctcattccatttagattcatccagggtttaatgaatgaggaggcctcaagtatggttttccttcctgatccccttcctgtgattggctagagaaggggatggcccttggcaattgtgaggcggggggcgggcaggcatcactcatctgtggaaggagttggggaggaggcctctttcttcactcatgaatgaatgcttcacttcactgctgtcaggtggggctgcctgagaagcagtgtggtgacattctcaggaggggtgggggtggtgcctcacctaagaggtggcctcttccatgactgatagaaagatgttgcagactggggccacctggcctgattgtaatcccctaacacatagggtgaggacagagtcctcacacccactactgaaatttcagggatgggccctgtgctagtagaaagcagggggtggggagctggggacaagaaaaacaaaatcatttggttaaaaagcttgcttgactgggcaccaaacccaggcactctggtttcacagtccatggtctaatcactgcactgcatggcctttgtagctacttctgacagtgtcacaggagccctaggtaggaaggaagagtaggtaccacctcctctgcacggggtgcccccaaccccaagtactgtttatttaagacactgacttttgtgaatgattttacttggatacagagaggggaaggaaaggaggactgagctaacaaaaatatagtttgaagacaaaacaaaagaaaacaaaaacctgtgtgcctgacatgacgcagtggagaaagaaagggctgaaaattatttgggctaacatcatggagaagctgaaggaagagaaagagttttgattcaagtctagactcttttcttcctccctcctctactgcagagcaccaaggaagactcacaaggctcatgggtgacctagaaaatctcacctctcctctccatgtctcaggccctcatctgtataaggaaaaagttgagccagttgatgaaccagaggtgatgtctctgagatccattcggttttaatctcttgtcctccaaggggagagggtcaggggca

SEQ ID NO: 702535 - DNA, 586 bp, Homo sapiens
tggctctaaatcccaagtggcaaagagggatgctattagggcttcttgaacctccacaaatgaaggctattcaactagaaagaaccaccagaatcttacccataaactgcagctcactccagaaaggtactggtgataaacagagagacttaataattgcttaggaatagggtgastttttaaaatgagaccaataaaagagggtgcatttccaagaatttaacaaagacgtagccagaaatctagacactgaccccaggtgaccagacatacaattgtttatgtaattagagtacacaggaggaatacactggaatattggaaacatgaggggatagaaaaaaagactgctgtttggaacagaatgtctttataggacatctatttcactgaaagggacagcgttttctggctatttctctttcagggtcagacagccaattttccctgttaccaagcattttggcaaaattattatttctttgtgcttgaaagggccttagaaaattaatccagctccctcatttttctgtcccctctaaacataggtacacagagcttttcataaagggccgggtattaaata

SEQ ID NO: 702536 - DNA, 1384 bp, Homo sapiens
tcgtatttttggtctgtgctcatatgaaggcctagtgagcttctagggtgycagaagaaaccttgaagcagcatgcagaaaggtgtgtgcttgagttggggccttgtaagtgcaagctggctctagatttgcaaggaactgtccacctcagcagcagctgaaatctgaggtaagccaaggaggtattaggggtgtgatgcaggtactaggggcatcttccttaaggatcagccaagagcttcccttcccctgaacttcatcactggtttcttcttgagataatggccatctccacttcctcacctaccattttttctcaatacaccatgatcaaatttcaaatcaatgaagctgtgttgctgttgattatcatattgatgatagcgaaatcacatggtcactcctcagttcttatgttttagagttgttggtgtacaagtggcatttacatcgcagggctggataagactacatggaggagagagagacagaaagagagggagagaactgagcccttcaaaattataaaatcagggacatgaataaaatcatcaaaagatccttcagtttgttgttcccttctcatgctgcatatactctctgggaattctcaaccaaactcatgacttttcctatcatctactgccaggccttcttgacgtccagtgccaaatcaccatctgactgctaatatctcagaaactttctattctacatatccaaaggactactaattatccctccctaacccaccaatgcaaaagaaactccttctcccataagcccattctgatttatagaatcagcacctagacaggaacttgagtcagaaactcgggtgtcatcctagtctacttcgtttccttcttaatcgatgtccagtttccactggcatgcttattctacctctttaacatttcctccttcacatccatcccctctgctccaccccaatgttacaggcttggatcaggacctcatcaattttcagtagaattaatgccatcatctcctaactagactttctccctccagttttattcattccttcttatctaccaagtatcccactgctgaaataatgtttatgcaacacaaatcagatcattgtacacttctttccgttgttctctagaaagtcaggtgcaaatttctaggcatgccatggccactcaagtgatcactatcctactatctcattcaacagcatcacaaaaaacagcctgcgttggacttcattcaacatacagtaagtttctgaataaagaagatgagaaggaaaagtgaaagttaaattaggcatctgatggattatcaagaagttgttatgaacagctttatcaccttactgagctgcaaagaattcattactttcttataatga

SEQ ID NO: 702537 - DNA, 1384 bp, Homo sapiens
tcgtatttttggtctgtgctcatatgaaggcctagtgagcttctagggtgtcagaagaaaccttgaagcagcatgcagaaaggtgtgtgcttgagttggggccttgtaagtgcaagctggctctagatttgcaaggaactgtccacctcagcagcagctgaaatctgaggtargccaaggaggtattaggggtgtgatgcaggtactaggggcatcttccttaaggatcagccaagagcttcccttcccctgaacttcatcactggtttcttcttgagataatggccatctccacttcctcacctaccattttttctcaatacaccatgatcaaatttcaaatcaatgaagctgtgttgctgttgattatcatattgatgatagcgaaatcacatggtcactcctcagttcttatgttttagagttgttggtgtacaagtggcatttacatcgcagggctggataagactacatggaggagagagagacagaaagagagggagagaactgagcccttcaaaattataaaatcagggacatgaataaaatcatcaaaagatccttcagtttgttgttcccttctcatgctgcatatactctctgggaattctcaaccaaactcatgacttttcctatcatctactgccaggccttcttgacgtccagtgccaaatcaccatctgactgctaatatctcagaaactttctattctacatatccaaaggactactaattatccctccctaacccaccaatgcaaaagaaactccttctcccataagcccattctgatttatagaatcagcacctagacaggaacttgagtcagaaactcgggtgtcatcctagtctacttcgtttccttcttaatcgatgtccagtttccactggcatgcttattctacctctttaacatttcctccttcacatccatcccctctgctccaccccaatgttacaggcttggatcaggacctcatcaattttcagtagaattaatgccatcatctcctaactagactttctccctccagttttattcattccttcttatctaccaagtatcccactgctgaaataatgtttatgcaacacaaatcagatcattgtacacttctttccgttgttctctagaaagtcaggtgcaaatttctaggcatgccatggccactcaagtgatcactatcctactatctcattcaacagcatcacaaaaaacagcctgcgttggacttcattcaacatacagtaagtttctgaataaagaagatgagaaggaaaagtgaaagttaaattaggcatctgatggattatcaagaagttgttatgaacagctttatcaccttactgagctgcaaagaattcattactttcttataatga

SEQ ID NO: 702538 - DNA, 1384 bp, Homo sapiens
tcgtatttttggtctgtgctcatatgaaggcctagtgagcttctagggtgtcagaagaaaccttgaagcagcatgcagaaaggtgtgtgcttgagttggggccttgtaagtgcaagctggctctagatttgcaaggaactgtccacctcagcagcagctgaaatctgaggtaagccaaggaggtattaggggtgtgatgcaggtactaggggcatcttccttaaggatcagccaagagcttcccttcccctgaacttcatcactggtttcttcttgagataatggccatctccacttcctcacctaccattttttctcaatacaccatgatcaaatttcaaatcaatgaagctgtgttgctgttgattatcatattgatgatagcgaaatcacatggtcactcctcagttcttatgttttagagttgttggtrtacaagtggcatttacatcgcagggctggataagactacatggaggagagagagacagaaagagagggagagaactgagcccttcaaaattataaaatcagggacatgaataaaatcatcaaaagatccttcagtttgttgttcccttctcatgctgcatatactctctgggaattctcaaccaaactcatgacttttcctatcatctactgccaggccttcttgacgtccagtgccaaatcaccatctgactgctaatatctcagaaactttctattctacatatccaaaggactactaattatccctccctaacccaccaatgcaaaagaaactccttctcccataagcccattctgatttatagaatcagcacctagacaggaacttgagtcagaaactcgggtgtcatcctagtctacttcgtttccttcttaatcgatgtccagtttccactggcatgcttattctacctctttaacatttcctccttcacatccatcccctctgctccaccccaatgttacaggcttggatcaggacctcatcaattttcagtagaattaatgccatcatctcctaactagactttctccctccagttttattcattccttcttatctaccaagtatcccactgctgaaataatgtttatgcaacacaaatcagatcattgtacacttctttccgttgttctctagaaagtcaggtgcaaatttctaggcatgccatggccactcaagtgatcactatcctactatctcattcaacagcatcacaaaaaacagcctgcgttggacttcattcaacatacagtaagtttctgaataaagaagatgagaaggaaaagtgaaagttaaattaggcatctgatggattatcaagaagttgttatgaacagctttatcaccttactgagctgcaaagaattcattactttcttataatga

SEQ ID NO: 702539 - DNA, 586 bp, Homo sapiens
tagaatgggagctattattcagttggttttgatgctggcttggtctgaggctgaagccctaatgctgggcttttatcatattatgaaggctgaaacctcatgctccagagtagacagctgagcccatcttagaccctcatttctgagcccctaatgtctgcttaatggctggccactgcgacctggtacacggagtatcagcccatgtcaattagccccattataaaccctgaagaaataagccatcctttcctggtcccttcctcttgccttcmtctttcattgtaacatgaattgtgctagcaatgggcaccaagtagccagcatgtgtactgaataaaagcaaggaatatgtagtacaatgacaatgagattggttgacaataaatatgtgtcgtttgcaatctaaaaacagacaaaatgatcatttaaaaaagatgggttcatgagtttatgtccatcattcataaaggtaaggtctattcaatgccacttaaccagctttgatgatagaatttatgaggttgtaccaggttggaatgataaagcactcaaaggtatatgccacttataaatataaccacat

SEQ ID NO: 702540 - DNA, 628 bp, Homo sapiens
ggagaaaaggtcattttgaaaagggttttaatcaaatacgccacaccagtcacctagagccaagttgttttatgtgggtgattacacaacsactcttcagttctttctgtttctctttctttcagtaacttctttgtggctccaattgagatcttcagagtgagccttcactatttaatctagcagctgaccacaaaccatgtcacaggcagaaaaacagaagcataaggactaactcatcctgaattaatgaaaactcttggaggaaagggtttttggtgtgtgtgtgtgtgtttttaaagatcttacaaggaaagcaaaacttcaaatcaaaagaaagctgttgtcagctatgaaggcagcactggcaaagttcaggagactagctgaactcattttaagcaattcaatataaaggtgactcctttctgccctttctcacttggtttccctccttctgaatgaaagtgtccctactgtgacaggtgaggacagagctcttgagttgaaatatctgcaaatggtctgtgtgaccttggataattgttttgacaaacatgagaccacatctttgtatggtataagttcataaagacctgtttcaacataagcaaatagaagccaaaat

SEQ ID NO: 702541 - DNA, 596 bp, Homo sapiens
gaagagatgggaggtttgcagtyacagatttaggttcagatccatggatgaatagcatgaccttgagaaagttattcaagttctttgggcctcaatttctgcatctgtaaaatggaaatattgatactacttctgaatgttgttttgggggttaaataatatacgtagagtaacaggcccactgttaatattagttcccttaagatatcctccttgggtagggctgtcatgatgaggtagagctggatggctactttctattggatcctcaagagaaaggatgaataagcaggtactgactaggatctcagggtttgggcatttttctttaggggggtcagttggggaatctgaaaccctcttcctactgtacctgggaccaaaaggcagacctgaccttaggattccagaggctccccccaagattgggtgtggcatcaatgatttctttcccagtaaaccctgcatcagacctactccccacaacacacacacaaaaatccaggctataactactttagggaatgatggaaggtttggtcttagagcccacttccatccacactctgcagagaccctggactgctcacctccca

SEQ ID NO: 702542 - DNA, 1390 bp, Homo sapiens
tcctaagcaagacatgctaaagattactgcatcttgagatgtacgaatttctgtatattcaatctcaggagactctataactccaccatccaagattagcaactaattgccactagtgacatgtggctatttagcccttgaagattggctagtccaaattgagactggctgtaagaataaaatacacacagattttgaatatttagtttggaggggaaaaactcattaataagttttatattgattatatgctgaaataatataaattatattattttcacatgatagttaaaatacattaacaacataattcatctgttttctaactttttaaaaaatacggcaccatgaaaatttaaaactttacacattacatgtctattggataacactgttctgtaacatatgaaaattccacagttttgtttcagagattccatcatcacttatggaatcatgtcttactaagctatttaaagaatatccctttggccaggcgcagtgcctcatgmctgtaatcccaacactttgggaggtcgaggtgggcggatcatttgagataaggagtttgagaacagcctggccaacatggggaaaccccatctctactgaaaatacaaaaattagcctggcatggtggtgggtacctgtaatcccagctactcaggagactgaggcaggagaatcgcttgaacccaggaggcagaggttgcagtgagctgagactgcaccactgcactccagcctgggcaacagagcaagactctgtctcgaaaaagtaaaaataaataataaagtatattcctttgttgaagggtctaagactgtgcccttgtctacacatgggctaatacaattattcctgcagaggatctggtggtttttactatcagccacaacattgttctcagagctctggaatggagtagaaatggcaaagaccctccctccaggggctatagtagatgccccagatattcttgcagaggctaaactgaaagctatggtagtccttttagtttatgtgccctaacatgaatcaaaataccatctcagggcccagtatggtttcaacacatagtttcccatcttcagatacaaaactgataacaatgatataagaattatttttaatagggaatttaatgtttaactatttgactcatttctctctttggtatccagaaatttttatttcatggcatttaatacagtcaactttgggtcaggcccatagaggaaagtcattcacaatttgggggagatccccaaatacaaggacatagtgtttgaaattaaagacccagggatggttgacaccaaggcatgggcacaaaatcgagaaacagtggcagataacagtttaaaaataccagtgtttagtttatat

SEQ ID NO: 702543 - DNA, 588 bp, Homo sapiens
tgcatttcattaaaactttaccagaatgtgatgttattaatgtaggctcttaattgaggtgacaattggatgatcaatagcctgacacctgttaaatttgtgtatgtttagtcattgacaactacttatcaacttamcttctccctggtggcagcaaatttcatttgacattgattgtaagatacattcagatttttcaaataatcaaatatagggaaggttattttatgtggggggataatgagtaattagtgggtatgatgtacattatccaggtgatggatatcctaaagctttgaattaaccactacacaatctatgcatgtaacaaaattgcatttgtacttcattcattatacaaattttttaaaaagttattttacaatggaaacaggaattctcctagttaagattttaagcctaagctttactttgctaatcagtgtgcttttcaagaatatttaaatgattagttagattcatctgaacaggggaaacagtgtcttaaatagaattttgaaaaaagaataaattttactattgtatgaaagaaatagtacagcttctgaattaatggagcgtctattt

SEQ ID NO: 702544 - DNA, 893 bp, Homo sapiens
attttaacaagttatggaacttcagtaatgttcagtttcctcatttgtaaaaaggagttataacaacaattacctcctaaaactgcatctactggataatagttacatttccagtaaatgctatcaattacaattattgtggcagaagctttaccttaaagtttgtttatgtttcatttttggttgctattacctttctttacctgtgtttaggttatgtgggtcttatggataaaaagtcatcagcagtgttttttaatagatgatatgtaagcccactagagtccttggagtcctcgaagcaccttgaaggcaagaaacatttttgcccagtgtccagcacagtgtttggcacatagtaggtgcttaacaaacatttgttaaataaacaagtaagtgactgctatgaaaggagataaagaaaatcccttgggcaactcattactttacatttataaggggccaatataaataataaaataaataaaagctatatttagagcataaagtacccaatgtctctgtatactaacttctgaactcctagaacttgtttttatctacagtgttactagcattttgaaaagatctcaaatgcctgggctttctttgttatttattagttttgtttgttctgttcaagtagtatagcaattgtgkgggaattaaattgaaaccgtatgaacgatgtgttaaaatctaacatgttcaaacaggggaaagcagaaccagacaagaaacaaatttcaagtctcaagaagccaattttgtatttctgcagaccccacatatagaatataggcactgtattaataatacattaatgcttttgtcttctaaagagtgatttgctcaacaataggccttcctcggcagttttatgctgtagttga

SEQ ID NO: 702545 - DNA, 1749 bp, Homo sapiens
atagagacggggtttcaccacattagccaggctggtctcaaactccgacctcaggtgatccgcccaccttggcctcccaaagtgctgggattacaggcgtgagccaccatgcccggcccatggctcccttttgtccagagcagtgagggatcacccggccaagatcagctcccacatgagcccagccccgtggggcctcaacacgggcccaaggaggtgctggcctggcagcagctctgaggccctggaaggctgtggggaggaggcagcagagaattcgagaagctgctccagcaccaggctctgcagaaggccagctgggcaccagggctgatgtgcccgtggtgggagtgagccacacgcaggcatcccggagaggcagtggggcgtgaggccctggtgggagtctgagtctctgtgtgcagaacgtcgtctggatacctgcaggctgtggaggctcccatctattaaaatgctctgatgcctctatgcttacatttatttcatcaccggcacccacagacacacagcacccactgagcctcatgaggaaacacggtgaccgccaggcccctggtgaccgagatggcctggagcgtcctaaatggcgcgtgtaatgatgggactagctttggagagcacgggagttgaactgtctcacacacaggccgatggccatgaggctacgcgctcctgttcctatgacctaagtctcagcctgtgcccaccacgggcagaggccgcaggatgctgggtccctccctgggcctcggggacccgggctgggctctggagctccgggagggtttggctcacacacgggttaagtctgcttggctcgcaatcaggtcagggagaacaagcggcccgagccctcggcgggaggctgctgaatgagggccattagcatcgctgtcatcggccccrtcctgcgcccgccccgtttcatcagaaggcagccagcgctcctgtcccctgctgctggcgagtgtggaggggaggaagccatgcgctgcccaatttttaagcaaagataacgaagactctcctcccgcagatttgctgccatctcccttctggggagctgaaccccgccggcagcagcctcgccgaagggagagaaatttgccatggaaaccaggccctgagctcagaacccaaacctctaatgcctacgtagactgggtgggcgggcgactctgggtcagggccagcctcgccggctgcagtgggagggacccgcgggcacgcacagacccccacagcctgaataaactcctcatccaaacaccgcctggcgggattatctgaagatgggaattcacgcccagtgatgacatttcaaacagaactaacagtttcttaaagcggtgggcagggacaggatgccggtgactcgcctggcatgccacagcctggaagcgggcgccaggtttgtttggctcctacctccctaaaacaaaaatcctgcagcctcacaagcgacacgagccagcgtgtgcactgccactccaacccgaagcgcccgctttgaacaaaagactccaaaatgaaggccatctgctcctgccagaccaagccagcgggtgagcgaggggccgcagacaggactcagcacacgacgtgaggcaggggctggtcagacagcgtgaggctaaggcagcccctgcagggtccagagccagccccggctcccaccacacccaggccctggcccgaaagcctgctcctacagccactccatcctcc

SEQ ID NO: 702546 - DNA, 1972 bp, Homo sapiens
tagtgaataagtctcatgagatctaatggttttatagagagcagttcccctgcacagactctcttgcctgtcaccgtgcaagatgtgtcttgctcctccttcaccttccaccatgactgtgaggcctccccagccatatggaactatgagtctattaaacttctttttctttatcaattacccagtcttgaacatttcttcatagcagtatgaaaatggactaatacagccaccaggcctttgtgccactccatcaaccagtctttggatgcaggctgcccccagggagtggactagcctcccttggatgagacagctccaattagacaaagacagggcaactcctgctgaggcacacgctatgagtcatcagcaggcagtggtcagctggagcgatgagtgccttgatttttcaagggagattcaggcaacacacaacaacatccactacagcctcttagtctaaaagacctcgatgaaacacaaaatccataccatggggtgaaaataagtaaagtcaatcagaactacagggaaatgaggaaagaggaataaaataaaatcacatttggcacacaaaatttaccccagggatgctacacatctataaaacatgagccacaaacatgaatctaagattcccagtgacaagagggaaatgcggtcatttccaagagttacaagatccacaaaacaaaaaccttccatatgtttttcttgacactaaggtctgagaggtgtttgttctctgggtcctgctacagtgtgagccttgtgatgtggacgagaacaccaacatcatccctgtggtcaatacaatagcaagaatgtcagagcaacttctcagagcacacctagaagctcacctcagatgcagccccaaagagcagcggctaaacaacttgaaaagtctgtgccttcccttaaacagccttactgtacatgaaacatttcccaggcaatttcgtcttagattccaccttcacagagagaaatgtatgaaaacatttttagaacacctgtccgtccgttggtaaattttttttaaagtgggtacaataattgcaataatctattgcgtttttgaaacatttgttcagcaaacagtctttttaaaaaacaaatcattttcatttggctggtgataaattaagccttttatgctcatagaaaatgttyttttgttttatttccaaatctctccctgtcgacattcagagagacatatttatggagaaagcaaaacagatgatctggccacgttgctgaaggagggccacatctgtctctaagtaccctgagccactaaccgggataaatctttctaccacagaaacattacaacaccaggcttctgagcctcctttccaaatggcctgcgtttccagcttccttttcctcctacagacactcacctgggtctcagtcactctcccagcccccagcatatcgtgacccctgttcctctttctccttgaaattctccagagctcactcacttgcatctgctcttccttcacaaaagaacatacctacagtcctttccaatttgaggtcaagttccttctccataagcagtattctcccaatattttgctgcttttcaaattcatattttcctactttgaaaggactctgacctccaccatgagtccaagcgtacatgatgaaatttaaaacatttccccattcacccgctccttcacctttcagtgatgtcacataaacaggcactctagagacaagcccagggccttgccactccccatgtgctctctccaggagacaagaccaaggcctgtttattccacttaaatcaacagaagagctatcctcaggctgcagtcctgccctggccagccaaatttggaatccacatggcatgcaaagtctgtttaaacgagacagccagagggatcatcttcaggctatatgggggagaggagggccgtgtgggtggaaaagagcatgg

SEQ ID NO: 702547 - DNA, 1972 bp, Homo sapiens
tagtgaataagtctcatgagatctaatggttttatagagagcagttcccctgcacagactctcttgcctgtcaccgtgcaagatgtgtcttgctcctccttcaccttccaccatgactgtgaggcctccccagccatatggaactatgagtctattaaacttctttttctttatcaattacccagtcttgaacatttcttcatagcagtatgaaaatggactaatacagccaccaggcctttgtgccactccatcaaccagtctttggatgcaggctgcccccagggagtggactagcctcccttggatgagacagctccaattagacaaagacagggcaactcctgctgaggcacacgctatgagtcatcagcaggcagtggtcagctggagcgatgagtgccttgatttttcaagggagattcaggcaacacacaacaacatccactacagcctcttagtctaaaagacctcgatgaaacacaaaatccataccatggggtgaaaataagtaaagtcaatcagaactacagggaaatgaggaaagaggaataaaataaaatcacatttggcacacaaaatttaccccagggatgctacacatctataaaacatgagccacaaacatgaatctaagattcccagtgacaagagggaaatgcggtcatttccaagagttacaagatccacaaaacaaaaaccttccatatgtttttcttgacactaaggtctgagaggtgtttgttctctgggtcctgctacagtgtgagccttgtgatgtggacgagaacaccaacatcatccctgtggtcaatacaatagcaagaatgtcagagcaacttctcagagcacacctagaagctcacctcagatgcagccccaaagagcagcggctaaacaacttgaaaagtctgtgccttcccttaaacagccttactgtacatgaaacatttcccaggcaatttcgtcttagattccaccttcacagagagaaatgtatgaaaacatttttagaacacctgtccgtccgttggtaaattttttttaaagtgggtacaataattgcaataatctattgcgtttttgaaacatttgttcagcaaacagtctttttaaaaaacaaatcattttcatttggctggtgataaattaagccttttatgctcatagaaaatgtttttttgttttatttccaaatctctccctgtcgacattcagagagacatatttatggagaaagcaaaacagatgatctggccacgttgctgaaggagggccacatctgtctctaagtaccctgagccactaaccgggataaatctttctaccacagaaacattacaacaccaggcttctgagcctcctttccaaatggcctgcgtttccagcttccttttcctcctasagacactcacctgggtctcagtcactctcccagcccccagcatatcgtgacccctgttcctctttctccttgaaattctccagagctcactcacttgcatctgctcttccttcacaaaagaacatacctacagtcctttccaatttgaggtcaagttccttctccataagcagtattctcccaatattttgctgcttttcaaattcatattttcctactttgaaaggactctgacctccaccatgagtccaagcgtacatgatgaaatttaaaacatttccccattcacccgctccttcacctttcagtgatgtcacataaacaggcactctagagacaagcccagggccttgccactccccatgtgctctctccaggagacaagaccaaggcctgtttattccacttaaatcaacagaagagctatcctcaggctgcagtcctgccctggccagccaaatttggaatccacatggcatgcaaagtctgtttaaacgagacagccagagggatcatcttcaggctatatgggggagaggagggccgtgtgggtggaaaagagcatgg

SEQ ID NO: 702548 - DNA, 1972 bp, Homo sapiens
tagtgaataagtctcatgagatctaatggttttatagagagcagttcccctgcacagactctcttgcctgtcaccgtgcaagatgtgtcttgctcctccttcaccttccaccatgactgtgaggcctccccagccatatggaactatgagtctattaaacttctttttctttatcaattacccagtcttgaacatttcttcatagcagtatgaaaatggactaatacagccaccaggcctttgtgccactccatcaaccagtctttggatgcaggctgcccccagggagtggactagcctcccttggatgagacagctccaattagacaaagacagggcaactcctgctgaggcacacgctatgagtcatcagcaggcagtggtcagctggagcgatgagtgccttgatttttcaagggagattcaggcaacacacaacaacatccactacagcctcttagtctaaaagacctcgatgaaacacaaaatccataccatggggtgaaaataagtaaagtcaatcagaactacagggaaatgaggaaagaggaataaaataaaatcacatttggcacacaaaatttaccccagggatgctacacatctataaaacatgagccacaaacatgaatctaagattcccagtgacaagagggaaatgcggtcatttccaagagttacaagatccacaaaacaaaaaccttccatatgtttttcttgacactaaggtctgagaggtgtttgttctctgggtcctgctacagtgtgagccttgtgatgtggacgagaacaccaacatcatccctgtggtcaatacaatagcaagaatgtcagagcaacttctcagagcacacctagaagctcacctcagatgcagccccaaagagcagcggctaaacaacttgaaaagtctgtgccttcccttaaacagccttactgtacatgaaacatttcccaggcaatttcgtcttagattccaccttcacagagagaaatgtatgaaaacatttttagaacacctgtccgtccgttggtaaattttttttaaagtgggtacaataattgcaataatctattgcgtttttgaaacatttgttcagcaaacagtctttttaaaaaacaaatcattttcatttggctggtgataaattaagccttttatgctcatagaaaatgtttttttgttttatttccaaatctctccctgtcgacattcagagagacatatttatggagaaagcaaaacagatgatctggccacgttgctgaaggagggccacatctgtctctaagtaccctgagccactaaccgggataaatctttctaccacagaaacattacaacaccaggcttctgagcctcctttccaaatggcctgcgtttccagcttccttttcctcctacagacactcaccygggtctcagtcactctcccagcccccagcatatcgtgacccctgttcctctttctccttgaaattctccagagctcactcacttgcatctgctcttccttcacaaaagaacatacctacagtcctttccaatttgaggtcaagttccttctccataagcagtattctcccaatattttgctgcttttcaaattcatattttcctactttgaaaggactctgacctccaccatgagtccaagcgtacatgatgaaatttaaaacatttccccattcacccgctccttcacctttcagtgatgtcacataaacaggcactctagagacaagcccagggccttgccactccccatgtgctctctccaggagacaagaccaaggcctgtttattccacttaaatcaacagaagagctatcctcaggctgcagtcctgccctggccagccaaatttggaatccacatggcatgcaaagtctgtttaaacgagacagccagagggatcatcttcaggctatatgggggagaggagggccgtgtgggtggaaaagagcatgg

SEQ ID NO: 702549 - DNA, 633 bp, Homo sapiens
  misc_feature 293: n = A,T,C or G
cataaaatatgatgaattcatgtcctttgtagggacatggatgaagctggaaaccatcattctcagcaaactatcgcaaggacaaaaaaccaaacaccacatgttctcactcataggttggaattgaacaatgagaacacatggacacaggaaggggaacatcacacactggggcctgttgtggtgtggggggaggggggagggatagcattaggagatatacctaatgttaaatgacgagttaatgggtgcagcacaccaacatggcacatgtatacatatgtaacaaaccntcacatgtgccacatgtaccctaaaacttaaagtataatttaaaaaaaggcactgggaggtaaacttagtcatttcatctaatctatcacataattaaaaaatagtttaattttaatttaaggaagagagtcaaagaattattcctggcagtcaggaaccttaacaaatcctggggtrcaggaagcctctgcacctgtcggcaaggtggggagttctctcaacgggtaacgtcaggtattgcttagcactttacatctactgcatcctacttttgcttacttttgatttaccttttctatttctcctagtaggtttgtcctagaaggattttttaaaatt

SEQ ID NO: 702550 - DNA, 1236 bp, Homo sapiens
cttttttttttcccttggtaaaaccacccactacctgaaaaacgttgactgggcttctttttctcacaagcggatgtgtcaggttaggcatactcacttctaaatgccaaagttgaaggtggcttaagactccacagatgaattgtagtattttgcatctctgaaactccaatagttgactcttttgaccaacataaaggattatctcttatggttcaacccaacactgcaccctatgtatatcaccttgggcatgcacagagtaggaagcccttcatgggtttagtacccacctacctttttgttccttatcttccaccacttttcctattaaatcattacactaaatcatttcactcacctgaatgtactatgttgttttacatcttcataaaattgtctgtgctgttcccccttcactggaatattattccctggctttttaacctataaatttctattcatctttcaagacttattcatgtgtcagcttatctgtgaaatgttcccacatttcaccagatcccttcytcaatccacttttccttgataccttggtcctctaactttatgttagtgtgtatcacactgagctactattacctgttgaaggtctgtcttacctacagggctatggggtccttgagaacaaggaccatgttttattcttctctccatttcaatgtctccacccaaataatgttgaacatgctgcttgaattatagccaagaaaatgaagagtgtggcttggaaataacagtccaatttccttgcaaatgtatgctttctcttgttgaaagtttgagaataggttaaataaatctgctaatttattctgtaatccattgaaaatattggtttggaatggactctctgatagagaaattcactttttttaagttgataagttaataattggatttacattttagaaacatacagacaatagctttaaaagggggaggtacaggaagggagacctattcaggtactgttccaagcttaaattaaggcagtggctgcatagatgcagaaaggaagacaggaagagatatttaggagtattcacattgaagccaccagagtttcatttacatgggtagggttgaggataagaggtctcagactattgaaatttttatattagtatccctggtcatgaatttaactaaagaggtagtgatacctggaactatgtgaggtgataaatattttaattaacttgatagtgtaat

SEQ ID NO: 702551 - DNA, 1164 bp, Homo sapiens
catttattttctttgatattataactgtcttttctcttacactgaaaatctttattaaatcattgatgtgattacttattgttttaaccctcaatacaaggaaaatgattttaaaataccaaactgatataaatacactagtaaatactgttttggtaccctgttttcatccccttgacaaagccaatgtgacctctcatcagctcctgtagtgattggctgctgatgtctccrggggaacccttcctgcctaggaagttagctcgggctcccatccctgacagcaggccacagctgactgactgacataatagtacaaaaagttagcccccgaaaccgcaaaagccagtgccctttggtggggaggaggagaccactgagtcatggtttaagatccagagccctccactgaaggtcagatcaaggacagactacctgagatcagatccagtttcttttcatccctccctcacaagtctttcttcaagagcacttcctcaaaaattcacttgcaccaaatctcctgtgtcagattctgcttctaggaaaccctacataagacaactacgaacaatgtaactccagagggaggtttgagatttcatttttttttttgcccatagaatgcatctcattaagaatatataatcaaaatgccatattataaagtcactttaaatgctttctgtatgtgtgtatagtaccagacggatatgcaattgggtacacttgggttttatttttaatttaaaaaatgttttaataatttagattttttaagaatattgcacttatgacccaaaagtcgtaactaggaaaactaagaaaactcttatctgcccccaatagatgtcattaattatatttttctccaaaattatttattgtatctagttttcaaattgatttgcatagagttgatcgtattaaactttattgataatgttacattgatttatttttgttttaaatatttctcatttttctttttgatttcttctcaatgaatgaagtcttaccaaaatgtaaaagtttttaaatgtggaattcttttatacatttttttgctattgatacttattttaattgcattattgtcagtccacattatctatgtaatataattttcataaatgcttcatgtgtaattttataatgtataaa

SEQ ID NO: 702552 - DNA, 1164 bp, Homo sapiens
catttattttctttgatattataactgtcttttctcttacactgaaaatctttattaaatcattgatgtgattacttattgttttaaccctcaatacaaggaaaatgattttaaaataccaaactgatataaatacactagtaaatactgttttggtaccctgttttcatccccttgacaaagccaatgtgacctctcatcagctcctgtagtgattggctgctgatgtctccgggggaacccttcctgcctaggaagttagctcgggctcccatccctgacagcaggccacagctgactgactgacataatagtacaaaaagttagcccccgaaaccgcaaaagccagtgccctttggtggggaggaggagaccactgagtcatggtttaagatccagagccctccactgaaggtcagatcaaggacagactacctgagatcagatccagtttcttttcatccctccctcacaagtctttcttcaagagcacttcctcaaaaattcacttgcaccaaatctcctgtgtcagattctgcttctaggaaaccctacataagacaactacgaacaatgtaactccagagggaggtttgagatttcatttttttttttgcccatagaatgcatctcattaagaatatataatcaaaatgccatattataaagtcactttaaatgctttctrtatgtgtgtatagtaccagacggatatgcaattgggtacacttgggttttatttttaatttaaaaaatgttttaataatttagattttttaagaatattgcacttatgacccaaaagtcgtaactaggaaaactaagaaaactcttatctgcccccaatagatgtcattaattatatttttctccaaaattatttattgtatctagttttcaaattgatttgcatagagttgatcgtattaaactttattgataatgttacattgatttatttttgttttaaatatttctcatttttctttttgatttcttctcaatgaatgaagtcttaccaaaatgtaaaagtttttaaatgtggaattcttttatacatttttttgctattgatacttattttaattgcattattgtcagtccacattatctatgtaatataattttcataaatgcttcatgtgtaattttataatgtataaa

SEQ ID NO: 702553 - DNA, 1119 bp, Homo sapiens
aggaatactaatttctatggcctgccttggggagaaaggaaagcaggagaaagaagggcagaagaaggttagaaagagactttccttctgaagttcttccagtgtccttcatgttcaaagtactcagcatgccaaatcactatatttgggggtgtcattttcagagctcccacacaaaaaacttaagaagtttgaagtttaagtataatttaatgttatttatattctcattcaaattttaatatagtcattgtgaggaatagtaccatttataaatatgttatagttccaacaaatttaatgatacctatgctgaaaggttttatgagtgtaacaaatatgtatgattagttcataaattgactcttgttttatttgtataatataaattttagttaaagtcatactgaagtgaactcacagtctgcaatargaaaggtcgctgggtaagaatgcttaaggaatggaaatcgctatgaattttgagatcatgctagttcatctcgaacctggtgaattctattaagatgagaaataatgtatagttcttctgtaatgagcacatctaactgtaagaaattaaatctgatgaccaaaaaagggagcaatcagtgtgcatctctgatgtttgtgtgcaggtaaattgccttgcgttaaactgaatttggtagctgaagcaattatttctctataatattttcccttcagagagtaactgcaaatgatacaagtagcaaaccaacaaccaaaaaaatgacctaaacgttttattatcaataaagtgctacaactgtgaaggtaactgaatagaaaaccaacaatcaaaaggaaaaaggcataacatgttttattattgatataatttgaggcatacttataatgatactttgaattccttgaattgaagaaaatcgaaaactgcatagtaaccctgcctacttatatgcactgggaatgttactacccttgtgattcacttaccatatacagcagtgtaaaaagagggtttccctactgtccttttcagagagctccaccctgattactttcagtgccacccatgtgtaagttcaaggctttccatttcccactagcttcctctaagttttcagagttcca

SEQ ID NO: 702554 - DNA, 607 bp, Homo sapiens
taaaggatgcattggattccatgttttctgggtgaatccaacacacaaaaaaacatttttattttatttacaaaagccagtttcatctgttgcaatgtgaatatcaaatattaatagttgcatttataatatctcatttacatgtataattgaaccatgtcaaaacccagtctgacacatgatagcttttggttaaaccagcaaatgcaattacgtttcgcaattggagtctttttcaatcacttgtcaaaagcacaagtgtttcattttatttttttgaaattcacttgaaactatgaaaatgatttaagtatacatgatttaattatctcataaataagaggtaggagaacwactgaacatatgaagttgtaaaaaataattttcaatgatttctgctttgtgattctgtagaagctagaaatcctttatgaaagtaggacctgggcacatattcataagattacatattctatcaaattccttgctttctctctgaataattgtgaagtggaggcaacatattattgcctggatacttaaattatttcacagaataggctttctggtcaccatgaacaatttgaagtgttctcgatattataaa

SEQ ID NO: 702555 - DNA, 607 bp, Homo sapiens
taaaggatgcattggattccatgttttctgggtgaatccaacacacaaaaaaacatttttattttatttacaaaagccagtttcatctgttgcaatgtgaatatcaaatattaatagttgcatttataatatctcatttacatgtataattgaaccatgtcaaaacccagtctgacacatgatagcttttggttaaaccagcaaatgcaattacgtttcgcaattggagtctttttcaatcacttgtcaaaagcacaagtgtttcattttatttttttgaaattcacttgaaactatgaaaatgatttaagtatacatgatttaattatctcataaataagaggtaggagaactactgaacatatgaagttgtaaaaaataattttcaatgatttctgctttgtgatkctgtagaagctagaaatcctttatgaaagtaggacctgggcacatattcataagattacatattctatcaaattccttgctttctctctgaataattgtgaagtggaggcaacatattattgcctggatacttaaattatttcacagaataggctttctggtcaccatgaacaatttgaagtgttctcgatattataaa

SEQ ID NO: 702556 - DNA, 871 bp, Homo sapiens
tgtaatgtgaatataagaacgggatgtgggagctcatggaaggcactggacttcctgggggtgtgagtaagacccagtcaaaggaagaggagaaaaggaggataaataagtacaaaacaaactccttattcttcagctttgcttgatttaggaaaatggggcatttagggccttgtaaataatttgaaatatcacaatattgagttcagaatggagcttcctaagtaataactattattattgttaacattatacaatgttattatacatttcaatatctgtccattcttatattatattttaattaccttgtgatgatctgtctccagttaaagcaaacattgtgaattgccctgattaaaaacaaatatttttcttcttttctcaaggaaattctggaccaaaaggccagaaaggggaaaaggggagtggaaacacattaagtaagtatatagtattttgttttctgtgtgaattcttgtaataagtaagtctgtgatactagagatctgggcttgaggcaaatgttcgcaacttcagcacagatccatacagactctatggaagccaaacataattttctacaaataagcatgctaattggggtaaaacaaatagattatattatacaactctttcaatctcattatccatttgtcttttgtttttgtgatgaatactattttctaaaawttccacaaagaaaattgttcaattttcaagtcaatttctatccactaagggaaaatcaagcttatgaatagaaacaattacaacctccttccttactaaatgaaaccttaaatataagaatttggacagtttaagaaccctgaaaaattaactatctgatgtctggggctcttcgttt

SEQ ID NO: 702557 - DNA, 664 bp, Homo sapiens
gttaggatgccatgtctaccttaattaataatcctttcatcgtcctacaacccagatgacaggatgcttaagcatgtgagtcagaaccccaaatgtaaaatcctgcagaagcttaaaaaataaaaaaagcatgatactggctgttatgaatttgtgagttcaagccctgtctaaaggcaacacaattcactttttaaacaaaaaagaaagaaagaaaatatattatgcaaggaaaacagagctgccccagtcytgtagcacacctattcccatcccattagaaagaattataaaatttctatgcaagagaagacttctgaattcatctatgccagcccttcacaggtgccctgaaccccctcacaacattcctgaccagatagcaacagagagattgctccctctcaaacctggccattctacttctggacaatgccaagtatgcctaagtctttaaattgcactgaaatctatttcttagaactactaaataagaaacctgaggccctttccacatgaaaactcaacatgagaatgaggagggttttcatactctgtacagcctaaagatttcaaattccttcaagcagggccctgtgacttcagggtggtaataagcatttaggtggctagccctattctaatgttttaatgtattagctca

SEQ ID NO: 702558 - DNA, 970 bp, Homo sapiens
tctcccttcctcttcctccccccaccccacacctccctccttctaccaccatcactgattaccaaaagggttgttttaaaaaagtttcagtyatcagttatccaaagtctatcttatcattacctggttcctaaagttcacttgagaaagtaaaatgaaatactggttagctttgtggtcttgagaaactaatggaaacattccaaaactcatacatcttatctataaagtacactttataataggatctaatttagagggttgatgtaataaataaatgagataatctagcacattgacaggaataaaagatcaattgaacatatacaatcattattattacaagaaatatgtaatagttctataagaagagacagggtatagggaaaaaattacggattttaaactttacttatttccctttaagtaaagaaaaaataaacatggactcattccaaagaaatgacatttagaagagcagtggcatgagagcttgagagtatattcctttcattgtcattcactgcgatattccacagataagtaataaggacctactatgggtcattattttattatgggtcactattattttagatgctgggaaaatggtaatgaataaaacagacaataaaaggaaaaatattctagaaaataacttgagttagctataaaaaatgtgaagaagataatacaggatagtgtgataatgaaagattgagtggccattaaatatggtggtccaggaagctaaagatttgaaggacatgaggtcatcagccatacaaaaaccaggggagaggatcttctagacagagggaaaagcaagtaaaagggaccttaagcaataatgagcttactatgttagcataaaagaaagcagagcagtgtggctagagcttagtttgcaaggggaagaatgatgaagccagagtcagtatggaaggtaggcgctaggccatatatggcc

SEQ ID NO: 702559 - DNA, 680 bp, Homo sapiens
tgaatgatataaagatgttagaatactatatcactaygtagtttatttttcagaagttttgtgcatcatttgttagatgtattcctacatatttggtgtttaatgatgctacttgattatacccacctagattccacagattaaaaataaaaagaatactacaaaatgccaacagaataaataaaagggaaactaaagatgaatacatcatagtgaaaccagaaaatactaaatataacagtgatattaacattagccagaaaaaaacggtattattttcaatcagtggcaaaccaaaaactgacacctcatcggaaaccatgaaagccaaattatgtgatgtgatgttttcagtgttctcaaggaaaataatatgccctgtcattttcagaccctaaaatttaagatagttttatacaagtagattctcattaatggatattattgacatgtaattcaagaagattatctcaagtctaagtcctgagatgcagaaagaataaagagcaagaaagtggtaagtgtacctaaataaaattaaccaaagctttgtaaacaaaattaataatacagtaaagcaataacaaacttagtgagatttaaaagtaagagttttaaaataaaataataatagcacaaaagtctttatggagtaaatgaagtattctagcatctttata

SEQ ID NO: 702560 - DNA, 680 bp, Homo sapiens
tgaatgatataaagatgttagaatactatatcactacgtagtttatttttcagaagttttgtgcatcatttgttagatgtattcctacatatttggtgtttaatgatgctacttgattatacccacctagattccacagattaaaaataaaaagaatactacaaaatgccaacagaataaataaaagggaaactaaagatgaatacatcatagtgaaaccagaaaatactaaatataacagtgatattaacattagccagaaaaaaacggtattattttcaatcagtggcaaaccaaaaactgacacctcatcggaaaccatgaaagccaaattatgtgatgtgatgttttcartgttctcaaggaaaataatatgccctgtcattttcagaccctaaaatttaagatagttttatacaagtagattctcattaatggatattattgacatgtaattcaagaagattatctcaagtctaagtcctgagatgcagaaagaataaagagcaagaaagtggtaagtgtacctaaataaaattaaccaaagctttgtaaacaaaattaataatacagtaaagcaataacaaacttagtgagatttaaaagtaagagttttaaaataaaataataatagcacaaaagtctttatggagtaaatgaagtattctagcatctttata

SEQ ID NO: 702561 - DNA, 769 bp, Homo sapiens
ttctagtctaacatttagtcaaacactcaaacacagaaaaccatgattttattgtccatagcatagctatttctaaatcattggacatttttccccctatgaaagtrtatcttaatttatattaaaaatgctatagacaatgaatggacaataaaactatatgatttcattgattagatccccccaaagccaagactgtataaataatttaaaactttctttctgtaataattataaaaatatttgtgacttctataagaaagtttaaggaagttaaagtttacatgctataattgcagatgcttgcttgttgcataaaagagagtatcttggaaaagttgaatgtgatttccatttccattccaaatctatgcttcccaaactctcatgtaaaataatgcatgtttgccaagagtggcaagagtatcgtttgccatagacggccaagcgagggaagcctgctgagccacttcagagctgtgccagttttcaacataaagttttaaaattagtccattcatgtacatttttattttattgatttctttaattgagaaagccccacaaacatttgggcaaaaccagagctatggtctaatactaatctctattattaaacagttcaaattttggcttttatgatcaatttttagcatcttcaggtttcacctttaatacgtgacacaggaaaccaaaaccaatttatcaatgtttttctccttttaggaaaaagaaaagtgtgggaaagaatgattaaagcaaaatacaa

SEQ ID NO: 702562 - DNA, 1413 bp, Homo sapiens
ttactgggaataagattttaagaatgattttagaaacatgtcctttaaatttgattctctcatacttttaagattatttaaattcacttcaatgtgattgtccaaaacaaagttattttcaaactcactgaatccttatgttcttctttagtgttcactattcacaaagcccattttgaatactgatcctgaaaaacatgagagaatcaaaatctgtgttttcttttgatttttgcatcataattgcatttttactcatttcaacaaggggaaatttcaactttttatattgactaaataaacaaagtgtaggggctaatttatgtttttaaaaaggaaaaatttatagatgctatgtttgattacacttatttcttaactggtatttaggaatttgtgtaataataaacacttctcatttttaacatcaaaatttgcaaggttcatcaaattctgaaggtaatgcctgattggagttaatgttcacttaattctgggtctaatcatttcagctgaaaaagagaaaactaaagcataaatcctttgactcatcctatcttatatttatgtcatattaaaagtcataaaaatggacaaaacaataaaatttaaactgaaacatatccaaaatgtttttggcttatctacctacaaaccagagacatgccaggtatgaaggaacccaaggctggagtaggtcagagggtccaatgagtttatccatcctccagacatggtcactttcagattgtactttaagaaaaaataacttcacggaggaccattataatttttgtgatgaacatgtgtaatatttttgcacccactttttagtttttatcttggctgccttaacatcttctttcaaaatgtcagcagtgattaggctacattatgggataattagtatgaacttttatctcaaagctaattttgactaatactagaacaaaacatatgtcaatatgttaaagatgggaagttgaacagattgctttcctatataaacatgtttttttctaagttcaccttactttttaaatactaatccaatctaaatgtttgaggaaggttaagcaacctgtgaaagaagcaccatttgaaatttgatggtgcagttcctaaaatctttccaaagaatgtggtatagatgcttacatattaaaatattgaccttctaggaagtttaggaaatatttcctctgaacttgaactctggggctgtagctatggttgataagctacacccaattcacactttaatgccrgtgctttgtattttaacattatcttaatgtgacattgtatgccttgtttatttcttctaagcaggccttttcccaaattacttaaaattaccaaacaatgtgtttttaaccacagtcattctagagatttatttggtttttttcc

SEQ ID NO: 702563 - DNA, 799 bp, Homo sapiens
caatttgtcaaatgctttaaaaacatagtcttacagccttttactaagggagcgggaaggggtgaatatccaggttgattataagccatatatttgtcttttcaagatttgcttttacattgctttagggaaaatgataaatatatttgcaaataaaaattgtaatctgtatttctccaattttagtaatcccaaattactaaactaagtaatttaatttaggatttcggattaagagactacgaaactaaatctgattaaattatactttttgaaacctgatagtaccgtacttctgctgcactgcactttcttagatttaatgcctctaaagtataatgatattataagtttcttttctttatttaaaaataaaatgattactctaattatgggaactcatgtaccattgggctgaaagtcagagacagctggatggtgaactggccccttgcmcagacctcagaggaagattaatttgaaaactctttacagaacacagcccagagcctactgctcagaagatcttgctttaatcagccattgatcatcagagattccctttattgacctgaaagcaagtttttttcatcttcatgccagctaaggcacttactgaaagtaagtagacagcatccaaagtgaatatgcctaacgaagaaaacaaagttttccatctctccccgcaaatgacattctgtaatgacatgtgctaatagtttctatctccatccatcccttaacccatcacgttgccatcctgtgaggaacctgtggttaacaaggggccccttctgca

SEQ ID NO: 702564 - DNA, 1424 bp, Homo sapiens
aaagtgaaagtgcttctaattgaggctccctgggttttaattgttcttcaggaaaattagatgttgtcaaagtagaaggttaatgtctgttcacagtctggagtttttggaataacttccttcacagcgtgtgtgttttaaacataaaaagggctttttggtttgtatatagttagtgggattacgactgcctcactagatgcttacaacaaatatttaagaaatccataagtctactatttataacagaataaacatttaaatgtaagatattttgaccattttggtaaaacatttaaaaaataaactatcatgaactgacaaaaccaacatcatttaaaaaaattcaacatggcaaaaactttatgagacttataccatagaccaaatttgtaactttagccttgatacattactgcttgtaaatagaaatgttcttactatgaagtgatgtgctcagatacacccaaaatttattaaaggcatgtcaacagccaaattctgtggtacaaggtttttcatacattattttacataacctttgaggaattccaattttatattcccattttcagaagagttggttagttactgaattcaacaaatgagtgtgagcaggggcctggagtacttaaaaagaataaacaaaatgcctttaaatcagaaagacaaaattgctagtaatttcagttaattgcactttactccatgtagctacaattgtagatatctagaaaaaatatctatgctaaaagtctgccatctggaaaagtcaaaagaatgatgagctggtattaaatcwaagtaaccctggcatatggagtatctctgccatgttaagagcagaccttggtatgagactgactctgggctttacatatgaatttggaattgccaatatctccacttgaactatgtgagacaataaaagtgctcccttatacactttagataatgggccctttgggggatccgatgttcattctgcctttcccagaaaaatacaactataataaaatgttgtaatcagtttcagtttatttattgctgatcttttatttttgttttaatttaacatggcaatccactttctatagtcaaaagtgcaatttaaagaactctaacaactcacaatatagaagaatgtctttggaaattttaggattcaaatctaaaacaaatcttaagatttctttttcctagattgtactgatgttacaagtgccttatgtaatacccagttcttccccatggagatttctcagtgaaagagccacatcacatgttcacaagagcatcaagaataagagggccacgtacctaggaagaaagattggcaagcattctctctcccccatcaaatataaatggatttagcacagggatttggtttaattcactgctgccagcacctagaacaatgc

SEQ ID NO: 702565 - DNA, 1424 bp, Homo sapiens
aaagtgaaagtgcttctaattgaggctccctgggttttaattgttcttcaggaaaattagatgttgtcaaagtagaaggttaatgtctgttcacagtctggagtttttggaataacttccttcacagcgtgtgtgttttaaacataaaaagggctttttggtttgtatatagttagtgggattacgactgcctcactagatgcttacaacaaatatttaagaaatccataagtctactatttataacagaataaacatttaaatgtaagatattttgaccattttggtaaaacatttaaaaaataaactatcatgaactgacaaaaccaacatcatttaaaaaaattcaacatggcaaaaactttatgagacttataccatagaccaaatttgtaactttagccttgatacattactgcttgtaaatagaaatgttcttactatgaagtgatgtgctcagatacacccaaaatttattaaaggcatgtcaacagccaaattctgtggtacaaggtttttcatacattattttacataacctttgaggaattccaattttatattcccattttcagaagagttggttagttactgaattcaacaaatgagtgtgagcaggggcctggagtacttaaaaagaataaacaaaatgcctttaaatcagaaagacaaaattgctagtaatttcagttaattgcactttactccatgtagctacaattgtagatatctagaaaaaatatctatgctaaaagtctgccatctggaaaagtcaaaagaatgatgagctggtattaaatcamagtaaccctggcatatggagtatctctgccatgttaagagcagaccttggtatgagactgactctgggctttacatatgaatttggaattgccaatatctccacttgaactatgtgagacaataaaagtgctcccttatacactttagataatgggccctttgggggatccgatgttcattctgcctttcccagaaaaatacaactataataaaatgttgtaatcagtttcagtttatttattgctgatcttttatttttgttttaatttaacatggcaatccactttctatagtcaaaagtgcaatttaaagaactctaacaactcacaatatagaagaatgtctttggaaattttaggattcaaatctaaaacaaatcttaagatttctttttcctagattgtactgatgttacaagtgccttatgtaatacccagttcttccccatggagatttctcagtgaaagagccacatcacatgttcacaagagcatcaagaataagagggccacgtacctaggaagaaagattggcaagcattctctctcccccatcaaatataaatggatttagcacagggatttggtttaattcactgctgccagcacctagaacaatgc

SEQ ID NO: 702566 - DNA, 1416 bp, Homo sapiens
tcttacttgggatattatattcaaagaaatataaagtggccgagcacggtggctcacgcctgtaatcccagcactctgggaggctgaggtgggccaatcatgaggtcaggagttcgagaccatcctgaccaacatggtgaaactccatctctactaaaaacacaaaaattatccgggcgtggtgacacatgcctgtaatcccagctactcaggaggctgaggcaggagaatcacttgaaccgggaggcagaggttgcagtgagcttcgactgtgccactgcaccccagcctgggcgacagagcgagactgcatctcaaaaaaagaaaaaaaaaagaaagaagaaatataaagtgataccttgttaagtaatatttccattatagtttctgtctgcaactacatgaagccctctgtgcccttgcagtaatggcatctaaatccagcaaacagagtcgcatcttctattaccaccatttccccgatggattcttccagggaatggaggcacaagtcagcttcatgcctggctgcatatggaagaaagcaattttcataaatcctcagctccatacaatgggaaaagctcatttagtttctgaggtaaattaatattttttgtctcacacttttttctattttcttttgtttttataattatcatacagtaaaattgacctttttgtggtgcacatttctataaattctaagacatatatataacgatcaccacaataagatacatttctatcaccctaaaaaaattcccacatgctgcctctttatcaaagcctcccttatgccaccaagcactggcaatcaccgatctattttctatccctatagttttatcttttgagaatgtcatataatggaatcaatacagtatgaactttttgaatgactttgttcactcaccataacgccactgagatttatccaagttgttgcatgagtcgatagtttcaagaaaatgtctactattttcctgccaagggrcaggtttccttgggcacatcctagactcaaagaaatcattaaaaaattcaatatcttattatctttatgtcaactagattaccagacagaattttctttgttaaaggaatttctattctttgtttcttaaagtaactaattttggctaaaaaaaaaaaaaaaaaaatctgctcctggatttcacaggatgaaatctggcttaaatgcactaaatcaccttgtgactccttagttctcatgacttctaagagcaaaagacattttccctactgcatgcagccaactctacaaatattaaaatctagaacctaatgtagtggaataaattcatatgaaagctacagaatgcactgaactttcagctaatgcagagttcaaataagaattccctctttaatgtcataatacaaaacgttcac

SEQ ID NO: 702567 - DNA, 1416 bp, Homo sapiens
tcttacttgggatattatattcaaagaaatataaagtggccgagcacggtggctcacgcctgtaatcccagcactctgggaggctgaggtgggccaatcatgaggtcaggagttcgagaccatcctgaccaacatggtgaaactccatctctactaaaaacacaaaaattatccgggcgtggtgacacatgcctgtaatcccagctactcaggaggctgaggcaggagaatcacttgaaccgggaggcagaggttgcagtgagcttcgactgtgccactgcaccccagcctgggcgacagagcgagactgcatctcaaaaaaagaaaaaaaaaagaaagaagaaatataaagtgataccttgttaagtaatatttccattatagtttctgtctgcaactacatgaagccctctgtgcccttgcagtaatggcatctaaatccagcaaacagagtcgcatcttctattaccaccatttccccgatggattcttccagggaatggaggcacaagtcagcttcatgcctggctgcatatggaagaaagcaattttcataaatcctcagctccatacaatgggaaaagctcatttagtttctgaggtaaattaatattttttgtctcacacttttttctattttcttttgtttttataattatcatacagtaaaattgacctttttgtggtgcacatttctataaattctaagacatatatataacgatcaccacaataagatacatttctatcaccctaaaaaaattcccacatgctgcctctttatcaaagcctcccttatgccaccaagcactggcaatcaccgatctattttctatccctatagttttatcttttgagaatgtcatataatggaatcaatacagtatgaactttttgaatgactttgttcactcaccataacgccactgagatttatccaagttgttgcatgagtcgatagtttcaagaaaatgtctactattttcctgccaagggacaggtttccttgggcacatcctagactcaaagaaatcattaaaaaattcartatcttattatctttatgtcaactagattaccagacagaattttctttgttaaaggaatttctattctttgtttcttaaagtaactaattttggctaaaaaaaaaaaaaaaaaaatctgctcctggatttcacaggatgaaatctggcttaaatgcactaaatcaccttgtgactccttagttctcatgacttctaagagcaaaagacattttccctactgcatgcagccaactctacaaatattaaaatctagaacctaatgtagtggaataaattcatatgaaagctacagaatgcactgaactttcagctaatgcagagttcaaataagaattccctctttaatgtcataatacaaaacgttcac

SEQ ID NO: 702568 - DNA, 663 bp, Homo sapiens
tgaccaaacatgattcataaactataactagtatggccgccattaatctaaaaattaatttttagattaatgtttattgacagtatctactctataaaatacaaaaataaaatatgcttttatgatgtggaccatagtatccataagattgcttttctgtttgaattggctataaaaatggaaaaagtatcattttgtaactgtgtggcatttgctcatttattcaacaataataccagagcggaaagcaacaagttaggtgtgacataatatagaaatggttttgttttgtttgtttgttctacatatattattagtaaggtttctctagagtactgtctctctctatctctttctatctctgtctacacatagacacacacacacacacacacacacacacacacagatgttcctcaacttacaatggggttatgtcacaataaacccatcataagtttgttacaggaaagaggtccagatccagaccccaagagagggttcytggatcttgtgcaagaaagaattcagggtgagttcacagtgcaaaatgaaagtaagtttattaagaaagtaaaggaataaaagaatggttattccatagaaagagcagccccaagggctgctgattgcggttttgttttttttttttttgagatggag

SEQ ID NO: 702569 - DNA, 663 bp, Homo sapiens
tgaccaaacatgattcataaactataactagtatggccgccattaatctaaaaattaatttttagattaatgtttattgacagtatctactctataaaatacaaaaataaaatatgcttttatgatgtggaccatagtatccataagattgcttttctgtttgaattggctataaaaatggaaaaagtatcattttgtaactgtgtggcatttgctcatttattcaacaataataccagagcggaaagcaacaagttaggtgtgacataatatagaaatggttttgttttgtttgtttgttctacatatattattagtaaggtttctctagagtactgtctctctctatctctttctatctctgtctacacatagacacacacacacacacacacacacacacacacagatgttcctcaacttacaatggggttatgtcacaataaacccatcataagtttgttacaggaaagaggtccagatccagaccccaagagagggttcctggatcttgtgcaagaaagaattcagggygagttcacagtgcaaaatgaaagtaagtttattaagaaagtaaaggaataaaagaatggttattccatagaaagagcagccccaagggctgctgattgcggttttgttttttttttttttgagatggag

SEQ ID NO: 702570 - DNA, 663 bp, Homo sapiens
tgaccaaacatgattcataaactataactagtatggccgccattaatctaaaaattaatttttagattaatgtttattgacagtatctactctataaaatacaaaaataaaatatgcttttatgatgtggaccatagtatccataagattgcttttctgtttgaattggctataaaaatggaaaaagtatcattttgtaactgtgtggcatttgctcatttattcaacaataataccagagcggaaagcaacaagttaggtgtgacataatatagaaatggttttgttttgtttgtttgttctacatatattattagtaaggtttctctagagtactgtctctctctatctctttctatctctgtctacacatagacacacacacacacacacacacacacacacacagatgttcctcaacttacaatggggttatgtcacaataaacccatcataagtttgttacaggaaagaggtccagatccagaccccaagagagggttcctggatcttgtgcaagaaagaattcagggtgagttcacagtgcaaaatgaaagtaagtttrttaagaaagtaaaggaataaaagaatggttattccatagaaagagcagccccaagggctgctgattgcggttttgttttttttttttttgagatggag

SEQ ID NO: 702571 - DNA, 517 bp, Homo sapiens
tatatatttacattcacattgatttgtattagctatcaarttaatcatgttaaaaaaaagtggtaccataatgaattgtgtttgatgttgaaactaatatttaaagatttaaaaattatgagagagtattctgtgttatctcagaatactggtaacgtcttaaagatttctggctacaaaagtagttttacaagacattagttttatgggcactgcatgcattgcattgatcaaagcagcattgcattggtatttaacactaggccatgactgaaagggcttcagaagacatcatgatgaactacatacagagtaatggcaagtttactataaaattaacattctcagttgtcacaagaaatctgacaatcactaaaatggcaagcactgtgttctatttgtgtccttttcagacatgattgataagaatttgttaccttattagcatgtcataagtagacagcaaagtatgttttaaattcgaaaattattattttctgctcacgttctactttca

SEQ ID NO: 702572 - DNA, 517 bp, Homo sapiens
tatatatttacattcacattgatttgtattagctatcaaattaatcatgttaaaaaaaagtggtaccataatgaattgtgtttgatgttgaaaytaatatttaaagatttaaaaattatgagagagtattctgtgttatctcagaatactggtaacgtcttaaagatttctggctacaaaagtagttttacaagacattagttttatgggcactgcatgcattgcattgatcaaagcagcattgcattggtatttaacactaggccatgactgaaagggcttcagaagacatcatgatgaactacatacagagtaatggcaagtttactataaaattaacattctcagttgtcacaagaaatctgacaatcactaaaatggcaagcactgtgttctatttgtgtccttttcagacatgattgataagaatttgttaccttattagcatgtcataagtagacagcaaagtatgttttaaattcgaaaattattattttctgctcacgttctactttca

SEQ ID NO: 702573 - DNA, 603 bp, Homo sapiens
ttaacaagctggcaaaggtttactcctggtcacaaagggaactcagtgagaaaatgctagttatatgtacactccacgttgttattgggaaaatagctcaatggacacatcctgctgatactgagtcaacaagataattttcatatcagaaaagcaatagtgtacctaaccctgtgtgagtgggcattatgttaggtgataattcctgctgctctaacaaaataccttagactggataatttatagacaacagacatttatttctcacagttctggaggctgaaaagaccaagatcagggtgctggcaggttcagtgtctagtagaggccttctctctgcttccaagatggggcctcattgctctgtcttccagaggggacaartgctgtgtcctcgcatggtagaagagcaaaaaaggccttgctgtctccctacagcccttttataaggttgctaatcccatttatgagggtctgccctcatgatttaatcacttcctaaaggccccacctcttaatactgttgcattgaggattaaatttcaacatgaattctagagtgaacacaaacattcaaaccatagcaataagattatttaataa

SEQ ID NO: 702574 - DNA, 603 bp, Homo sapiens
ttaacaagctggcaaaggtttactcctggtcacaaagggaactcagtgagaaaatgctagttatatgtacactccacgttgttattgggaaaatagctcaatggacacatcctgctgatactgagtcaacaagataattttcatatcagaaaagcaatagtgtacctaaccctgtgtgagtgggcattatgttaggtgataattcctgctgctctaacaaaataccttagactggataatttatagacaacagacatttatttctcacagttctggaggctgaaaagaccaagatcagggtgctggcaggttcagtgtctagtagaggccttctctctgcttccaagatggggcctcattgctctgtcttccagaggggacaaatgctgtgtcctcgcatggtagaagagcaraaaaggccttgctgtctccctacagcccttttataaggttgctaatcccatttatgagggtctgccctcatgatttaatcacttcctaaaggccccacctcttaatactgttgcattgaggattaaatttcaacatgaattctagagtgaacacaaacattcaaaccatagcaataagattatttaataa

SEQ ID NO: 702575 - DNA, 1407 bp, Homo sapiens
tgccatcttccagggtacttcatgggaactgggactggaatacaaaccaatcccacagaaagggcccctctgtactctccctgccatctcaaccttagggctctacctcaccttctctactcaaagcctgccttcctgctcaggggtaatactacataatcccctcatcctacttccactcctaccacccaaaactcatgaaccagagacrcttctcacggctcaaacctaagggaacacaacaccaaccttttctttctggatttcagtgaggaaacgagatcttaattccttcctggtgaggattcagcagcagcaacaacaaaagaaaaaacaagaaagtaataataatgatgctttcacatatataaaaacagaacctagcaatacacattgataacataaaactagtcattttacttaagattatattttaataaagagccactagaatcaggatcttctcagcatcattcattaactactcaggaatggtctgcttcattcatctcacaggcagtcccacatttattattcagcaaatgtttgtcacatgctttctacatgccagccatagcactggaagctggggatataaaaatgtccatgcttgagcatttcctctgtccaggtgtgccttcacaattattaactcatgttagttctcaatgaagtgcaacaatattatcttcattttatacatgaggaaaacatcagagaaatcaagtaaactgctcagtcatagagctggtaattggtagagaagggattctaactcagttggtctggcttgagagccatactctttatcagtactctagtgagatatattaggtatttctgtatagcacccatattagcataatgattgccagaacaccccatccacatccccctactgaaccctggggtttcccattccagcatccctttccctaagacccacctaactcagatgcatcccgccatccaggatcctccaaccaaaaccctgatctgcacttccccagggtagatatagacctttaacaccctaaacactaaaaagattttggtgggcattcccagccaatatgtactgaaaaacacaatttaatattttgaaatgatacaagcttaactacacagtaagaaaaaccatttcattcaggccagccgtggtggctcatgcctgtgatcctagcactttgggaggtcaagactgggggatcacttgagcctaggaattcgaggccagcctgggcaacctcgtctctacaaaaaatacaaaaattagctgagcgtgatggtacacacctgtagtccaagctactcgggaggctgaggcaagaggatcacttgagcctgggaggtcaaggctgtggtgagccgtgattggacccctgcactccagtctgggtaacaaag

SEQ ID NO: 702576 - DNA, 1407 bp, Homo sapiens
tgccatcttccagggtacttcatgggaactgggactggaatacaaaccaatcccacagaaagggcccctctgtactctccctgccatctcaaccttagggctctacctcaccttctctactcaaagcctgccttcctgctcaggggtaatactacataatcccctcatcctacttccactcctaccacccaaaactcatgaaccagagacgcttctcacggctcaaacctaagggaacacaacaccaaccttttctttctggatttcagtgaggaaacgagatcttaattccttcctggtgaggattcagcagcagcaacaacaaaagaaaaaacaagaaagtaataataatgatgctttcacatatataaaaacagaacctagcaatacacattgataacataaaactagtcattttacttaagattatattttaataaagagccactagaatcaggatcttctcagcatcattcattaactactcaggaatggtctgcttcattcatctcacaggcagtcccacatttattattcagcaaatgtttgtcacatgctttctacatgccagccatagcactggaagctggggatataaaaatgtccatgcttgagcatttcctctgtccaggtgtgccttcacaattattaactcatgttagttctcaatgaagtgcaacaatattatcttcattttatacatgaggaaaacatcagagaaatcaagtaaactgctcagtcatagagctggtaattggtagagaagggattctaactcagttggtctggcttgagagccatactctttatcagtactctagtgagatatattaggtatttctgtatagcacccatattagcataatgattgccagaacaccccatccacatccccctactgaaccctggggtttcccattccagcatccctttccctaagacccacctaactcagatgcatcccgccatccaggatcctccaaccaaaaccctgatctgcacttccccagggtagatatagacctttaacaccctaaacactaaaaagattttggtgggcattcccagccaatatgtactgaaaaacacaatttaatattttgaaatgatacaagcttaactacacagtaagaaaaaccatttcattcaggccagccgtggtggctcatgcctgtgatcctagcactttgggaggtcaagactgggggatcacttgagcctaggaattcgaggccagcctgggcaacctcgtctctacaaaaaatacaaaaattagctgagcgtgatggtacacacctgtagtccaagctactcgggaggctgaggcaagaggatcacttgagcctgggaggtcaaggctgtggtgagccrtgattggacccctgcactccagtctgggtaacaaag

SEQ ID NO: 702577 - DNA, 1407 bp, Homo sapiens
tgccatcttccagggtacttcatgggaactgggactggaatacaaaccaatcccacagaaagggcccctctgtactctccctgccatctcaaccttagggctctacctcaccttctctactcaaagcctgccttcctgctcaggggtaatactacataatcccctcatcctacttccactcctaccacccaaaactcatgaaccagagacgcttctcacggctcaaacctaagggaacacaacaccaaccttttctttctggatttcagtgaggaaacgagatcttaattccttcctggtgaggattcagcagcagcaacaacaaaagaaaaaacaagaaagtaataataatgatgctttcacatatataaaaacagaacctagcaatacacattgataacataaaactagtcattttacttaagattatattttaataaagagccactagaatcaggatcttctcagcatcattcattaactactcaggaatggtctgcttcattcatctcacaggcagtcccacatttattattcagcaaatgtttgtcacatgctttctacatgccagccatagcactggaagctggggatataaaaatgtccatgcttgagcatttcctctgtccaggtgtgccttcacaattattaactcatgttagttctcaatgaagtgcaacaatattatcttcattttatacatgaggaaaacatcagagaaatcaagtaaactgctcagtcatagagctggtaattggtagagaagggattctaactcagttggtctggcttgagagccatactctttatcagtactctagtgagatatattaggtatttctgtatagcacccatattagcataatgattgccagaacaccccatccacatccccctactgaaccctggggtttcccattccagcatccctttccctaagacccacctaactcagatgcatcccgccatccaggatcctccaaccaaaaccctgatctgcacttccccagggtagatatagacctttaacaccctaaacactaaaaagattttggtgggcattcccagccaatatgtactgaaaaacacaatttaatattttgaaatgatacaagcttaactacacagtaagaaaaaccatttcattcaggccagccgtggtggctcatgcctgtgatcctagcactttgggaggtcaagactgggggatcacttgagcctaggaattcgaggccagcctgggcaacctcgtctctacaaaaaatacaaaaattagctgagcgtgatggtacacacctgtagtccaagctactcgggaggctgaggcaagaggatcacttgagcctgggaggtcaaggctgtggtgagccgtgattggacccctgcactccagtctgggtracaaag

SEQ ID NO: 702578 - DNA, 1955 bp, Homo sapiens
gtaaacactaagcctctaatatgaacatttcctgggaagccagatattcaccaggtgaaagttgattactttaggctccttttatcaaaaatgttgtacacataggaatagattcatattccaaacacagatttgcctttgtgtctgcaaactctcttattgttgctactcagggaccaacaaaattccttactcatcatctctgtatcctgaaaacacacamacacacacacacacacacacacacacacacacgcaaaaatgaaaaggaagaaagaaatcaaattttccgaaacatttctgaaaaatgtttccttcacatattacaatgaaggaaatgtaccaatggcttccctcaaggtgttctctggtcttatattcctcagagagcagctgctttgccaaagtggtaaactggctgccaaaggctaaataatgatattaggtaggtggtgatactgtttgtgatgctgttatacatgatgtagaatatgccttaaatcaataagtagtgccatcccctctgcagatataatatatgaacggatctgggaaacaagaagtagatgtgggaatagcccctcttacattacactagtagtaaagtagatgtggcatcagtgtgttaggaaagtgagtatccaaagaattaatgcttccatcagggagcataatcatgattctattgaaatagaaattaagacttatctcgagctaacatgaacttttcattttgatgtaccaacaggcagagaaaagggtcaatgctatgggttgaataattaattcaattgccaaggaaacttttttcttccaactagtgggggcaaaaagacccctcaaaacccaggcaactcactgtggaacatgttggctcagccattctattattagttgccaataggaaatgaaggcaacgtaagacaggaccagtaggtactcggttcctttagggatgaagattcatgtaaactaatccccaccctaccaccgcccaggagacacccccccaaccccgcccaggaaaaaaacaaaactcaccaaatgatgttggcagagaatttttttttaatatgaaactggtgaacaaagaaggaaggtaaatatttcaatgagctttgtaacgtaagccttatagtcagccacacatgtaggcactgtaatcggctatgttttctcttaattattatttttctcctttccatccactcctgatatttgatacttttatgtgaagggcactgatgcccaataatgttccaactaaggttcttggtgggattctagctacattgacatctcctcaaggtgatgaagagattaatacgtctttatgtttcccctgtttagggggatttttctgttgtgtttcagatttatctatctaaataaagaacaggaatgaatttaattggggaaaaggtggattgtactgattacccatcatttacttttacccttctgaattcatcctgtgccctgatctttgtcccagaaccacatcacttggcatctcttgccctctggcatcctattggtttcaactaataaaaaatactcacagagatcagggttaagaggacaaagttatcaggtacggattttcaccacacctcagcttccaagccatgattttaacagtagctgtgttcctcgctgggtgtccacagctactattgggcagcccatctcccacagctacagctatcactgggttctgatacaccacaaagctttggcacagtaatgtctttccactgttgtggacccccaaatgtttaaccgtcctttcttgctttttttctttttttgactgtttgtatctttgtaatcagtcccttcttctgactcttggagtgtgcctcctgttttctgctaatatcctgattgactaaattttttgataaatgtcttttgtgattccttaatgtagataaaaacttacttgtgcggca

SEQ ID NO: 702579 - DNA, 1955 bp, Homo sapiens
gtaaacactaagcctctaatatgaacatttcctgggaagccagatattcaccaggtgaaagttgattactttaggctccttttatcaaaaatgttgtacacataggaatagattcatattccaaacacagatttgcctttgtgtctgcaaactctcttattgttgctactcagggaccaacaaaattccttactcatcatctctgtatcctgaaaacacacacmcacacacacacacacacacacacacacacacgcaaaaatgaaaaggaagaaagaaatcaaattttccgaaacatttctgaaaaatgtttccttcacatattacaatgaaggaaatgtaccaatggcttccctcaaggtgttctctggtcttatattcctcagagagcagctgctttgccaaagtggtaaactggctgccaaaggctaaataatgatattaggtaggtggtgatactgtttgtgatgctgttatacatgatgtagaatatgccttaaatcaataagtagtgccatcccctctgcagatataatatatgaacggatctgggaaacaagaagtagatgtgggaatagcccctcttacattacactagtagtaaagtagatgtggcatcagtgtgttaggaaagtgagtatccaaagaattaatgcttccatcagggagcataatcatgattctattgaaatagaaattaagacttatctcgagctaacatgaacttttcattttgatgtaccaacaggcagagaaaagggtcaatgctatgggttgaataattaattcaattgccaaggaaacttttttcttccaactagtgggggcaaaaagacccctcaaaacccaggcaactcactgtggaacatgttggctcagccattctattattagttgccaataggaaatgaaggcaacgtaagacaggaccagtaggtactcggttcctttagggatgaagattcatgtaaactaatccccaccctaccaccgcccaggagacacccccccaaccccgcccaggaaaaaaacaaaactcaccaaatgatgttggcagagaatttttttttaatatgaaactggtgaacaaagaaggaaggtaaatatttcaatgagctttgtaacgtaagccttatagtcagccacacatgtaggcactgtaatcggctatgttttctcttaattattatttttctcctttccatccactcctgatatttgatacttttatgtgaagggcactgatgcccaataatgttccaactaaggttcttggtgggattctagctacattgacatctcctcaaggtgatgaagagattaatacgtctttatgtttcccctgtttagggggatttttctgttgtgtttcagatttatctatctaaataaagaacaggaatgaatttaattggggaaaaggtggattgtactgattacccatcatttacttttacccttctgaattcatcctgtgccctgatctttgtcccagaaccacatcacttggcatctcttgccctctggcatcctattggtttcaactaataaaaaatactcacagagatcagggttaagaggacaaagttatcaggtacggattttcaccacacctcagcttccaagccatgattttaacagtagctgtgttcctcgctgggtgtccacagctactattgggcagcccatctcccacagctacagctatcactgggttctgatacaccacaaagctttggcacagtaatgtctttccactgttgtggacccccaaatgtttaaccgtcctttcttgctttttttctttttttgactgtttgtatctttgtaatcagtcccttcttctgactcttggagtgtgcctcctgttttctgctaatatcctgattgactaaattttttgataaatgtcttttgtgattccttaatgtagataaaaacttacttgtgcggca

SEQ ID NO: 702580 - DNA, 1955 bp, Homo sapiens
gtaaacactaagcctctaatatgaacatttcctgggaagccagatattcaccaggtgaaagttgattactttaggctccttttatcaaaaatgttgtacacataggaatagattcatattccaaacacagatttgcctttgtgtctgcaaactctcttattgttgctactcagggaccaacaaaattccttactcatcatctctgtatcctgaaaacacacacacacacacacacacacacacacacacacacacgcaaaaatgaaaaggaagaaagaaatcaaattttccraaacatttctgaaaaatgtttccttcacatattacaatgaaggaaatgtaccaatggcttccctcaaggtgttctctggtcttatattcctcagagagcagctgctttgccaaagtggtaaactggctgccaaaggctaaataatgatattaggtaggtggtgatactgtttgtgatgctgttatacatgatgtagaatatgccttaaatcaataagtagtgccatcccctctgcagatataatatatgaacggatctgggaaacaagaagtagatgtgggaatagcccctcttacattacactagtagtaaagtagatgtggcatcagtgtgttaggaaagtgagtatccaaagaattaatgcttccatcagggagcataatcatgattctattgaaatagaaattaagacttatctcgagctaacatgaacttttcattttgatgtaccaacaggcagagaaaagggtcaatgctatgggttgaataattaattcaattgccaaggaaacttttttcttccaactagtgggggcaaaaagacccctcaaaacccaggcaactcactgtggaacatgttggctcagccattctattattagttgccaataggaaatgaaggcaacgtaagacaggaccagtaggtactcggttcctttagggatgaagattcatgtaaactaatccccaccctaccaccgcccaggagacacccccccaaccccgcccaggaaaaaaacaaaactcaccaaatgatgttggcagagaatttttttttaatatgaaactggtgaacaaagaaggaaggtaaatatttcaatgagctttgtaacgtaagccttatagtcagccacacatgtaggcactgtaatcggctatgttttctcttaattattatttttctcctttccatccactcctgatatttgatacttttatgtgaagggcactgatgcccaataatgttccaactaaggttcttggtgggattctagctacattgacatctcctcaaggtgatgaagagattaatacgtctttatgtttcccctgtttagggggatttttctgttgtgtttcagatttatctatctaaataaagaacaggaatgaatttaattggggaaaaggtggattgtactgattacccatcatttacttttacccttctgaattcatcctgtgccctgatctttgtcccagaaccacatcacttggcatctcttgccctctggcatcctattggtttcaactaataaaaaatactcacagagatcagggttaagaggacaaagttatcaggtacggattttcaccacacctcagcttccaagccatgattttaacagtagctgtgttcctcgctgggtgtccacagctactattgggcagcccatctcccacagctacagctatcactgggttctgatacaccacaaagctttggcacagtaatgtctttccactgttgtggacccccaaatgtttaaccgtcctttcttgctttttttctttttttgactgtttgtatctttgtaatcagtcccttcttctgactcttggagtgtgcctcctgttttctgctaatatcctgattgactaaattttttgataaatgtcttttgtgattccttaatgtagataaaaacttacttgtgcggca

SEQ ID NO: 702581 - DNA, 561 bp, Homo sapiens
cagaacatttatttaaaaagaagcacacactgaaccataaataaaatctcaacaaatttcaaatgatggaaaatctacagatattttctgataaggaagccattaatctggagaaaaataaaaacatcaaaaatatctagaaaaatatggaaattaataaacacgcatttcatttacccataagtcaaaaagaaatctaaaaataagtagaaaatatacagatgtctataagaataattagttcaaaattactgtaggaaaatatatacagtacatctctctaataaaaaaatttacaataaaaatcccctccaagagatgggccagccgagatagtcaaataaaaataacaaaagatatccagattgaaaaagaagaagtaaaactatctctacttatacatgacctaagttttgtatacagataattcaaaagaacaccccggaaaactattagaactaatgmgttcagcaagattgaaggataaaaatcaatattaaaaattaattttatttttatatgttaagaatgaacattcagtgaatgaaattaagaaaacaa

SEQ ID NO: 702582 - DNA, 561 bp, Homo sapiens
cagaacatttatttaaaaagaagcacacactgaaccataaataaaatctcaacaaatttcaaatgatggaaaatctacagatattttctgataaggaagccattaatctggagaaaaataaaaacatcaaaaatatctagaaaaatatggaaattaataaacacgcatttcatttacccataagtcaaaaagaaatctaaaaataagtagaaaatatacagatgtctataagaataattagttcaaaattactgtaggaaaatatatacagtacatctctctaataaaaaaatttacaataaaaatcccctccaagagatgggccagccgagatagtcaaataaaaataacaaaagatatccagattgaaaaagaagaagtaaaactatctctacttatacatgacctaagttttgtatacagataattcaaaagaacaccccggaaaactattagaactaatgagttcagcaagwttgaaggataaaaatcaatattaaaaattaattttatttttatatgttaagaatgaacattcagtgaatgaaattaagaaaacaa

SEQ ID NO: 702583 - DNA, 874 bp, Homo sapiens
ggactaatacccctactatgtgccactcactgtgccagtcctggggaagatttaggctggaaaagcatggcctttgcagcrtttttcccccaccagtgctgagacaatatgttgaaaagactgggaaaatgttataatgtattcaaaataccagatgagagctttctgtgtacctgtcactatgctcagctccagagatgggatatgaacaaaataggcccaattctcttccctctgtgccgaacttactttctgttaagtacaaaatagggcttaatgctatgaaaatgaagaggagtgacaacattgatgtcaaccaggaggatcagggcagattttaaatatgatgtggctgcagcaagagtgtgtgcgcatgggaacaggcattccaaacgaaggaatcactgctaatacagctgcaaagtctgcagtgcctttgggaagccttgacaagatgaacgtgtcagagagcaggcattcagtctttaacacagcctttccacatcggcctataaaattgtattatgatgtttcttcatttggaaaactagttttaaaggttgcattttgatgagtttgcaacattcaatttcatggaatccaaatcgcatgccctttggaagaggtgccatatgtgaatgcacccataaagtgcacgcatgcagcgtttgttacgtggtaggatctcatgcaattttaaatgactctcatgttaaaaaatgcttctattggcagggggtggtggcttacacctgtaatccaagcactttgggaggccaaggcaggtggatcacctgaggtcaggagtttgagaccagcctggccaacatggtgaaaccccgtctctaccaaaaatacaaaaattagctgggca

SEQ ID NO: 702584 - DNA, 1748 bp, Homo sapiens
caaaaacaacaaaaaactacaaagttctggatggtgtatccacatcgctcagggagggacaggactttgtcttctctctgatgcactctgggccccaaaagcagcagagagggtgacgctgggtctgaggcccaggtccagatcccaccctccctgcagctcatgaaaacagggagtcagccatcacaccctccagccctgtgtgtgcctcgttcctatggacatcctagaagctcagccctgtgacattgaagaaagtcctcagactgcacagtgggttggtgctcagcaccctttatttatcactggagataggcaattacatttctgcttgtgggaaaaaacgaatgacagcaggactgggggcctacaaatgcttgaggaagtaaaccctctctgtccacaaaggcttcactgtacttttctagcctttctattcaattcttcaccttaggaatttgaaaatgtaatagtctatctcatggtaatttctgaaacagttgtcttcatcttttagagataaatatgcaggatcatgatcaaaacatctcctgaggcctccttggtgccatgcattatactgatgacatggaataatccatttaatcctcaccacagccctgtgcgggaggtcctgttttgattctgatttacaggtgagaacactgaggcactgaaagacagacacagagggagccgggctagtacgcagcagagctggacttaaacgcagactgcctggctcctggttccctgcttgcaactgttagcagccatctgctcatgtggctatcaaaaatgagttctcaaacaatatttggcatccaatttccaatccccattttataattttgcatgaaaaaaatttatgttactatgatgaattactgagatgaagttctgatgcactttgttcatgtttaattgctttggaaactgactttttaagcacctggaaggaatcagtgtcaagttagttttgaaatgaacagatactgcctcttctgatgaatcaggaataatcaccaggtaggagtgtaatctcactgcaacttgtttgagtggttcacggactttacatcctaatttggatcctaatttgcatcctacctttaaagttctggaatgtcaatggacagctgcatgaataattttgtttacaaattaagatgcaaatattggaagagagaataaagctattctggagtatatgtcaggagtgggcactgttttctcaactgtaaattttcaccactttctttttaatttgctgttcgatttgttttacagttttcttgtctttcttcatagacttgatgggttaaaataataaaataataaaaaacattagcatctgagaaactagaattttaattgtgtgattctttaggatggtgtctcaaacagcttttcttacagttttaagtttggtctacataatagaagyattttaaaacatcaagcaagtcatagttgttttggcttactgcttattcaattaaaaagaaatagaaagactaacagtgcttattggtttccaaaccaccaacccccatttaaaaaaatatcaatcttcatatttccctgagtcaattttttcttttaaccattagtatgagctaatccttattcagcataaaactaggcattatgttaagaacttgcatttcatagtcacccacaaaatggcctaaaattagtatttattccattttgtaaatgagcaacctgaggtgtaaaaagatgca

SEQ ID NO: 702585 - DNA, 1748 bp, Homo sapiens
caaaaacaacaaaaaactacaaagttctggatggtgtatccacatcgctcagggagggacaggactttgtcttctctctgatgcactctgggccccaaaagcagcagagagggtgacgctgggtctgaggcccaggtccagatcccaccctccctgcagctcatgaaaacagggagtcagccatcacaccctccagccctgtgtgtgcctcgttcctatggacatcctagaagctcagccctgtgacattgaagaaagtcctcagactgcacagtgggttggtgctcagcaccctttatttatcactggagataggcaattacatttctgcttgtgggaaaaaacgaatgacagcaggactgggggcctacaaatgcttgaggaagtaaaccctctctgtccacaaaggcttcactgtacttttctagcctttctattcaattcttcaccttaggaatttgaaaatgtaatagtctatctcatggtaatttctgaaacagttgtcttcatcttttagagataaatatgcaggatcatgatcaaaacatctcctgaggcctccttggtgccatgcattatactgatgacatggaataatccatttaatcctcaccacagccctgtgcgggaggtcctgttttgattctgatttacaggtgagaacactgaggcactgaaagacagacacagagggagccgggctagtacgcagcagagctggacttaaacgcagactgcctggctcctggttccctgcttgcaactgttagcagccatctgctcatgtggctatcaaaaatgagttctcaaacaatatttggcatccaatttccaatccccattttataattttgcatgaaaaaaatttatgttactatgatgaattactgagatgaagttctgatgcactttgttcatgtttaattgctttggaaactgactttttaagcacctggaaggaatcagtgtcaagttagttttgaaatgaacagatactgcctcttctgatgaatcaggaataatcaccaggtaggagtgtaatctcactgcaacttgtttgagtggttcacggactttacatcctaatttggatcctaatttgcatcctacctttaaagttctggaatgtcaatggacagctgcatgaataattttgtttacaaattaagatgcaaatattggaagagagaataaagctattctggagtatatgtcaggagtgggcactgttttctcaactgtaaattttcaccactttctttttaatttgctgttcgatttgttttacagttttcttgtctttcttcatagacttgatgggttaaaataataaaataataaaaaacattagcatctgagaaactagaattttaattgtgtgattctttaggatggtgtctcaaacagcttttcttacagttttaagtttggtctacataatagaagtattttaaaacatcaagcaagtcatagttgttttggcttactgcttattcaattaaaaagaaatagaaagactaacagtgcttattggtttccaaaccaycaacccccatttaaaaaaatatcaatcttcatatttccctgagtcaattttttcttttaaccattagtatgagctaatccttattcagcataaaactaggcattatgttaagaacttgcatttcatagtcacccacaaaatggcctaaaattagtatttattccattttgtaaatgagcaacctgaggtgtaaaaagatgca

SEQ ID NO: 702586 - DNA, 600 bp, Homo sapiens
tttagtcagaagtttcagataccaggataaaatcacttttgtcagacctggataaaataaagtcaggatagtatgaaggagagatggctcatgctcacatatgggagataaaaactgctttcagggactttctaaaaaccccacaagaaacctttttgcatccttcatgcatctcctgttttgacaaggtttatcactagatattctttagtactgcagtaattcagataagatatctcagaacactcgcccagtaatgacatctccaccagtgaactgacaacagctctctggaaccaatgaattctatttctaagctacttctataaaactctctgtttttgctaatgaaagcttycctttgcccttccctcacagatacattagtggtttaccatgccatgcattccagttataataattgattcttacccctgagtaaactcaatataccatagaaataaattttctctagtgtctttttttaggttgacaacagagatgtatagtaagatatttatgagaaattggctcacgtgcttatggagtttgagaagtctcaccatctgctttctgtaagctgcaggcccaggaaaactg

SEQ ID NO: 702587 - DNA, 1206 bp, Homo sapiens
gaaagagatttgtatttaaattggcagaccgagtaaagcagatggcctccccaatagtgagcggacatcttcaaacccattcagggctgaaagtgaacaaaaaggtcgaggaagcctgaattctctcgctgcctgattgcttaagctcagacattgtccttccactgccctcagactgggacttatcatcccacacccctattttttaggcctttggactaggactaaactaagccactggctttcctgggtctccagcttgtagacagcagattgtgggacttagccttcatgagttcatgagccaatgccttgtaataaatctcattttacacacacatgcacacacacacacacacacacacacacacacacatccttattggttcattttctctggagaagccaaatttaaaaaataacatcagacagtattaagtggggacagaaatccaaataaagtgacagacaggtcatcatgtgaaatctggagggaaagtattcccagctgaagaaacaccaagtacaaaggccctgaggtacaggcaagagtggcatgtctactgttttgctaccttggtaaaacaaaataagaaaaaacaacaaaaacaaaatcacacacacacacacacacacacacacacacacacactacaataatttggaatggaagagaaaatattagacaccatgaaggtaactttctactctagccaaacccaaggctgtccagctacaatttaccatactctagaaccattaagaggagagaagaaattgacttttaatactggtatctattaattagtgagcacctaccatgtaccacagcgtgaggctatttacatatacaattgtatatgtacaatacatacgcatatacaattaggtccttgcggccatcaagtgccgtaggagttacaatttccatttcattcttgagaattccagagcttgtcctgtttcctaatatcaaattatataccctttgctgttttcaaggacatatgctacagatacatcctggcacaatttgaatttggaataattattgttttcctcttttatctaatctgagactaggctaagtgtgacagaaagccatttctctcatactgctataatgtttgcttgtattrtaagttttctgtgttttagtgatgtattagagtgctgttctacagggatagtcaataaatccacaca

SEQ ID NO: 702588 - DNA, 1463 bp, Homo sapiens
  misc_feature 738, 746, 747, 748, 749, 750, 751, 752, 753, 754, 755, 756,757, 758, 759, 760, 761, 762, 763, 764, 765, 766, 767, 768,769, 770, 771, 772, 773, 774, 775, 776, 777, 778, 779, 780,781, 782, 783, 784, 785, 786, 787, 788, 789, 790, 791: n = A,T,C or G
  misc_feature 792, 793, 794, 795, 796, 797, 798, 799, 800, 801, 802, 803,804, 805, 806, 807, 808, 809, 810, 811, 812, 813, 814, 815,816, 817, 818, 819, 820, 821, 822, 823, 824, 825, 826, 827,828, 829, 830, 831, 832, 833, 834, 835, 836, 837, 838: n = A,T,C or G
  misc_feature 839, 840, 841, 842, 843, 844, 845: n = A,T,C or G
taaagtctaataaagttttggaaaagattcacacatttctgaatttcataaaggtctaattattttgccatttctctcatcctaaatataattgaaatgcaatgagtgagagcccacagggattctcttagtgtccagatgggcatttctgcttttcctcatgatgggctggactattgaaaattaattggtattttcagctgtgccaggttgtcagccagctcacaagtgtaactgatgacttagtactcgcaaaccatttatccttaaacagtaattccatactaataatttgttccaactcatttatatctcaattcttaagctagaaaaaatctcacgtaaaatgtaaaaagttgactgactaacttcttagtcatctttgaataaacaaatcaggaatgttgctggcctatatgaagtacttcctgtatttagaaaagtttctggagtggctgggcgcggtggctcatgcctataatcccagcaatttgggagcctgaggcgggcagatcacgaggtcaagagatcgagaccatcctggccaacacggtgaaacattgtctctactaaaaaaaatacaaaagttagctgggcatggtggcacatgcctgtagttccaactacttgggaggctgaagcaggagaattgcttgaacctgggaggcagaagttgcagtgagccaagattgcgtcactgcgctccagcctgggcgacagagcaagacttcatctcanaaaaatannnnnnnnnnnnnnnnnnnnnnnnnnnnnnnnnnnnnnnnnnnnnnnnnnnnnnnnnnnnnnnnnnnnnnnnnnnnnnnnnnnnnnnnnnnnnnnnnnnngactctaaaagaaccccccttttaagcaaattctctgaaaagcttctcctaggtatgtactaaataaatacattttccagtatgatgcattctgccatttggtacattttaagaactcttttctacttatttaatataattaaggtcaagctcattgtactttctttttacatgttgtgcataaatgtatgaacaattagttcattatatacattgactacaattttctgtcttgttttgtttttcttttctcagagctaaactcctggaataggagttgggagactggaagtctggtagtggctctactgagttgacagacctggagtgagcacgtgccagcactttggtctccatatataccacrcaagagttcaaataaaataatgcacacactttcctccagctctaacatttaggacttgatcatatttcaaattcaaaactcttcttaattttaataggaatccctctctaagacagcctttaaaaggcagtaagccaaatgtgcgattgaattatcaggtgtatacatgctgtgggttaattagctgaaatacggctgcgctctgtttagcaggtgaaaagagtttacaccttaaagtagaatggttttaa

SEQ ID NO: 702589 - DNA, 653 bp, Homo sapiens
aatggattaaagaattaaatgtaagacctgaaaccataaaatgcctagaaaactgaaggagaaagctccttgacatttatcttgacaatgatttttttggacatgacatcaaaatcacagacaagaaaatcaaaaatgaacaagtgaaataaagcttgtgcataacaaaggaaataatcaacaaaatcaagaggcaacctatggaatgggagattagcataaatattttgtatggacaaaatctgttcaagaaaatcaataatgaatgctttgaactgtaacaggtttagtactttaagtacccatggaagcagttcattgcattcttttattattttttattagaattttctttcttttggcctggcgcagtggctcacacctgtaatcccagcactttgggaggccgaggtgggcggatcacgaggtcaagagatggagaccatcctggctracacaggaaaccccatctctactaaaaatacaaaaattagctggacgtagtggcgcacgcctgtaatcccagctactcaggaggctgaggcaggagaatcgcttgaatccaggaggcggaggttgcagtgagccgatctggcgtcactgcactccagcctgggcaatagagcgagactccatcttaaaaaaaaaaaaaa

SEQ ID NO: 702590 - DNA, 653 bp, Homo sapiens
aatggattaaagaattaaatgtaagacctgaaaccataaaatgcctagaaaactgaaggagaaagctccttgacatttatcttgacaatgatttttttggacatgacatcaaaatcacagacaagaaaatcaaaaatgaacaagtgaaataaagcttgtgcataacaaaggaaataatcaacaaaatcaagaggcaacctatggaatgggagattagcataaatattttgtatggacaaaatctgttcaagaaaatcaataatgaatgctttgaactgtaacaggtttagtactttaagtacccatggaagcagttcattgcattcttttattattttttattagaattttctttcttttggcctggcgcagtggctcacacctgtaatcccagcactttgggaggccgaggtgggcggatcacgaggtcaagagatggagaccatcctggctaacacaggaaaccccatctctactaaaaatacaaaaattagctggacgtagtggygcacgcctgtaatcccagctactcaggaggctgaggcaggagaatcgcttgaatccaggaggcggaggttgcagtgagccgatctggcgtcactgcactccagcctgggcaatagagcgagactccatcttaaaaaaaaaaaaaa

SEQ ID NO: 702591 - DNA, 653 bp, Homo sapiens
aatggattaaagaattaaatgtaagacctgaaaccataaaatgcctagaaaactgaaggagaaagctccttgacatttatcttgacaatgatttttttggacatgacatcaaaatcacagacaagaaaatcaaaaatgaacaagtgaaataaagcttgtgcataacaaaggaaataatcaacaaaatcaagaggcaacctatggaatgggagattagcataaatattttgtatggacaaaatctgttcaagaaaatcaataatgaatgctttgaactgtaacaggtttagtactttaagtacccatggaagcagttcattgcattcttttattattttttattagaattttctttcttttggcctggcgcagtggctcacacctgtaatcccagcactttgggaggccgaggtgggcggatcacgaggtcaagagatggagaccatcctggctaacacaggaaaccccatctctactaaaaatacaaaaattagctggacgtagtggcgcacgcctgtaatcccagctactcaggaggctgaggcaggagaatcgcttgaatccaggaggcggaggttgcagtgagccgatctggcgtcactgcactccagcctgggcaayagagcgagactccatcttaaaaaaaaaaaaaa

SEQ ID NO: 702592 - DNA, 590 bp, Homo sapiens
acaagtgataataaaatatgtaatactctgttttcaaattccatacacctgtaatttgtttcacttgctatttcttgcaaaattcagtatcagtttttgtaattctatcaccaacaacagtgtcacaaaatcagacaacaaataaacgcttggtgactattcatttcagcaaagaaacagctcatgtcattaacaaataagtgcagtttcaacatgaacattggttgatatttttctttatatcaataagtaaaaccaaagtgaaacagtgaagtcaaaggtttactcattcatcaataatgtgagtgacttctttgytaaaccggatgatagtttttgaatatccaaagaatatttccttaaatgttttatgctatttataatgtaaaggctgccgaaattattgtttaacctgcattattaaaatgttctcaataattttttaaagtctagttaataatcaaaacaacctgtcaagtcctgcttgtagcatttgccaatttctgtggtgtaaatgctcctaccatggtcaatttcagctgccaacgtgtcatcactaaacacagagctggaaagaaatgggaggtggc

SEQ ID NO: 702593 - DNA, 1887 bp, Homo sapiens
atgaactcaagcttgtaagagtgtgatttgatgagaaacaacttaaatagtataaactgtgactttaaagtggaattatgtgctatgattatatctgcttccctatatcaaccttacgggaatggaggcctcatgaagagtaaagaaagctaaatgtgagcatgtagcctttggaaatacgaatggtgtatggtaagcatcaattatgtgatgaagataaaaatatctgtgatttttaaaccattgaaacatgcattcttttttctcacaaaatatacataatgagaaaaatggaggcaagacattggaaatggttttatgaatcacattcagtgacaatccataatagaaagccacttaaggttatatacataaaatctagtaagttatacattgcagccaaatgtatatactcactaattatgtaaatgtaattgaaatctgatgaaaatacttttgaacttcaaattctgaagtttgtactgactaaagaataccacccataaaaatgaataaaaacatacccacagacctaaggtattttttataccacacattatgaggtctctgagaatgaaagatcctagattaggagcctcaattttgcagtctttgaaaattgtctatgactgttgcatcagaggtagaccaatgaacctcgatgcaatcttgatccacatacaaagtctgcatgtcatcatataaatgtgaattttgaagccccaagtctgtcatccagattgttccctaatcatacctcaatggatttttatctatgattggagaggatggaataaataataagttaaatataagagttatagtttgaaaaatctctgtgaaacctgagcaaacctaacagctctatattgttgcacaaggaggaggatcagagaacattttacagcacggggatattaactggcacacaacaacaggattgaatggcaagttctctgtatagccaagttcagacaaggggaaggttctttacaatactgacaagcttaactgactgagaatatacctgaccattactggaggtcataagaaggaaaacaccattctccagtttcccaggggttcagaatataatggtaaaaagttatatgaaggagcaggagtttctcaattttttgtgtgtgaggactggattagaaaatttgtttgattccacttttatgatttaattgcaccctcaagctacagtggcccagaaaaacattagttacaacttttattatgttgtatttaaatagctagttcaaaataaatagcttaattattaagtgcaataatcataaaataccttaaaaagctattttctaaattatgcctgcagagtattttataacatattaactctgagtagaaatgaacacaagataaatctgctttaagatactgcactgtctcttttcctgttttgaacagaattattaacagattaggaacctggccataactaatttcagatgaaaacactaaaatgttatactttttatatttggaatacagcaataaaatgttaaattgtcgttaaacagaaaacatcttttgcagcaaatatggaaaagacttaaatataataatccagattttactggaaatattctcctaagtctatttctccagagagtaccaagttttcaatgtaaacattgtgcatttttaaaataatgctcagtttcctgctgcctaaaaaaaatrtgccaagtttggggaaaatacttcatgaaataattcacatctcatctgctcctcgtttactatataattatcaggagttctaaaggaaccacctacagcagataaaaatttgtcttttaaatgaaaaatgcccctaattctaaaaagaggtttttaattttaaactcaatccactgc

SEQ ID NO: 702594 - DNA, 1887 bp, Homo sapiens
atgaactcaagcttgtaagagtgtgatttgatgagaaacaacttaaatagtataaactgtgactttaaagtggaattatgtgctatgattatatctgcttccctatatcaaccttacgggaatggaggcctcatgaagagtaaagaaagctaaatgtgagcatgtagcctttggaaatacgaatggtgtatggtaagcatcaattatgtgatgaagataaaaatatctgtgatttttaaaccattgaaacatgcattcttttttctcacaaaatatacataatgagaaaaatggaggcaagacattggaaatggttttatgaatcacattcagtgacaatccataatagaaagccacttaaggttatatacataaaatctagtaagttatacattgcagccaaatgtatatactcactaattatgtaaatgtaattgaaatctgatgaaaatacttttgaacttcaaattctgaagtttgtactgactaaagaataccacccataaaaatgaataaaaacatacccacagacctaaggtattttttataccacacattatgaggtctctgagaatgaaagatcctagattaggagcctcaattttgcagtctttgaaaattgtctatgactgttgcatcagaggtagaccaatgaacctcgatgcaatcttgatccacatacaaagtctgcatgtcatcatataaatgtgaattttgaagccccaagtctgtcatccagattgttccctaatcatacctcaatggatttttatctatgattggagaggatggaataaataataagttaaatataagagttatagtttgaaaaatctctgtgaaacctgagcaaacctaacagctctatattgttgcacaaggaggaggatcagagaacattttacagcacggggatattaactggcacacaacaacaggattgaatggcaagttctctgtatagccaagttcagacaaggggaaggttctttacaatactgacaagcttaactgactgagaatatacctgaccattactggaggtcataagaaggaaaacaccattctccagtttcccaggggttcagaatataatggtaaaaagttatatgaaggagcaggagtttctcaattttttgtgtgtgaggactggattagaaaatttgtttgattccacttttatgatttaattgcaccctcaagctacagtggcccagaaaaacattagttacaacttttattatgttgtatttaaatagctagttcaaaataaatagcttaattattaagtgcaataatcataaaataccttaaaaagctattttctaaattatgcctgcagagtattttataacatattaactctgagtagaaatgaacacaagataaatctgctttaagatactgcactgtctcttttcctgttttgaacagaattattaacagattaggaacctggccataactaatttcagatgaaaacactaaaatgttatactttttatatttggaatacagcaataaaatgttaaattgtcgttaaacagaaaacatcttttgcagcaaatatggaaaagacttaaatataataatccagattttactggaaatattctcctaagtctatttctccagagagtaccaagttttcaatgtaaacattgtgcatttttaaaataatgctcagtttcctgctgcctaaaaaaaatgtgccaagtttggggaaaatacttcatgaaataattcacatctcatctgctcctcgtttactatataattatcakgagttctaaaggaaccacctacagcagataaaaatttgtcttttaaatgaaaaatgcccctaattctaaaaagaggtttttaattttaaactcaatccactgc

SEQ ID NO: 702595 - DNA, 1887 bp, Homo sapiens
atgaactcaagcttgtaagagtgtgatttgatgagaaacaacttaaatagtataaactgtgactttaaagtggaattatgtgctatgattatatctgcttccctatatcaaccttacgggaatggaggcctcatgaagagtaaagaaagctaaatgtgagcatgtagcctttggaaatacgaatggtgtatggtaagcatcaattatgtgatgaagataaaaatatctgtgatttttaaaccattgaaacatgcattcttttttctcacaaaatatacataatgagaaaaatggaggcaagacattggaaatggttttatgaatcacattcagtgacaatccataatagaaagccacttaaggttatatacataaaatctagtaagttatacattgcagccaaatgtatatactcactaattatgtaaatgtaattgaaatctgatgaaaatacttttgaacttcaaattctgaagtttgtactgactaaagaataccacccataaaaatgaataaaaacatacccacagacctaaggtattttttataccacacattatgaggtctctgagaatgaaagatcctagattaggagcctcaattttgcagtctttgaaaattgtctatgactgttgcatcagaggtagaccaatgaacctcgatgcaatcttgatccacatacaaagtctgcatgtcatcatataaatgtgaattttgaagccccaagtctgtcatccagattgttccctaatcatacctcaatggatttttatctatgattggagaggatggaataaataataagttaaatataagagttatagtttgaaaaatctctgtgaaacctgagcaaacctaacagctctatattgttgcacaaggaggaggatcagagaacattttacagcacggggatattaactggcacacaacaacaggattgaatggcaagttctctgtatagccaagttcagacaaggggaaggttctttacaatactgacaagcttaactgactgagaatatacctgaccattactggaggtcataagaaggaaaacaccattctccagtttcccaggggttcagaatataatggtaaaaagttatatgaaggagcaggagtttctcaattttttgtgtgtgaggactggattagaaaatttgtttgattccacttttatgatttaattgcaccctcaagctacagtggcccagaaaaacattagttacaacttttattatgttgtatttaaatagctagttcaaaataaatagcttaattattaagtgcaataatcataaaataccttaaaaagctattttctaaattatgcctgcagagtattttataacatattaactctgagtagaaatgaacacaagataaatctgctttaagatactgcactgtctcttttcctgttttgaacagaattattaacagattaggaacctggccataactaatttcagatgaaaacactaaaatgttatactttttatatttggaatacagcaataaaatgttaaattgtcgttaaacagaaaacatcttttgcagcaaatatggaaaagacttaaatataataatccagattttactggaaatattctcctaagtctatttctccagagagtaccaagttttcaatgtaaacattgtgcatttttaaaataatgctcagtttcctgctgcctaaaaaaaatgtgccaagtttggggaaaatacttcatgaaataattcacatctcatctgctcctcgtttactatataattatcaggagttctaaaggaaccayctacagcagataaaaatttgtcttttaaatgaaaaatgcccctaattctaaaaagaggtttttaattttaaactcaatccactgc

SEQ ID NO: 702596 - DNA, 3231 bp, Homo sapiens
  misc_feature 2653, 2654, 2655, 2656, 2657, 2658, 2659, 2660, 2661, 2662,2663, 2664, 2665, 2666, 2667, 2668, 2669, 2670, 2671, 2672,2673, 2674, 2675, 2676, 2677, 2678, 2679, 2680, 2681, 2682,2683, 2684, 2685, 2686, 2687, 2688, 2689, 2690, 2691: n = A,T,C or G
  misc_feature 2692, 2693, 2694, 2695, 2696, 2697, 2698, 2699, 2700, 2701,2702, 2703, 2704, 2705, 2706, 2707, 2708, 2709, 2710, 2711,2712, 2713, 2714, 2715, 2716, 2717, 2718, 2719, 2720, 2721,2722, 2723, 2724, 2725, 2726, 2727, 2728, 2729, 2730: n = A,T,C or G
  misc_feature 2731, 2732, 2733, 2734, 2735, 2736, 2737, 2738, 2739, 2740,2741, 2742, 2743, 2744, 2745, 2746, 2747, 2748, 2749, 2750,2751, 2752: n = A,T,C or G
acactttctctgttgcaattcccctgtcttgataaatcagctccgtctaggcagggggctagatgaacccattgggcggttacacacagagagaccaagaagaatcagaacaaacaggccttgctgggctctgctcagtttattaccattagatcatatcccttttgtccagttacgttgctccacaactattcacttctttcatcagatttaacataaaaatacagtttccccctgggtgtttgggtcttcatttctgaagcctcctgtgtcaagcaaaactttgattaaatacctttgttatgcttttctcttgttaacctgtcttttgttatgggggttttgggctgtaaaccttgtggcgggtgaagaaaagataggacttttctcccctagagtattttaaaagtcttgtggaggcctgtgcttatgtcaaagatgtctggaggcatggcttgactgttcattcaaagacaaagaaacaacactcatggactttcctgcctggaggaaatgtcacccttggccacacagcttctcagagcaacgttcacgtccaccagcggcactgataactgactcctcagcactgtccagcgaatgctgcatggaggctcgcaggcaccccagcttaaaaaggaggaggagaaggtaaatacctacctagtacacaggaaatcaaagagcaaagcttaagaagtgggcttagactcatcaacccctcaaaaatactcagccacttttatgttttcttccccaaccccaagctctcatcctgaggtcctgactgaatctggagcgtgcttcagtatctccctaatttataagcgccactgctcattaaggctccctgttagatgagacctctgctgcaacagcctctctgcttgtaaacatcactgcatatatcaccacccaccccagcccagcagggaaaggaaaacaacaacaacaaataaaatgcaattctaggaatagtgagatatgcaagaaggcatcagtattaaactttctgttttgttttctttgagactgagttttgctcttgttgcccaggctggagtgcaatggtacgatctcggctcactgcaacctctgcctcccgggttcaagcgattctcctgcctcagcctccgaagtagctgggattacaggcgtgtgccaccatgcctggctaatttttttttttttttttttttagtagagatggggtttcaccatgttggtgaatacaactcctgacctcaagtgatccactcatcttggcctcccaaagtactgaggttgcaggtgtgagccatcgcacccggccagtattaaacatttttttaaaaattatgttgaaacttaaaactaggtagtagaaagtaggtaaaacaattaatagatggttttcaaataccacttccaacttaattactagtcattatattttctcttcagattgaagagccaagacatcattacacctaaatgcaaaactgtgtgtttacatccaaatctctcatctttcttataaaataggaaataaaattttaaaggtaccaaatgtgtttagaaccattgaagatagtttaaatattgttaaacatttaggggactataagaaaaagtttgttttttttttttaaatgagacggagtcttgctctgtcaccgaggctggagtgcagtggcgcgatctctgctcactgcaagctccgcctcccgggttcacgccattctcctgcctcagcctccggagtagctgggactacaggcgcccgccaccacgcacggctaatttttttgtattttcagtagagacggggtttcaccgtgttagccaggatggtctcgatttcctgacctcgtgatccgcccgcctcggcctcccaaagtgctgggattaaggcgtgagccaccgcgcccagccaagaaaaagtttttttaaaattagtgaaaatattagactctgaagaatagaaataataaataagaaaaatgtaaatgactttctcaacaattttagccactgactcccatcctcctctgtgccctcaaattcaattttcagtgactttcgcaggccaagagtcatcattcccgttgctgacagctcagctcctcagcctgggagtatccatttttggacatgcattttttattgtacttgcttttttaacaactcacattcatsgtttcattttagaatatccatggtgtaaataacacattacttcgtgcaatggagacaatattgcttgattgattctgtattactcaaaaaaaaaaaaaaggcgagaaaagaacttttatctgaggaatgtgagtccttttaaataatgaggcccagagagacattaaaatgaggcagcagtcaagtcctactccccgctttgagctaggtattcatctcctgaaactgcttattgccacaagtagctataaattaacctaataatgccagagcaaacgctataacccacaccctgtagcttaacaatgtatagccaatcactaatcaatgttatttctataaatcaataagaatgcctgacaaacaactttgtatcagccatgccttctccctcttttttgcctttaaaaatctgtttgtaacaaaggccaaactcatatccaaggttacacgggtccgagtcctcctgacaacnnnnnnnnnnnnnnnnnnnnnnnnnnnnnnnnnnnnnnnnnnnnnnnnnnnnnnnnnnnnnnnnnnnnnnnnnnnnnnnnnnnnnnnnnnnnnnnnnnnnagcaaggccgggtgcggtggctcacgcctgtaatcccagcactttgggaggcgcaaggcaggcagatcacctgagatcaggagtttgagaccagcttggccaacatggtactaaaaatacaaaaattagccaggcgtggtggcaggtgcctgtaatcccgggtacttggcaggctgaggcaggggaatcgcttgaacccaggaggcggttctgtttgcaagtatagttgtaactgcaacccaaaatgtcttagaaacttgctatttgaagtattgtcatcacctgggatcttgctagaatctgcatttaacaacattctcaggcaattttaatgatcattaggtttgaaaaacactgccttaaaacaaaggaaagaatggcaggcaagtttcaattctaagcatgctatattgtatgttcttgggcaaattccactaagtctgaattttaaaatagttaactatgggtagtaatgaatg

SEQ ID NO: 702597 - DNA, 593 bp, Homo sapiens
ttcccctgtagccagatgtgggttgggtagtgagaggttagtcaaggttagtcagctccagaaagtctgtctgtctccacaaaggggagtgacaaagagcgggagcctgaactcaagtgaagagcaatcatgagggcgacctcataaggaggacttctcaaacacggggccatctaagtttcacaatgaccgtaaaagaaagccattgtttttttttttttttttttttgagacggagtctcgctctgtcgcccaggctggagtgcagtggcgggatctcggctcactgcaagctccgcctcccgggttcacgccattctcctgcctcagcctcccaagtagctgggactacaggcgcgcgccactacgccyggctaattttttgtatttttagtagagacggggtttcaccgttttagccgggatggtctcgatctcctgacctcgtgatccgcccgcctcggcctcccaaagtgctgggattacaggcgtgagccaccgcgcccggccagaaagccattgttatctccattttctgatgaagtagtctgagaaataatgagactttcctgaagaaaaccagtaaacagcaa

SEQ ID NO: 702598 - DNA, 736 bp, Homo sapiens
tgtcttttgcagccctgtcataaccatgtcactgtactttcagcttctcaattccttggcaggtcacatgcattgtcatgttgaatatcagtattttaaaagaatagctgtcaacatcagtggcatcctgaaaaagatgtacaaagaagctcatattacccagaaaaatctcacattgtctttcatacttcagaaataaaaagggaaaaggaaaggtaattgtcctttaaacatacatttatatagatgccagagaaaccaaataaaataggaagctatttttcaactgacatgttctaagtcaatataatggcattacatattttctcaatttgtttaatttgatttwaaaagtcacaaacatttgaatctacgggtatgaatttcattcacattatatataatgtaaaatatttacttccatgatttaaaaaatcttgtctattttgtgtagttttcttttgaaaatttaatgtgttttctcacatcttgttaatgtacttctaaaaattcatttaccgagtacacaatgagtaagcatcaaattacatctaaataatctgttgattggacagtttctcctcatacactacagaacaattaggcacaatagaaaaaaatctctatgtcaaatataagtgatttttaaaagtgattattaatcataataacataagaacaattggagcagggccttcaatattgtcacatttatgacagtacagttatctttgtg

SEQ ID NO: 702599 - DNA, 2846 bp, Homo sapiens
tccaatgtcaaccttgacgttaagaatgatgaatgtggcagctgtttccttctgttattgatctttttactgacccttcccattgtgctttgtcaatgactgagtatcttccctggaccgctcttatctgaagtcgtcctcatctctcagagattttcagcaccatctgtcagccaggcactgtgactctgtcgtcagtgaccatttttattgacttttgtctctttctggcctttccatggtgccttggccttaaatgtcctactaattagctcagtggtgattacagtgctggttttgagagcaccctgttgtttttttcttatctaggagaattttttttctctctttatctggaaatattactttgctggctatgctgacttaggtcattgacatcagatcagtgttctaaatctgatcctagtaatcccatctacaatcttcccacacaagccaagggaagagacacacttgattaaaaaccttgcactctctttcctatttggctattttttctcctcttggagaaagagtttccccaaaatactatatgaagtgttattttgtaagcctacttaacttagttttatatactgtgcacaaactttacatataatttgaataggctcagttctttgttacttttttttagtttttcactgaattttatatgacagactaagctaaataatttgttatagttagaagactgttttctcatttacataccaaaatctaccaaaatgaatttattacacttaagaatttttgttaattaccattaccacttctgtaaaataaaataaatctgtaagaattttatgagcaaagctttttcaagtctactatttagtttagcaattattctaaatatcaatctcaaaattagagtaagggatttccccttttaggaaaagatatcaataattatatagtaaaaatttaaaattaagatacagacatttattccgtgttggatcccaaatatctcattagagaattatcttctctcattgtctgctattttctaaaatacaggaagatataaagtataaatctgattttttttctaccagaagttaaagaacatagaatatatttggtatgattaattgggagtttgtatttcctctgcaatctagaaatattattattttaaatatctgcaatattatttattttaaaagtttttagtttgaaaagacatttctgaaagccccaaatctgtgagcatgtgctactacaaaatttttaawtgtaagcaattgagagagaaaagtcctcgaatttggccaagcgcggtggctcacgcctgtaatcccagcactttgggaggctgaggtgagcggatcacgaggtcaggagatcgagaccatcctggctaacaggatgaaactccgtctctactgaaaatacaaaaaattggccaggtgtggtggtgggcacctgtagtcccactactcaggaggctgaggcaggagaatggcatgagcccggtaggcagagcttgcagtgagccgagatcgcgccaccgcactccagcctaggtgacagagcgagactccatctcaaaaatgaataaataaataaataaataaataaaagtccttgaatttatgcaaatgacatagcaatcacttcaactcttaaataatctaaccatcatgagataagagaatggatttttttctactcgtttgtatcttgtctttttgaaagagactacttgttaataatatgcttctgacaaaacaaaaactaaggaaagtgtatgatacaggcctgagtctctttcctcaagttcacgttttaaaaataaagcataatcagggataatgtagcctctacttgtaaaggaaggctggctttatgtattaatgaaataggcagcttcttacacaatgtgatttcaacagagccaggaagtatgtcttatctctaaataactccctaaataactccttctaacaccaatatctgaaatgttgtgactgatttctttctgtcctgccctgaagttctttcctgactgcaaagaacagcacattttgaatgtttcaaactgtcatacatgttctctccagaagagtggagtgatgccccaccagacattctaagtcacaggataacgtgacatatttcatgattgtcagttttaccatgtggcaagtagttaaaaagacgaagtttacagttccaagaacacaaactatgttatggaataggacgaaacacaaggagtaaagtagtcccttgtttttgctttaggttactcaccttgctatccgtaattgtattcactgaagtattgaggaacacattaacgttggtttcagatttgttgactttaagttctacatctgaagtatgttggcactttgaccttgcataattcaaagtcatgtctctgcaccactgtttcattctatataaagtgattgacaataatagttttcccaccaaagttggacttccatttctgtcaattggccaaactgggtttcctaaaaagccttgtagctctacaaaatatcaggaaattatatcaagtctacttttaagtaaatgtgaagctctcaaggaagccctgatggcaatccagaaatagataaaagcagtacaggagctagagttgccctggggaacagaaactgacctgggttacccagagtttggggtattaacaactactcaggggaaagtaaaagtaggccttggacacataaaatgttgggaaggctgagccagacttcttgcatatagccgagtcacaataggctaagaacatgaatttaggaaggaaagcaaaaaaatctacaagcagtatgaaaaaaaaaatctcc

SEQ ID NO: 702600 - DNA, 612 bp, Homo sapiens
tacccaaaacacgattcataatcttctgaagatgggtttctcctgctttgcccctggctcagtgaatggtttttagtacagtcctcatctgagcaattctaatttatctaagaactgtatgccagtgatgtgacactgccaaaatctcagatcttacctcttttgacatttcarggtatctgacaaaacctttatgaaggacggtgagggaggcatggctattcccatgtcaaaaataagcaaatgaagctctatgtcattaattatttggtgactaaatcagaaagaaggttcaagaccttgccttcccaattcagaatctttctgttatacaccacaggttctctgatgtgaagtaaaggaaataatatattgatttctctctcaggctctgggtctgtgactgaactctagggtttacagtgccactcctttttggacctgcagggttctgcgtgatctggccatttcccactcctgatctcttacaggtttctttttcaccgtctccactggagtgatgttggatatttgccatttcagttctctccatgtatttggaggcggggatacttttggatcacatttattctagatgattgtttcctatgc

SEQ ID NO: 702601 - DNA, 612 bp, Homo sapiens
tacccaaaacacgattcataatcttctgaagatgggtttctcctgctttgcccctggctcagtgaatggtttttagtacagtcctcatctgagcaattctaatttatctaagaactgtatgccagtgatgtgacactgccaaaatctcagatcttacctcttttgacatttcagggtatctgacaaaacctttatgaaggacggtgrgggaggcatggctattcccatgtcaaaaataagcaaatgaagctctatgtcattaattatttggtgactaaatcagaaagaaggttcaagaccttgccttcccaattcagaatctttctgttatacaccacaggttctctgatgtgaagtaaaggaaataatatattgatttctctctcaggctctgggtctgtgactgaactctagggtttacagtgccactcctttttggacctgcagggttctgcgtgatctggccatttcccactcctgatctcttacaggtttctttttcaccgtctccactggagtgatgttggatatttgccatttcagttctctccatgtatttggaggcggggatacttttggatcacatttattctagatgattgtttcctatgc

SEQ ID NO: 702602 - DNA, 612 bp, Homo sapiens
tacccaaaacacgattcataatcttctgaagatgggtttctcctgctttgcccctggctcagtgaatggtttttagtacagtcctcatctgagcaattctaatttatctaagaactgtatgccagtgatgtgacactgccaaaatctcagatcttacctcttttgacatttcagggtatctgacaaaacctttatgaaggacggtgagggaggcatggctattcccatgtcaaaaataagcaaakgaagctctatgtcattaattatttggtgactaaatcagaaagaaggttcaagaccttgccttcccaattcagaatctttctgttatacaccacaggttctctgatgtgaagtaaaggaaataatatattgatttctctctcaggctctgggtctgtgactgaactctagggtttacagtgccactcctttttggacctgcagggttctgcgtgatctggccatttcccactcctgatctcttacaggtttctttttcaccgtctccactggagtgatgttggatatttgccatttcagttctctccatgtatttggaggcggggatacttttggatcacatttattctagatgattgtttcctatgc

SEQ ID NO: 702603 - DNA, 614 bp, Homo sapiens
tattgtctgagggttaatgccaaggcaaatatgcaacttaaarcactttttcatgatgccctctctggtaagttgacaattagatgtaccaaccacctagctcttggccagaagcttacatttggccttttgtgaatataaatgaagataaaggtcaaatattttggactgggaatttttttttctttttattttattattattatactttaagttttagggtacatgtgcacaatgtgcaggttagttatatatgtatacatgtgccatgctggtgtgctgcacccattaactcgtcatttagcattagatatatctcctaaagctatccctcccccctccccccaccccacaacagtccccagagtgtgatgttcctcttcctgtgtccatgtgttctcattgttcagttcccacctatgagtgagaatatgcagtgtttggttttttgttcttgcgatagtttactgagaatgataatttccaatttcatccatgtccctacaaaggacatgaacttatcattttttatggctgcatagtattccatcgtgtatatgtgccacattttcttaatccagtctatcattgttggacatttgggttggttccaa

SEQ ID NO: 702604 - DNA, 614 bp, Homo sapiens
tattgtctgagggttaatgccaaggcaaatatgcaacttaaagcactttttcatgatgccctctctggtaagttgacaattagatgtrccaaccacctagctcttggccagaagcttacatttggccttttgtgaatataaatgaagataaaggtcaaatattttggactgggaatttttttttctttttattttattattattatactttaagttttagggtacatgtgcacaatgtgcaggttagttatatatgtatacatgtgccatgctggtgtgctgcacccattaactcgtcatttagcattagatatatctcctaaagctatccctcccccctccccccaccccacaacagtccccagagtgtgatgttcctcttcctgtgtccatgtgttctcattgttcagttcccacctatgagtgagaatatgcagtgtttggttttttgttcttgcgatagtttactgagaatgataatttccaatttcatccatgtccctacaaaggacatgaacttatcattttttatggctgcatagtattccatcgtgtatatgtgccacattttcttaatccagtctatcattgttggacatttgggttggttccaa

SEQ ID NO: 702605 - DNA, 653 bp, Homo sapiens
ggttgcagtgagccaagatcgcgccactgcactccagcctgggcgacagagcgagactctgtctcaaaaaaacaaaataaataaaaccactcatctaatgtttattctgctcatgatccacaggcttatgtatattctgtctttccccctggaatctaacttctgtgagaataagagcctttaatgccttgttcctctttttatcctcrttgtctaagacaatagacacacagtagttccttgaatgagtacaaagaattataattccaaatgaatttaattttagataacttttaagaaataaatagattaagaaataaacaattacttcaaccttttttagcttgcaagaaaatatgatttcctcataatagaagatgatccttactattttctccagtttaacaaggtaagtgattatgtgaacttacttcactattagaagataagttgttttaagttactgcactgtgttgggtattaggctgactgctgagtcagaactaatccacttttacatggaaaataaatcaattatgattaatttgctactactttacttttcagtcttccagttttattatggaattagtacctttcttttttggtattactgctctttccagaaattacttaccttcaaaatagtagct

SEQ ID NO: 702606 - DNA, 1442 bp, Homo sapiens
tgtcagatgtggtgatttcattacgagtgtagcactgaatggtgtgtgccatgcatcaagctaatgaatatataaatccaaacagtaattgaatttctgcattgatgataaacgttccttgtaaagaaaaaaaaaaaaacacattcagcagggacaaggaaaatagtctggggaaggtagcatgctggcaygatttgtattatcagaaggcaacttggtggcagtgtagagaaggattggatcaaggaaaaagcccctagcatgtctcttccacagaggaagcaaggaacaaggagagcagatgttttctaagtaagattcttatccccccttctcaatataatttttcacctgcctggaatcttctttgcctgagagacaatagagtgtggtgaatatgaaacaggttctgtagacatggtgacttggatttgcccagctctgtcatttcctagctatatacccttgagtaggttagtttctcatcattataattgggataatcatctcattccagttgtcagaaggactaaattattttgtcattgtttttgtttactcctggccaacaccatacaatggaaaatgttggggttgcattttagagacatatatagctaattcaacccccaaggctctgggacttcagttctttcagatattcctacattccctctggagagcattgagaggataattaagagcttttcaatttagccatttccttgggtatttgtaaataaaactgacatacttgtttgtctctatagtaactcacatcatggttgaaggcatatagggctacctttgccaataagaactgttttctgaccattcttcaggctactccttttatagacggttccaaaacttttctcctctttggtcagcaggtcttttttgagtttctccttttttcccgaagggtgctggccaataatccctgaatcatctaccctatacaatcattgccccccacatactaaaaaatttggggctgctggcttttctcatgtgtctacattcttttgggtaattgggctgttctcaatgtttttgagagaagcttataggacatttttgttcctgctcaattccctagtcttagagatcttagaacatggataggcatcagataatttatgtaaatttttgtgtatatatacgagtatttgcttgtgtattttaacaattagaagtgacatattgtttatcaattctccggttgtcgtttgtcctccaaaacattaataatcattcctagtagtcagtttctgtattctatagcagtcgtgtaggaataagtctttgaagagctaggggctcttgattctcttctaatgtgggcttgggaaagcacatctttataatacctgacttctcttacctttcctttccttccttatcaatctctttctctgtcccctcagaacaaattctca

SEQ ID NO: 702607 - DNA, 1442 bp, Homo sapiens
tgtcagatgtggtgatttcattacgagtgtagcactgaatggtgtgtgccatgcatcaagctaatgaatatataaatccaaacagtaattgaatttctgcattgatgataaacgttccttgtaaagaaaaaaaaaaaaacacattcagcagggacaaggaaaatagtctggggaaggtagcatgctggcacgatttgtattatcagaaggcaacttggtggcagtgtagagaaggattggatcaaggaaaaagcccctagcatgtctcttccacagaggaagcaaggaacaaggagagcagatgttttctaagtaagattcttatccccccttctcaatataatttttcacctgcctggaatcttctttgcctgagagacaatagagtgtggtgaatatgaaacaggttctgtagacatggtgacttggatttgcccagctctgtcatttcctagctatatacccttgagtaggttagtttctcatcattataattgggataatcatctcattccagttgtcagaaggactaaattattttgtcattgtttttgtttactcctggccaacaccatacaatggaaaatgttggggttgcattttagagacatatatagctaattcaacccccaaggctctgggacttcagttctttcagatattcctacattccctctggagagcattgagaggataattaagagcttttcaatttagccatttccttgggtatttgtaaataaaactgacatacttgtttgtctctatagtaactcacatcatggttgaaggcatatagggctacctttgccaataagaactgttttctgaccattcttcaggctactccttttatagacggttccaaaacttttctcctctttggtcagcaggtcttttttgagtttctccttttttcccgaagggtgctggccrataatccctgaatcatctaccctatacaatcattgccccccacatactaaaaaatttggggctgctggcttttctcatgtgtctacattcttttgggtaattgggctgttctcaatgtttttgagagaagcttataggacatttttgttcctgctcaattccctagtcttagagatcttagaacatggataggcatcagataatttatgtaaatttttgtgtatatatacgagtatttgcttgtgtattttaacaattagaagtgacatattgtttatcaattctccggttgtcgtttgtcctccaaaacattaataatcattcctagtagtcagtttctgtattctatagcagtcgtgtaggaataagtctttgaagagctaggggctcttgattctcttctaatgtgggcttgggaaagcacatctttataatacctgacttctcttacctttcctttccttccttatcaatctctttctctgtcccctcagaacaaattctca

SEQ ID NO: 702608 - DNA, 1442 bp, Homo sapiens
tgtcagatgtggtgatttcattacgagtgtagcactgaatggtgtgtgccatgcatcaagctaatgaatatataaatccaaacagtaattgaatttctgcattgatgataaacgttccttgtaaagaaaaaaaaaaaaacacattcagcagggacaaggaaaatagtctggggaaggtagcatgctggcacgatttgtattatcagaaggcaacttggtggcagtgtagagaaggattggatcaaggaaaaagcccctagcatgtctcttccacagaggaagcaaggaacaaggagagcagatgttttctaagtaagattcttatccccccttctcaatataatttttcacctgcctggaatcttctttgcctgagagacaatagagtgtggtgaatatgaaacaggttctgtagacatggtgacttggatttgcccagctctgtcatttcctagctatatacccttgagtaggttagtttctcatcattataattgggataatcatctcattccagttgtcagaaggactaaattattttgtcattgtttttgtttactcctggccaacaccatacaatggaaaatgttggggttgcattttagagacatatatagctaattcaacccccaaggctctgggacttcagttctttcagatattcctacattccctctggagagcattgagaggataattaagagcttttcaatttagccatttccttgggtatttgtaaataaaactgacatacttgtttgtctctatagtaactcacatcatggttgaaggcatatagggctacctttgccaataagaactgttttctgaccattcttcaggctactccttttatagacggttccaaaacttttctcctctttggtcagcaggtcttttttgagtttctccttttttcccgaagggtgctggccaataatccctgaatcatctaccctatacaatcattgccccccacatactaaaaaatttggggctgctggcttttctcatgtgtctacattcttttgggtaattgggctgttctcaatgtttttgagagaagcttataggacatttttgttcctgctcaattccctagtcttagagatcttagaacatggataggcatcagataatttatgtaaatttttgtgtatatatacgagtatttgcwtgtgtattttaacaattagaagtgacatattgtttatcaattctccggttgtcgtttgtcctccaaaacattaataatcattcctagtagtcagtttctgtattctatagcagtcgtgtaggaataagtctttgaagagctaggggctcttgattctcttctaatgtgggcttgggaaagcacatctttataatacctgacttctcttacctttcctttccttccttatcaatctctttctctgtcccctcagaacaaattctca

SEQ ID NO: 702609 - DNA, 1442 bp, Homo sapiens
tgtcagatgtggtgatttcattacgagtgtagcactgaatggtgtgtgccatgcatcaagctaatgaatatataaatccaaacagtaattgaatttctgcattgatgataaacgttccttgtaaagaaaaaaaaaaaaacacattcagcagggacaaggaaaatagtctggggaaggtagcatgctggcacgatttgtattatcagaaggcaacttggtggcagtgtagagaaggattggatcaaggaaaaagcccctagcatgtctcttccacagaggaagcaaggaacaaggagagcagatgttttctaagtaagattcttatccccccttctcaatataatttttcacctgcctggaatcttctttgcctgagagacaatagagtgtggtgaatatgaaacaggttctgtagacatggtgacttggatttgcccagctctgtcatttcctagctatatacccttgagtaggttagtttctcatcattataattgggataatcatctcattccagttgtcagaaggactaaattattttgtcattgtttttgtttactcctggccaacaccatacaatggaaaatgttggggttgcattttagagacatatatagctaattcaacccccaaggctctgggacttcagttctttcagatattcctacattccctctggagagcattgagaggataattaagagcttttcaatttagccatttccttgggtatttgtaaataaaactgacatacttgtttgtctctatagtaactcacatcatggttgaaggcatatagggctacctttgccaataagaactgttttctgaccattcttcaggctactccttttatagacggttccaaaacttttctcctctttggtcagcaggtcttttttgagtttctccttttttcccgaagggtgctggccaataatccctgaatcatctaccctatacaatcattgccccccacatactaaaaaatttggggctgctggcttttctcatgtgtctacattcttttgggtaattgggctgttctcaatgtttttgagagaagcttataggacatttttgttcctgctcaattccctagtcttagagatcttagaacatggataggcatcagataatttatgtaaatttttgtgtatatatacgagtatttgcttgtgtattttaacaattagaagtgacatattgtttatcaattctccrgttgtcgtttgtcctccaaaacattaataatcattcctagtagtcagtttctgtattctatagcagtcgtgtaggaataagtctttgaagagctaggggctcttgattctcttctaatgtgggcttgggaaagcacatctttataatacctgacttctcttacctttcctttccttccttatcaatctctttctctgtcccctcagaacaaattctca

SEQ ID NO: 702610 - DNA, 1442 bp, Homo sapiens
tgtcagatgtggtgatttcattacgagtgtagcactgaatggtgtgtgccatgcatcaagctaatgaatatataaatccaaacagtaattgaatttctgcattgatgataaacgttccttgtaaagaaaaaaaaaaaaacacattcagcagggacaaggaaaatagtctggggaaggtagcatgctggcacgatttgtattatcagaaggcaacttggtggcagtgtagagaaggattggatcaaggaaaaagcccctagcatgtctcttccacagaggaagcaaggaacaaggagagcagatgttttctaagtaagattcttatccccccttctcaatataatttttcacctgcctggaatcttctttgcctgagagacaatagagtgtggtgaatatgaaacaggttctgtagacatggtgacttggatttgcccagctctgtcatttcctagctatatacccttgagtaggttagtttctcatcattataattgggataatcatctcattccagttgtcagaaggactaaattattttgtcattgtttttgtttactcctggccaacaccatacaatggaaaatgttggggttgcattttagagacatatatagctaattcaacccccaaggctctgggacttcagttctttcagatattcctacattccctctggagagcattgagaggataattaagagcttttcaatttagccatttccttgggtatttgtaaataaaactgacatacttgtttgtctctatagtaactcacatcatggttgaaggcatatagggctacctttgccaataagaactgttttctgaccattcttcaggctactccttttatagacggttccaaaacttttctcctctttggtcagcaggtcttttttgagtttctccttttttcccgaagggtgctggccaataatccctgaatcatctaccctatacaatcattgccccccacatactaaaaaatttggggctgctggcttttctcatgtgtctacattcttttgggtaattgggctgttctcaatgtttttgagagaagcttataggacatttttgttcctgctcaattccctagtcttagagatcttagaacatggataggcatcagataatttatgtaaatttttgtgtatatatacgagtatttgcttgtgtattttaacaattagaagtgacatattgtttatcaattctccggttgtcgtttgtcctccaaaacattaataatcattcctagtagtcagtttctgtattctatagcagtcgtgtaggaataagtctttgaagagctrggggctcttgattctcttctaatgtgggcttgggaaagcacatctttataatacctgacttctcttacctttcctttccttccttatcaatctctttctctgtcccctcagaacaaattctca

SEQ ID NO: 702611 - DNA, 1296 bp, Homo sapiens
taaatatcatttttattttaaaacttttgaagcataatatacattcagaagtgttcccaagttacaaatgtatagttcagtgaattatcacaaaattaacatgcctgtgtaactattacctagaccaagaggtaaaatattaccaggatcccagaagctccctgatgcctcctcgtcatcactaacccttccctcttcccccaaagtaatcgctttctgacttctatcactgtagacaaatagttttgtcattcagacatttgggtctctagtttggtactattaataatatgaatattcttatacatgccttttggtatacatatgtatgtgtttctgttaggtatgtctctaaaagtagaaaaatttgattatagagtatttgaatgttaacatttattagawactggcaaacagttttaaaagtgtttgcagcaacttacattctcaccggtaatatataagagtacgtggtgttttacttcattgcctacaggtagtataactaatatttttaaatttagctttttaaatgagatttctttaactgaatccaacacataagatttttgcttgtttgtatataacaacacattcattttagtaaaaccataaaaatgtgagggttatatcctaaaagtggaattttaatgcatttttaaatcccctctacttttccattcctcattcatccccaatacctcatttcaaagtattgtaataatacagagcaaaactagaaactggtgaaactcagaggaacctaataagttgttgtggccatgtgatgcccagtggaacctcatagaggtaaactatatggtctcccaagattgactatcagcaagtcaacccatatcctatcatgaacagctttagaggagtattctgatgttaactttcctggaacttaggttcttttagacttgccactgtttaaagacaaaattttagaagtttctaactattctttatttctcaatgctcatataatttatatatagaaaatatatttttgaagatctgttacttaaattttacatgtcagaaaattaaaacttaattactatcaaagggtaatacaatactcttgaccaaataattcaaggagtggcaaaagaattataattaaatttgctgaaaaaaaggtattttaaaagtactattaaataagcatggagccaattagaacgtttttgcattaagtaccagctctctggttgagacaataatgaaaagaactgaaagttttataaaagcttctgttcttctgaattgttcactgtgaatctattt

SEQ ID NO: 702612 - DNA, 1425 bp, Homo sapiens
aggttgcagtgagctgagtttgtacctttgcactctagcttgggggacaagagtgagactttgtctcaaaaaaaaaaaaaaaaatccatgcttgtcttggtcctagggcctcagtgtatggaaccccagctcagtgtcactttaatgtaaatgagtttttattttatttcattttaagttctgggctacatatgcaggatgtgcaggtttgttacataggtaaacggtggctgttagctgcacctatcaacccaccacctaggtattacgcccagcatgcattagctattttacctaatgctctcccgctacttcccgccctcccctgacaggccccagtgtgtgttgtttccccacatgtgtccatgtgttctcattggtcagttcccacttataagtgagaacatgcagtgtttggttttctgttcctgggttagtttgctgaggataacggcttccaattctatccatgtccctgcaaaggataagaactcggctgggcacagtggctcattcttgtaatctccagctctgagcaacagagcaagactccatctcagaaaacaaacaaacaaacaacaacaacaaaaacaaataaaaaggacatgatctctctctgcttttttttgagatagaattttgatcgttgcccaggctggagtgcaatggcacactcttggctcactgcaacctccatctcctaggttcaactgawtctcctgcctcagcctcctgagtagccgggatcacaggcacctaccaccatgcctggctaatttttgtatttttagtagagatggggtttcaccatattggccaggctggtctcgaactcctgacctcgtgatccacccaccttggcctcccaaactgctgggattacaggcgtgagccaccatgcccagccgatctcattcctttttgaggctgcatagtattccatgctgtatatgtactacattttctttatccagtctatcatcactgggtatatatacccaaaagaatataaatcattctattataaagatacctgcacgcgtatgttcattgcagcactattcacaatagcaaagacatagaatcaacccaaatgcccatttttcttctataaaatgcggaaaatactaggtatccctaattatccaacatgattgtttttgaagatccaacgagggaacaaatgtgaaaaaaactgtgatggatctaaaatttctatatcaacacaaggtattattatgaatactactacttacccacaggcaagtttcatcataaaaatcctgacatgggtcctcttaactggcaatcatcacaaaagattaaaatatatgctgaacactctcacaagaagaatgggagaaggtcctgtgcggtggctcatgcctgtaatctcaacactttgggaggctgaggtgggcagat

SEQ ID NO: 702613 - DNA, 616 bp, Homo sapiens
gaagctccatgaaaactaggaattgatctagaacgtatgcacatcaatacaccctccagatacagatccaggaaggaaatctgaccaccacacaaggagacaggtatgagagcaaacccctaagtcaggtgacgaacaccaaacaaagcatctgtgattggctactacacaaaaaggaaacaaaaacatctcccaaactcagagacagatcattgcctctgaaaatatacttgaagaaatcagaaaatgtactcaactctaattcctcgaaggaaggggccaaatcttgtktgctattgtgtttctagtatgaaagcagtgctttgcacaaaataagcatgtgatgaatattcttaaatagttttcatatacagaaaagtgtaaaatagacgtcactataaaaggcatagaaaattataaaaaaatagaatacaaaaaagtaacagaatgaaaaaagaaagatgaatgagaagagaggctgttcacaaccaaaaatgcatgggcagaatgcaaatccacattaaaggcagtaaatacagaatgctaaggtagaaagtgcacagtgtgacatttcaggaagactaaaaatcaattggaagagatcaaacacactgtg

SEQ ID NO: 702614 - DNA, 616 bp, Homo sapiens
gaagctccatgaaaactaggaattgatctagaacgtatgcacatcaatacaccctccagatacagatccaggaaggaaatctgaccaccacacaaggagacaggtatgagagcaaacccctaagtcaggtgacgaacaccaaacaaagcatctgtgattggctactacacaaaaaggaaacaaaaacatctcccaaactcagagacagatcattgcctctgaaaatatacttgaagaaatcagaaaatgtactcaactctaattcctcgaaggaaggggccaaatcttgtttgctattgtgtttctagtatgaaagcagtgctttgcacaaaataagcatgtgatgaatattcttaaatagttttcatatacagaaragtgtaaaatagacgtcactataaaaggcatagaaaattataaaaaaatagaatacaaaaaagtaacagaatgaaaaaagaaagatgaatgagaagagaggctgttcacaaccaaaaatgcatgggcagaatgcaaatccacattaaaggcagtaaatacagaatgctaaggtagaaagtgcacagtgtgacatttcaggaagactaaaaatcaattggaagagatcaaacacactgtg

SEQ ID NO: 702615 - DNA, 1693 bp, Homo sapiens
tttcatgaatatctactgtctcttctatggttatccttctcagtctacttttggagctctgtttttttttaattcaccttaaatattcatgtcacccattctttgtcctcagttcaagtcattttcatgcaagtatattatatattttacctctgacccagtagttctcaactgggatcaattttgccctttagggtatattagtcaatgtctggagacacttttggttgtcacaactgtggaagaggtactactggcattcagtaggtaaaggtcagggatgttgctaaatatcttacagggcatagaacagcccccacaatagcttctgaattatttggcccaagtgtcaccagtgctgaattcgaaaaatcctgtttaacccatagcaaccttgtatcatgaaatagtatttaccccatgttacaaacaagaaaataagacctgcagaactcagtacccaagatcacctagttaatcagtggtgagaccagaatttaaacccatgtctaatgcctaagggcatggaacctttaaattcatgtactttccaatatggcatgatgtctctacccaaatattttataactataattttttagctatacagatacctaaattgtatatgattttattatgtattgtagaattataccctccaaaataaaatatagaaaagttgaaagtaatataaagtaattaaaggtctgttttttttggttttttgagatggggtctcaccctgttacccaggctggagtgcagtggcatcatcacagttcactgcaacctcaaactcctggactcaagcaatcctcttgcctcagcctcctgggtagctgggactacaggcatgtactatcatgcccagctaatttttttttaagttttttaaaggtggagtctcacaatgcccaggctggtctggaactcctggcctcaagctatcctcccatctcagcctctggagtagcttggattataggagtaagccactgagtcagatcagttctttacagatgactatyataaatatgtggcctctattattttcttttaaactttgtttggagatgatattgtggttctgtatttctagttagttttatttatttctcatttacctaattcagcaataaatttgttaatctactcagattaaggttatttaaatatatatacatttacttgcattatctttaattctcaaaacaattacttaaggtattatttctcccagatcacaaataataaaacaatttttgttccagtgaactttattagtctattgaaaatattggggagcaaaatattaaaactacttctctagatcttactgtatcactaattgtccaagaagtttcaaaacaaaaactcaaataatacagatctattttttaaaaatgagaatctatcattctttgatagtcatgcctgtgcaaggatttttttttttatcatgaacaactgtaagcttccgatttgcagttttagttcgactaaatttcagagattattcaatggcaaaccactgattaccctgtgacgttatgtgtacaatgtgccctataaatgagtacaatttctgtaattaaggttaacagtactcttgctgtaatcagtaccacttttgagtcccaacattcactatttgcttaatatactttcctgttcatagcttataatttttcca

SEQ ID NO: 702616 - DNA, 1414 bp, Homo sapiens
aaggctgagattctttttgtgaakataatataatattgataccaaaacctgacaaagatagttccccacaccttcaaaaaaaaaaaatctttgccacattttttacatataaatactgatgcaaagaaatttaaggtattaatcctatggtatgtcagaagtataaaacacacaatgaccacatttagttggtaaaataaatatctaatgcaagccagaaaatcataaaaaaataaatgaattggactaacttcatccaaaaatacaacctttttaaagctaaaaaaaaattcaaaagaatttagtgctgactcaggaaaataagttgagcagaattttaataagcattggactatgaataaatagtccagaaattgtccaaaagatatgcagaaatttatatcataaaggtgatttctaagtacgggagaaaatgatactagatggatgatgtcagacaattgttcatctatcaaggggagatagaattagaagaactatagttacagccagaccacactatttatattgaaaatacctaaaagcttttcaagtaaatgagaaataaaacatgtaaaaagtaaaaataaacacattataggaaatcatttaatatttttatagttttggtgagggactttacattatttaaacagatgccataaaaatgtttacataagcttcatagtaaccacaaaattaaagtctatagtagacacacaaaagataaaaggaatcaaagtgcaactctgtaggaaatcatcaagtcacaaaaaagaacagaaagaagaaaggatctacaaaacatccagaaaacaattaacaaaataacaacagtaaatccttacctattacaattactttaaatgtaaatggactaaattttccaatgaaaagaaaaagccaggtgtgatggtatacatcagtagactcagctacatgggaggctgaggccagaggaccacttgagcccaggagttcaagtccagcatgggcaacttgagcccagaagttcaagtccaacctgggcttcctctgcaaaaggacatcccatcctggaaaaaaaaaaaagaagaagctgaaaggattctttttaaagctgcaactgtatgttcctcacaagagactcactttgcctttaaggacatgcatggtcacaaagtaaagggaaaagtaaatggaaaacaaaagagaataagactagctatacttgaacaaaacaggctttaagtcagaaactgtaaaaagagacacaaaaaggttgctatataatgatacagggttgattcattaagaggatggaacaattataatatatgtgcacccaacatggcagcacctaaatatataaagcaaatatttacagatctgaaaggaaacatagacatcagtacagtgatagtaggggatgtca

SEQ ID NO: 702617 - DNA, 1414 bp, Homo sapiens
aaggctgagattctttttgtgaagataatataatattgataccaaaacctgacaaagatagttccccacaccttcaaaaaaaaaaaatctttgccacattktttacatataaatactgatgcaaagaaatttaaggtattaatcctatggtatgtcagaagtataaaacacacaatgaccacatttagttggtaaaataaatatctaatgcaagccagaaaatcataaaaaaataaatgaattggactaacttcatccaaaaatacaacctttttaaagctaaaaaaaaattcaaaagaatttagtgctgactcaggaaaataagttgagcagaattttaataagcattggactatgaataaatagtccagaaattgtccaaaagatatgcagaaatttatatcataaaggtgatttctaagtacgggagaaaatgatactagatggatgatgtcagacaattgttcatctatcaaggggagatagaattagaagaactatagttacagccagaccacactatttatattgaaaatacctaaaagcttttcaagtaaatgagaaataaaacatgtaaaaagtaaaaataaacacattataggaaatcatttaatatttttatagttttggtgagggactttacattatttaaacagatgccataaaaatgtttacataagcttcatagtaaccacaaaattaaagtctatagtagacacacaaaagataaaaggaatcaaagtgcaactctgtaggaaatcatcaagtcacaaaaaagaacagaaagaagaaaggatctacaaaacatccagaaaacaattaacaaaataacaacagtaaatccttacctattacaattactttaaatgtaaatggactaaattttccaatgaaaagaaaaagccaggtgtgatggtatacatcagtagactcagctacatgggaggctgaggccagaggaccacttgagcccaggagttcaagtccagcatgggcaacttgagcccagaagttcaagtccaacctgggcttcctctgcaaaaggacatcccatcctggaaaaaaaaaaaagaagaagctgaaaggattctttttaaagctgcaactgtatgttcctcacaagagactcactttgcctttaaggacatgcatggtcacaaagtaaagggaaaagtaaatggaaaacaaaagagaataagactagctatacttgaacaaaacaggctttaagtcagaaactgtaaaaagagacacaaaaaggttgctatataatgatacagggttgattcattaagaggatggaacaattataatatatgtgcacccaacatggcagcacctaaatatataaagcaaatatttacagatctgaaaggaaacatagacatcagtacagtgatagtaggggatgtca

SEQ ID NO: 702618 - DNA, 1685 bp, Homo sapiens
gttttcaaataccaatgtgaccattgccagagtaaagtatgaacaatttcattggttttaatactgattaaaatagaagtaaggagtaaagacaaaaaaattaatacctccaaacatggaaaaaaaccctctgaaatagttgtaccaattatatttttcaatttcaaaactgcaattgatataaaatctgaaacaaattcatgttagcttttcctctgaaataatgctcaggctgaaggtcagcttattcatgtgtgcctgcaaataagaaaaggactgactgagatggaattaactgaggtatgattgatgaaaggcaagaaaaagagggatagtcagtgtacatgctcccttggaaggaaggaaggaaggagacggctgagttggaaagttccccatgtaggatccaggtcattttagtgcagaatatcctgctagttctgctaattgaacttggtgaagcagtagagaccctttggctgagtgaagagaaaggaaaggatattatactcagttcattatatctctgagacagtcacaaataaagctttaaagcacgacaagcacaatcctccacctcatgtttctcatgacccttcacacgtgaatattaagcatagttttcactatttcttcataagaaaaagatgaagtttctgaaagcctctgttcataaaatttataggaaaggggtttgtgaattgtaaagctccatatacaagtgttggataatacaactgatttgttatttcttcctattactatctgaacgattattttactttgcatttaatttgttgaagatagagaagctacctaagactgaagaaatgtaatgtgggggaaaaaatgggtaaagtgagagaaatctgagggaaaaagaaaatagtaaagtgaaaataaaggtaataggacagataatctcatctattcttattgtttaaagtgttgtttatatttactgttgtcctaacctttcccaaattaattcttgcccttcttgtcttctttgctccttccatatttagtgagttggactatggatcaggtactgtgctcagcatcagaaaatgggatgacaatgaacagagtaacaggactatatttctgaaaaaggatgaacttactggaaacaggattgcgtatgtatcgagactatgggagttagttaggagactactgggaaacttctagtaatctaagtcagagagagcctggattagagtggtagcagcccaaaggaagagaagcagacatctgagagctgtttaagagtagatcagataggaactggtaatgactcctgactaggagtgggatgagggagataaggggatgagggagataaagggaaaaagtatgaatgttaaactttctgccttgggatgctgacctcatttactgacacaggaaaagggagaagatgattaaagatgggggatgaagcaggggaacctgactagctgaatgttggatctgttcattttaaggtgcctgaaatatayccaaatggatataaatgtcaactcagttctgggctggagatatagatttggaatgcaccaacaatgcagatggtaatcctggcatgcgagtaggtgagatcatccagggagatggcctataatgagagcctacaacatgtcaggtagtttgctttaattttttttagtttattatattta

SEQ ID NO: 702619 - DNA, 590 bp, Homo sapiens
tgtatcactcgtatttctcggaccatatgagccatttctaatttacctttactgccttccaagggctcttccaatggtacgttcttgagacttgcctgaaacaaccttgaaaaacagcttcactccctcttatagccgtatttctaaaggatkaatacaatgcaaggccatgcatggaaatatttgccaagttagcaaaaaaaaaaaaaaaaaaaaggaagaaagaaagaaaaggattctcaaaacaagtaaccgcatttcttgctaaatgcttagcccagcaaagcccattctttgggggatgaaatgtggacttttagtgaaacctcgggacaagggtaagctctttcaatctacacgttgttctagacacctctcggggccctgctcttgggctgcgcacaaaggtcagcccaggcctcagagcagctctgggcaccagctcctgaacgccagctcctgagttcaagtccataaatcactccctggcagggcatcacggcccctccactaaagaagtaacccaaacatgggaagccagccatcatttgggtgttgactcaacagtcatgaactaaagtcaaactacc

SEQ ID NO: 702620 - DNA, 590 bp, Homo sapiens
tgtatcactcgtatttctcggaccatatgagccatttctaatttacctttactgccttccaagggctcttccaatggtacgttcttgagacttgcctgaaacaaccttgaaaaacagcttcactccctcttatagccgtatttctaaaggatgaatacaatgcaaggycatgcatggaaatatttgccaagttagcaaaaaaaaaaaaaaaaaaaaggaagaaagaaagaaaaggattctcaaaacaagtaaccgcatttcttgctaaatgcttagcccagcaaagcccattctttgggggatgaaatgtggacttttagtgaaacctcgggacaagggtaagctctttcaatctacacgttgttctagacacctctcggggccctgctcttgggctgcgcacaaaggtcagcccaggcctcagagcagctctgggcaccagctcctgaacgccagctcctgagttcaagtccataaatcactccctggcagggcatcacggcccctccactaaagaagtaacccaaacatgggaagccagccatcatttgggtgttgactcaacagtcatgaactaaagtcaaactacc

SEQ ID NO: 702621 - DNA, 590 bp, Homo sapiens
tgtatcactcgtatttctcggaccatatgagccatttctaatttacctttactgccttccaagggctcttccaatggtacgttcttgagacttgcctgaaacaaccttgaaaaacagcttcactccctcttatagccgtatttctaaaggatgaatacaatgcaaggccatgcatggaaatatttgccaagttagcaaaaaaaaaaaaaaaaaaaaggaagaaagmaagaaaaggattctcaaaacaagtaaccgcatttcttgctaaatgcttagcccagcaaagcccattctttgggggatgaaatgtggacttttagtgaaacctcgggacaagggtaagctctttcaatctacacgttgttctagacacctctcggggccctgctcttgggctgcgcacaaaggtcagcccaggcctcagagcagctctgggcaccagctcctgaacgccagctcctgagttcaagtccataaatcactccctggcagggcatcacggcccctccactaaagaagtaacccaaacatgggaagccagccatcatttgggtgttgactcaacagtcatgaactaaagtcaaactacc

SEQ ID NO: 702622 - DNA, 3588 bp, Homo sapiens
agctactcgggggctgaggcaggagaatggcgtgaatctgggaggtggagcttgcagtgagccgagattgcgccactgcactccagcctgggtgatagagcgagactcagtctcaaataaataaataaataaataaataaataaataaataaataaaaatacaaaaattagcagggcatggtggcctgtgcctgtaatcccagctacttgggaagctgaagaaacggttgcacctgggaggtggaggttgcagtgagttgagactgtgccacttcactccagcccgggcaatagagcaagacaacttcatctcaaaaaaaaaaaaaaaaaaaaaakttagaagagcttacataaaatgcaaattgcctgacttttaaaaatattgaataactggaaaatgatagactgttcaataaatggcactgggaccacaggtgtccacagggagatgaatgaattaaactctcaacctcatgccagacacagaaacaaactcaaaatggatgaaatacacaagaatggaaacaacttcgaatctgtcagaggaaaatgtagtggaggtctttatgttcctagagtagcaaagaatttttaaaacaagaaacaggaagcaaagatcataaaaaagattgggctatctagctaaatccatactgaaaacttctatgtcataaaaggtaccataaacaaaggtaaagacgaagaaaagacataatgaagacattttcaattcctaaaaccaaagatttaaaaagatatacaacctaccttgtcaccagagaaatgagaaataaaatcacaagaagatatcaattcacacccagcatgttgacaaaacaaaaaattctgacaataaccggcaaggttatcacaattaaagactcccagatgttattaaagagaatataaattggtatattggccattttaggaagtaatttgacccactgagaaaggctgaaaggtgtgtagaagtcaggaagtggttatatcctgggaagtggcaggtcaccatccaggctgcatttccatgctgttgtgcccacccacctgtccctgctgacaggaatctcggtagcctcttatgtgtatgcacacatatgtacacatgcatgtgcacgtaccaccaccccacgaagggatactattatcatcctcattcacacatggggaaactgaggcaccaagagggtaagcaaatcccccaggctcatgctgcaaccaagtaggagaattcactgaacccagccagtctggctgcagatcccctgtaaccgcagcaaaggtagagaggactctgcccccagggaatgtacagcaagcctgggagacagactcacagtcaggcccgtgcataacgcattccagggaagacaggagaagcctgccaactacgattcaaagtccagggagtttccttttaaaacacaaactaacaaggctcacgtacagatgtctttaacccttgagactgcaaaagctaatatgcatgtgtgtatttcttgcaagaagctttatagctttcatctaatttccaaagggatccataacctcagaaaggttaaaaacactaaacacaggaatcccagaatgtaatcaaagacattccctaggaaaaaaaaaaccctctctgatgagccaagtcagaccaaaagatcctgggaaaattatcctccagcccttaggggttacccaagcattcctcagaaggtgataaccaaaaatgctttgtagaatgtgcttttcgttgccagatctcaactaaccgacacatagaaaacatgaggaaaggtctcacattattcaccaacaatgtcacttgtaaaagagcagccaaattgactctttattatgcctggggcgggggtggggtggagtggagtgggaatcagccaaggtaatgcatagggtgacgcgtacctttttgtcaatcaggtgcacgcatttaatttagaaagcaccctgagttaagcatccaatttaaattagcctgtaattgtaaataatataaaaaaagaagaaaaacagctgagggatatgcacatatccgtagtttaacatatatatgatttacaaaggtataatcttgagtgtgtatatataaaatacaaattttatatataccactctattctgtttggacaaggccaatacctgttccctggtcccaactgcagggcctttattgtatcttggtatgtttaactgaattgaacatgaattgaacatccatggagatggacttggcacagcagagtatatgcttacaaatgtaacaagctctctctgttttctgaaaattagtatttctaaaaactggatttgttttgggttgataagaggaaaaacatgatataaaagccatttgttgatggtgttctccatttgatggatactgacaaatcaccatgattgctcagaaaatcgatgtcaacatccactctgtcagggtctaagaccaaagaagcatttacggcttcctccccgtccacagcacacacaccacacacaccccgggaacatcccatgccagtgcccgtcagcatgggaacagaaaagagctgtgttattttcctaaatcactctctctcggtctaacataaacaactcaccaaacaaaacttgaagacaaggcaggagaatcattttaaaatgggatccaagacctgagacgcaaagcaaaagcctgcctagatccttctattcatcctatcccttccaaggctgatccatgccaacataacctttgagtatcaaacatcagaaggtctgtgtgcctcagccctgtcaaggggcaggtttctcctttgccctctcctgcacctgggagcacacgcactaccagtagagaagggccatctggccccgtcccagccgggacccctgagggtcagatagaggtgctgagcccctatgtcaaagttattaaatgtttttgttttgttccatggtagctctttttttctcctttctgatgaatttacaaaagaaagcaagctgctgagaaggccctgaaagtgaggaggggcaagaaagatgactagttacggagagtgagggttgtttttgttttttgtttgtttgttttgccaaaaaagcctggatagagttatctcagttatctggcgccctcctgaatggaaccccggagtagctcccatgtggaagagtccctggattttccccaaccccaccgtctcccccttcagccatgtcgacagggaagataggaacttagaacccatttctcactggagaggaaaacttgtcatctggctttgtgaagaaggttctaccttatgctcatcgcacattatctttgctatgtgctaagatatcatatttaaaaggccaaaaaaagggacaaaagaaatgtaaaatacttgaatgagcttgtattataacattaatattattgggagtatctgctttccaggctgaagtgattcattcattattctagtcttgctgtagtcctttgtaatttgtagtaattatgtaattgtggtaattatgtttttttaattaaaaaagtataataataaaaaacttgaaaaggcaaaataaattttttaaaggaataaaatg

SEQ ID NO: 702623 - DNA, 1769 bp, Homo sapiens
atggattcattattaaagtcccgctaaaatgactcaaaaagaggaggcttagctgatgaacgcatttcacacaattcatctcctgacaacccaagagagtccacaagggtaacacggccatgaaagctggggctgggacagaagttctgatggatcccgaagaataaacaccaagatccacactcactggcatgaatttcagccactgaaacaggtcacccacaacattagcctgtgtgcacctttctcctgggcactcagactccaatatttgtttccttctccaccaagacaaagtaatttggggaagccaatggttaaaagtgtgtggtgatggccattttttttttttttttttttttttttgccatgagatgttactaatggtctcctacacaatgccttccagtgaaggttgtatttccatcaaagtcctggcttagtagctggaaatttggtaatttgagcaagcggaaatctttcatcaacaataacggaacacagcatagagcagtactgtggcattaactgcatatcactccccaccactgatggtgctgccgccccaaactctggtgggtccaagctacaaaacccagctttttaccgtgactggcaggggtgcaagttgcaccttcggacctggggctctgggcggcttgcttgagggcagtcactgtcgttcaccaragttggggtcttgttgacaatccgtgtacacgaaacgatggttctgcgctcccctggaaaccaaaccacagggagctgaaagactgtggctgcacccacgtggaaaggctgggcttgcatgcccatgaaagcatgtttgggtgctgctgatggtcacttggtcatttaaagtgactgctgtaaatgtcatgtgggtttttagagaggaagaactataatcgtagggaggagagtacaagacacagaaggcagagtggggccctggaagattctagaacaagataagaaagcagcaacacctcagatcagcggtgtccttggacagcttggggttcgttgatttgggcctttgatttccaaagattgctcatctttttatctgcttgtttgatgtttaaagtctatggagatctgatctcaattaaagacctgcacatcagccctcagcagagtctggctacctattacagaattcctgcttgctggggagaagtgggagatgaggagtctggtctggaagacacacagacctgcatcctctagacaggcattccagagccattctgacttgtctagccagccagctggtacttatggctgagcccccacctgctcttgggaagctttgctaattcattatcccaaatagatgtagcccttcttataggtgttcccagagcaccctaaacactgcacggccatgcctttgtcaccctaaatactgcacggccatgcctttgtcaggcaggctgagtgactgggagttaggagggtggcccttggagccaggctgtctgggttcaagtcttggctgtatcacaaatagcatcacagtggccatagtgtcaacagttggccaccatacttctgtgtctcagtttcctcaagcagcctggtttgcttaacttccctgtgcctcagggtgcctcagtgatgattaaaataaacaaatatatatggtgtccatagaacagaacctggcaggtggctaacacttcatcttagctctattgctgtcattattattatttgggaagagtgacaataaaagattaatagggagtcaagcacaactattt

SEQ ID NO: 702624 - DNA, 1769 bp, Homo sapiens
atggattcattattaaagtcccgctaaaatgactcaaaaagaggaggcttagctgatgaacgcatttcacacaattcatctcctgacaacccaagagagtccacaagggtaacacggccatgaaagctggggctgggacagaagttctgatggatcccgaagaataaacaccaagatccacactcactggcatgaatttcagccactgaaacaggtcacccacaacattagcctgtgtgcacctttctcctgggcactcagactccaatatttgtttccttctccaccaagacaaagtaatttggggaagccaatggttaaaagtgtgtggtgatggccattttttttttttttttttttttttttgccatgagatgttactaatggtctcctacacaatgccttccagtgaaggttgtatttccatcaaagtcctggcttagtagctggaaatttggtaatttgagcaagcggaaatctttcatcaacaataacggaacacagcatagagcagtactgtggcattaactgcatatcactccccaccactgatggtgctgccgccccaaactctggtgggtccaagctacaaaacccagctttttaccgtgactggcaggggtgcaagttgcaccttcggacctggggctctgggcggcttgcttgagggcagtcactgtcgttcaccaaagttggggtcttgttgacaatccgtgtacacgaaacgatggttctgcgctcccctggaaaccaaaccacagggagctgaragactgtggctgcacccacgtggaaaggctgggcttgcatgcccatgaaagcatgtttgggtgctgctgatggtcacttggtcatttaaagtgactgctgtaaatgtcatgtgggtttttagagaggaagaactataatcgtagggaggagagtacaagacacagaaggcagagtggggccctggaagattctagaacaagataagaaagcagcaacacctcagatcagcggtgtccttggacagcttggggttcgttgatttgggcctttgatttccaaagattgctcatctttttatctgcttgtttgatgtttaaagtctatggagatctgatctcaattaaagacctgcacatcagccctcagcagagtctggctacctattacagaattcctgcttgctggggagaagtgggagatgaggagtctggtctggaagacacacagacctgcatcctctagacaggcattccagagccattctgacttgtctagccagccagctggtacttatggctgagcccccacctgctcttgggaagctttgctaattcattatcccaaatagatgtagcccttcttataggtgttcccagagcaccctaaacactgcacggccatgcctttgtcaccctaaatactgcacggccatgcctttgtcaggcaggctgagtgactgggagttaggagggtggcccttggagccaggctgtctgggttcaagtcttggctgtatcacaaatagcatcacagtggccatagtgtcaacagttggccaccatacttctgtgtctcagtttcctcaagcagcctggtttgcttaacttccctgtgcctcagggtgcctcagtgatgattaaaataaacaaatatatatggtgtccatagaacagaacctggcaggtggctaacacttcatcttagctctattgctgtcattattattatttgggaagagtgacaataaaagattaatagggagtcaagcacaactattt

SEQ ID NO: 702625 - DNA, 673 bp, Homo sapiens
caacagcttctagatgccccatttggtccagtttcctccagccccaaagaagggggcttttcagggcaggtgcaaacaggaatgcatacagcgttgccctttcagttaattctggagaccatccaggggctgggacaggtccatgggttctgcccactctacttggtgttattttagaggctgtctgcatctggagacagggaatgcagggctgtccatgtctgaacagcagtgactctaaatgctgacgggtgacagccacaaaatctgcgaacgggggcattttcttccattgtttcagtcagcgcaagcaacttataatcttggcagaaactgggatggttttcaaatggaagctgmcataggacacaactgaagtcattaattctgaatattaggggagctttgatgattgtatttatgaggcttggtgttccaagagaacaagatgaccaagcctgaggaaactccaggcaataaactctctcaagtcttcccatgttatcctggtgatccttagttactttcctaggaatcttcatcacccatttctcagctttcaaagcagggcttcaagttcctggccagcatttgctggtcgcgccctgtgcctctggctaagtcagggtgtatgtgacaccaaaggaccaaggaacaatgtcccacggcataa

SEQ ID NO: 702626 - DNA, 673 bp, Homo sapiens
caacagcttctagatgccccatttggtccagtttcctccagccccaaagaagggggcttttcagggcaggtgcaaacaggaatgcatacagcgttgccctttcagttaattctggagaccatccaggggctgggacaggtccatgggttctgcccactctacttggtgttattttagaggctgtctgcatctggagacagggaatgcagggctgtccatgtctgaacagcagtgactctaaatgctgacgggtgacagccacaaaatctgcgaacgggggcattttcttccattgtttcagtcagcgcaagcaacttataatcttggcagaaactgggatggttttcaaatggaagctgcyataggacacaactgaagtcattaattctgaatattaggggagctttgatgattgtatttatgaggcttggtgttccaagagaacaagatgaccaagcctgaggaaactccaggcaataaactctctcaagtcttcccatgttatcctggtgatccttagttactttcctaggaatcttcatcacccatttctcagctttcaaagcagggcttcaagttcctggccagcatttgctggtcgcgccctgtgcctctggctaagtcagggtgtatgtgacaccaaaggaccaaggaacaatgtcccacggcataa

SEQ ID NO: 702627 - DNA, 673 bp, Homo sapiens
caacagcttctagatgccccatttggtccagtttcctccagccccaaagaagggggcttttcagggcaggtgcaaacaggaatgcatacagcgttgccctttcagttaattctggagaccatccaggggctgggacaggtccatgggttctgcccactctacttggtgttattttagaggctgtctgcatctggagacagggaatgcagggctgtccatgtctgaacagcagtgactctaaatgctgacgggtgacagccacaaaatctgcgaacgggggcattttcttccattgtttcagtcagcgcaagcaacttataatcttggcagaaactgggatggttttcaaatggaagctgccataggacacaactgaagtcattaattctgaatattaggggagctttgatgattgtatttatgaggcttggtgttccaagagaacaagatgaccaagcctgaggaaactccaggcaataaactctctcaagtcttcccatgttatcctggtgatccttagttactttcctaggaatcttcatcacccatttctcagctttcaaagcagggcttcaagttcytggccagcatttgctggtcgcgccctgtgcctctggctaagtcagggtgtatgtgacaccaaaggaccaaggaacaatgtcccacggcataa

SEQ ID NO: 702628 - DNA, 609 bp, Homo sapiens
tctttttaaaaaaggacaatgatggggctccccaatactttcaaatgagtcctcatctgagtgggctggtgttatctgctacaatttagagcatcacatgttgctctacgagtcagctcaaagaggatgggtcaggctgttagactaaaagctgcagatctgaggctgctattccagagatgcccgggcccaccttcacacagctacgcacacctgaacttgcgacagcagaaggccraatgcagatttcaaaggctcttcccatcacagggaagaaacataagacctggcatcagaacttcattcttctgcaaaacacttttgaggctgtctaaaaatcaggcccagtttcctgagttcttcttcaagctccctcactccacacccatgaagtcatgcggtctgtcttcttcaagtgttggcagccaggcaatagctgcttattttctgtgagtcaactgctctggaagtgaggtcagctcccgccctggcctcttgtcagctgcaggtgcttagaggtgtcctgtaaccttattccctctcatcttctgcacagcttgttttgcgtattaaatgagacgatgtatgtagagctaacttgtgtcttgt

SEQ ID NO: 702629 - DNA, 982 bp, Homo sapiens
ctcttggaaagaaaatgggacctgtgcttattatcatctttcctaagttgcaaactattctcaaaatgttccccaacatcctagccaaggattaagagccaattcaaaataaaccaagagaagcaatacagggatcatccacattggaaagccagagagcagccgcaccagcacactgggatgcccctgtaaagctccttggtctcctcagctcgtcctgggtccctccacacatggcgccaggggcaggatgccagcacagcctcctcgctacaaatggggttgcaggatgcacctggcctgctgcctgcttcaacagctgcagttggaacatctcagagagctgggtcattcaaggtcaaccccacaacttacaaagttgggccgcagctgagctgggcagaggactggagtgtcttgctgggttggtttgggaaagggatgccccccggcttccctaggtggtttttatattcttaggggaggacaggaggctgccatgcaaggacatgccatatgcctttaccgtcaaccacyacggctgtcagcaggcctttcttcttggggctcagccggtcgtgtgcctggcactgctggtcccggaagctgggcagacccttggggcagggcaggttctcgcagaccgcatgttctacactggcacccgggcagtgtgtgcctccaggcccagggctagaaggaagaagaaggtctgtgttaaccaggtggtgcgaccaaagggcaggagagctgtttccgtctctcttgccagggggaggagaggaagggggcagggcaaggtttccaaagccaccccctctctgctgttacagaccaaatgcccacaatcccagacccacactgccggcatgtttaagtgagccctctgaaaggtgcatgagagaactgcaaatcaaggtcatatggaaaaagaaggcagtgagtatgagtttggcaagatccacacattgcgtccttcatc

SEQ ID NO: 702630 - DNA, 2237 bp, Homo sapiens
  misc_feature 2, 3, 4, 5, 6, 7, 8, 9, 10, 11, 12, 13, 14, 15, 16, 17, 18,19, 20, 21, 22, 23, 24, 25, 26, 27, 28, 29, 30, 31, 32,33, 34, 35, 36, 37, 38, 39, 40, 41, 42, 43, 44, 45, 46,47, 48, 49, 50, 51, 52, 53, 54, 55, 56, 57, 58, 59, 60,61: n = A,T,C or G
  misc_feature 62, 63, 64, 65, 66, 67, 68, 69, 70, 71, 72, 73, 74, 75, 76,77, 78, 79, 80, 81, 82, 83, 84, 85, 86, 87, 88, 89, 90,91, 92, 93, 94, 95, 96, 97, 98, 99, 100, 101: n = A,T,C or G
gnnnnnnnnnnnnnnnnnnnnnnnnnnnnnnnnnnnnnnnnnnnnnnnnnnnnnnnnnnnnnnnnnnnnnnnnnnnnnnnnnnnnnnnnnnnnnnnnnnnntatatgtgtatatatgtatatatatgtgtatatatgtgtatatatatgtatagatatagccaagttgcaagagatgtatatatttttattttctgatagaacaaacaaattacctacatttacctacatatggttatatatttatatatgagcaaggggaaagggcgaataatatacatcagatgttaatgttggtcaccccaatggggattagaggcttgaagcttgtgcaaagggaagatgactagcgttggaggacttttccttagttcagctaaagatagggtccttgtcagatggcgrtgaaaggttaggctcacagataagttgaagggtgagaataatggaatttatttggcaaaaatgaaaaaaaggggaaacagggactcagcagagcgagagtccttccagtatatgcttcttgcctcacagattgaattctgggttctacacaggaagaggaggggtcaggctctgccccactacaaagggcacaaacttcccaaggctccaccccagtgtggggcttctctgggggaaaccttccccctgggctgtgtcactagaattgggttttatgtcttttatattattttacgtatttttatattattcgacttgctacaataaaccatttcgtaatttccaaaacatcgagaaatgaaaatgtcttataaagaaaaaagtgagttgatgtctgaaaaaatgcatataagaatatgtagatccaccagagtgaaacatacccacctgccaaaaataaatgaagatgtcaagagctgtggaaagaaagtaagaggaagtaaaagaaaggaagtaaaaggaagtaaatatggaatattttttaaaaagtccccatatatggcagcacatgtaaataaatgccccccagggatcaccaaccacagatgatggaattcagctgaactttgcctacaagtctgggtgcaggcaggacatccctctacagagatatggatggggtgctgtctgtggaaactcaaaagctactggatgaaactgcttactctcatctttaatacttagcctgtgcctgattagagctattcttagacattttaaatgtttaaaatctttttctagtaatcatgcttttgagctatagtaggaggctgccttacagttttcttatctataatatcattgtgtcatgaagtctgtgtatctttctggcctttcttcctagatcttttagagactgtgtccttggcctcatcactaggcaacactgcttcttaatttttttcatttccaggctgaaacattttatttgttgtttattaattatttcttaggtagagctgtttaaatgtttcctgagttcttatgatcctgtttctcttttgagctagcatcatcaaaacacagagccaaatgaaaggctcatttttgactgaccttggtcattgcatcctctacaattagcccattgagagtttaggaaatggaagacgtcccaaatgcctcttgtggcctggaaattcattacactatatgcaaatattagaagtggacgagcacgtgttttgtgttgcccattagctcagtcatgctctcctttggatgtgcaaactcaccaaaggtggggtttgggttccatcaattctgaatatccagtacccagagcaatatttaaaacagtgggcacaagagatgtagggttaatgcattaagtaccagtgtgtcttaaacactgtgtagcatttgggggaaataaagatgaataaaacaataagtaacctaaaaatgtccatagtctcataaggaaacaagacaacagttataattacaggagaaagtgctttaatagagatatactaaatggctaggggagcaaatactagtgaatgattaattttgcctaagggggccagggacacctttaaattcttgtaatcttgaatgcccaatatttaacatagaatcttggccttttgtctacatgctaaaccctctgcaaagctctcaatccctctttgaaagagggtagtattttatcataaatctttagaaccccttactaattggcataaacctccctgttaaataaatcagtctgtgtgtgccttatatgcagtatctagtttggcctacagaccttgaattaatcacttg

SEQ ID NO: 702631 - DNA, 656 bp, Homo sapiens
tcttggctagtaagtgtcttagccagttttggctgctataacaaaatatcatgacttggtgsttgcaacaacagaaatgtatttctcacagttctggaggctgagaagtccaagatcaatgctggtagatctgatgtctggtgagggtcagctccctggtttgcaaatagtcatcttttcatcatttccttacatggcagagagcagagagcatctttcttttgtgtcttcttttaaagacataatcccattcacaatggctccagccttattacctaatcacttcccaaaggtcccacctctcaaaaccatcacatgagatgttaggatttcaacatatgaatttggaggaaacacaagcattcagtccacaatggtaactttttatttttgtaatttttttagctttaacatccaaagatggcataactattctttacaatgcttttggaaagcaatttaacaatatcataattgactcagtcatttcagccgctcatgaaaatctattttaaagaataaacatcaatggaaaataacaatataaacaacaacaaaaataatcagaaggcaaaatatgtaacaatcaaatttggttttgatgttttagcagcctcctatggaaattttggagatggtatattatatattaccag

SEQ ID NO: 702632 - DNA, 656 bp, Homo sapiens
tcttggctagtaagtgtcttagccagttttggctgctataacaaaatatcatgacttggtgcttgcaacaacagaaatgtatttctcacagttctggaggctgagaagtccaagatcaatgctggtagatctgatgtctggtgagggtcagctccctggtttgcaaatagtcatcttttcatcatttccttacatggcagagagcagagagcatctttcttttgtgtcttcttttaaagacataatcccattcacaatggctccagccttattacctaatcacttcccaaaggtcccacctctcaaaaccatcacatgagatgttaggatttcaacatatgaatttggaggaaacacaagcattcagtccacaatggtaactttttatttttgtaatttttytagctttaacatccaaagatggcataactattctttacaatgcttttggaaagcaatttaacaatatcataattgactcagtcatttcagccgctcatgaaaatctattttaaagaataaacatcaatggaaaataacaatataaacaacaacaaaaataatcagaaggcaaaatatgtaacaatcaaatttggttttgatgttttagcagcctcctatggaaattttggagatggtatattatatattaccag

SEQ ID NO: 702633 - DNA, 656 bp, Homo sapiens
tcttggctagtaagtgtcttagccagttttggctgctataacaaaatatcatgacttggtgcttgcaacaacagaaatgtatttctcacagttctggaggctgagaagtccaagatcaatgctggtagatctgatgtctggtgagggtcagctccctggtttgcaaatagtcatcttttcatcatttccttacatggcagagagcagagagcatctttcttttgtgtcttcttttaaagacataatcccattcacaatggctccagccttattacctaatcacttcccaaaggtcccacctctcaaaaccatcacatgagatgttaggatttcaacatatgaatttggaggaaacacaagcattcagtccacaatggtaactttttatttttgtaatttttttrgctttaacatccaaagatggcataactattctttacaatgcttttggaaagcaatttaacaatatcataattgactcagtcatttcagccgctcatgaaaatctattttaaagaataaacatcaatggaaaataacaatataaacaacaacaaaaataatcagaaggcaaaatatgtaacaatcaaatttggttttgatgttttagcagcctcctatggaaattttggagatggtatattatatattaccag

SEQ ID NO: 702634 - DNA, 1054 bp, Homo sapiens
accatgcctggctaatttttttgtgtgtgtttttttttagtagagacggagtctcaccatgttgcccaggctggtctcaaactcctgagttcaggcaatctgccccctcggcctcccaaattgctgatattacaggcatgagccaccacgcccagcccatttcttgttttttaatatttaactcacgagtaaatataaataggattttctcagataaattatatcataacgtaacccttaaattaaccctttgcttattgaagtgtccttaagagaccctttatcctagaaacaagattggtgtttgtccagtctccttaggagctatagaaatcaattgagtggtgaagataggtgagaacagcaaagaattggcagcttaggtctgcagcattggctataggcctcactggctgaagcgatgaggaagcagtgacaggagatgggtagtggaagcatgcagtgtgtgcacagagaaagccggccaaatgctttggtgacagtgacaatgcacttttccagtgcaggcatggactccctagaggttggataggcaggctccatctcacccctatttcctcactgtgcaaaattccattgttagaatttttttaatgtgtgctttaaaatttttatttatttttaatgttaagaataaagatatcctgttttcactttaacctcttgaaatataaaatgactcatgttcattggcacaaaggttgagagttcagttcagggtcaaaactcttaggcacttggactttgctttgcyacatacttgcattgctctgctatcctgtgtggtattcacaagctcagtaacctgaagcagaccctgaactgactgctgggtggtgcaatgggaggaagtccagcttttccagcagtgtgctttgtgtcctaccactctccccaaagcacagataacttaatttttaacttaggaagcagtctaaataatgtatgctgttttattttctcccagggacgttggccaagccattgagtgtttatcttaatggagagatctgattatgtaaccatatattat

SEQ ID NO: 702635 - DNA, 785 bp, Homo sapiens
tacataaataccagatattataagggacgtacttaaaccaaaaattcagaaattcatatgtaaatgggcattttgagttttactgttatttttcctaaatctgacaaatctgcaccctaaagaaggctctcatttctccttatctagaggtctaataactgcgcttcctttttcctggatctatcttttcaaatccccactacatgctgcttttagattattcttctcagacatagctatgatcacgtcttaccttgtctcaagctttcttgttactatataaatacatacagatttgttagcctcgcattgatgaccatttacaaagcaccacagactctacaaattagtcagarctgggttgaaattctagtttccccatataccagctgggtaaaattagaaaactgattttctctctctctggttcccaatctcttcattgtaatatgagaataacaatgtagtagaatgttattttgaagagaaaaagcaactttggatctacccttaattggtcaatgacatctgagtaggcatagagaatgaacccattctagcattttttgactattcatctttactaaaggtctcggcttttgtgacactatttccccctctgattttcctctttgtccatttaaccctttatatgagtgcttccatgaagttgtgtcattggtcccttttcattatatatgctttttctagtgatcttctaagatcttaaatactgttaaactcctactatatgctaatagatttcaattatggatgctacagat

SEQ ID NO: 702636 - DNA, 2161 bp, Homo sapiens
tcaaaaatgtattatatttaaagtaccttattaccacattttaagagtttgaaggaaaatatagccttctggcattttcaccttatggcatgatgcttcttctcaatgtggggaaagattccctcgattaaaaaaaaaagtagggaaaagattttcggaacatctaggttttgtcatggaggttacctttaacttaaaaacagtgagtgaacttttatatattatagttcctttttttttttgagacagggtctcactctgttgcccagtctggggtgcagtggcatgatcttggctcactgcagcctccacctcccagcctcaagtgatcctcccacctcagccccgcaagtagctgggacttcaggcatgcaccaccacaactgcctaatttttatattttttgtagagactgggtctcaccacgtggcccaggctagtctcaaactcctgagctcaaatgatctgcccgactcatcctcccaagggaattacaggcatgagccactgcacccagcctcttacagttcttttcttttcttttttctttttttttttgagacagagtctcactctgtcacccaggctggagtgcagtggcatgatctcggctcaccacaacctccgcttcccaagttaaagcgattctcctgcctcagcctcccaagtagctgggactacaggcatgtgccaccgcgcctggctaattttttgtatttttagtagagacggggtttcaccatattagtcaggatggtctcgatctcctgacctcgtgatcctcccgccttggcctcccaaagtgctgggattacaggcgtgagctaccgtgcccggcgatagttccttattcatagaattaagtatgtatatgttaatttagaagtgtttttacatttaaaagtttagttggccttttagatatgcctgcttgcgaaaaggtacattctggcttactcttatgatggggaaaatttgtagggagtaggtttttatctttgtttatgtctggggcccatagcttttccagtgacttgggagtaagtaagcaaattttaggggataaaatgccaaacacatgctgtacacccagtgctacctttttcaggaagcttttcgagaaataaagttgtatttgtggctaataaaagagggggagagaaagtgaacaaggtgaagaattatgctgtcattcaaaatgaagaattttccattttcgtttaaatttatttaatgtatttaatttaatgtttttatttatttgctgttggtaaaaaaactttatactcttttctgggcacatatggttatgacaaaactttgaagagaaaatatgtatctctaagcaggtatggctacaaaaaaatttcttcttcgtctattataaaataaataacaatttttttctctatacacatttagccaaaaaagrggttttattattatgaaaatccctgaattgaagttgattcataacaatatctatttatttacttttcaaggtagaatattcattaatttcctttaatcaggagattagggagaaagtagggggtatttcgtgttttcgctattgcataaacagcaattactttgatgttactactgcaagttttgttattaatgaaatagtattggcattttccaactgtagtcagagagaaaattgtgcaacttttagtgacagtttccaaatatattggaaaatgggctttactgatggttaccccatttaccctgatatgactattacacattgttttcctgtcttaaaatatctcatatgcccatgaatatatacacctactatatacccacaaaaattaaaaattaataaaaaaataaaataggctttagattccatgggtttaggttcaattctggatttaatactcactatctgggagatttttggcaaaaaatttggaagtttggcaaaaaaaaaaaccaaaaacctgttctcactttacctatatcctcatttgtaaaaaatagaaaataatattaacaactcttagagaattaaatcagatcatatacatgaaatgtcagtgatcattattgtggctttgcagttgttgagtcttgaagccgaacctttagagtttctaatgcccactagtatatctgaagaaataaagagaaaagttttgtcatacta

SEQ ID NO: 702637 - DNA, 606 bp, Homo sapiens
agacacacagtctgtgctcacttccatttttcggtgctttttatgtcaagcctatgagtcaaaactggtatgtagcgagcctcttgggggccctggagggaacttgggtaaagccacagtaatggattatatgcaagcaggagcaccatggagaccaacctaccctggccaggtggtcgggcaagcaggcttttgtaggttccttgtgcccccatcaagtttcagcatcacttgagaggacagagcaaaagggtttcttccaactcttaccacctttgaagatctgaccaatatgcacttcctcttgcctccttttcttcctcttaactattaattcatccaataaatattaagtgcctactgkgtgccacacactacggctacagttatgaaccagataggtcagtttgaagttcctccctcctggggcttagcccagcagaggagacacttgaattgcttcataatttcaattttgagtaaggaaggaaaaaacttgtaaaagatgggcctcagccacacctgagaggtgggagggttttggcatcaggaaagctgccccaaggaagtgagactcataggatgcttagatttgtcagatgaaaa

SEQ ID NO: 702638 - DNA, 915 bp, Homo sapiens
atctcaaggggaaccgagaagatataatatttggatgacagaatcattaagaactggctttgcaccctggctacaccattacacacaggagatattagggtgcagtggtgcatgcctgtaatcccagcactttaggaggctgagacaggtgratcacctgaggtcaggagttcaagaccagcctgacaaacatggtgaaaccccatctctactaaatacaaaaaattagctgggtgtggtggcacatgcttctaatcccagctacttgggtggctgaggtaggaaaatcacttgaacttgggaggcggaggttccagtgagctgagagagtaccattgcactcccagcctgggcaacaagagtgaatctctgtctcaaaaaaaaccccaaaaaaacaaaaatcactgccccaccaactttttcacataggatgattaaggattccagagcccatgctacctctaagggctcctacccctgccacaccacacatatcttgacagggcctgttatggagaagaaaatgcccagtaaattaatatcacaatcattgccacatacccaccaaaagactcaaattaaaattttgacaaaattaagtgccaagaagaatgcgaagagttgggagttatcagacattgtaagactgtcagttggtgtgttaacattgagatgaaaccaataatacctggtaaaactgaagatatgtttgccctgtaacctatggtttcacctcttggtttatactgtacataaatacacactaattgtaaccaaatagaaatacaaacatattcacaataacatcatttgtaactgacaaaaatgaacacaacccacatgaccaccaacaatgaagggttacacactggtgtactgtatttttatttatttatattttttatatttatttta

SEQ ID NO: 702639 - DNA, 915 bp, Homo sapiens
atctcaaggggaaccgagaagatataatatttggatgacagaatcattaagaactggctttgcaccctggctacaccattacacacaggagatattagggtgcagtggtgcatgcctgtaatcccagcactttaggaggctgagacaggtggatcacctgaggtcaggagttcaagaccagcctgacaaacatggtgaaaccccatctctactaaatacaaaaaattagctgggtgtggtggcacatgcttctaatcccagctacttgggtggctgaggtaggaaaatcacttgaacttgggaggcggaggttccagtgagctgagagagtaccattgcactcccagcctgggcaacaagagtgaatctctgtctcaaaaaaaaccccaaaaaaacaaaaatcactgccccaccaactttttcacataggatgattaaggattccagagcccatgctacctctaagggytcctacccctgccacaccacacatatcttgacagggcctgttatggagaagaaaatgcccagtaaattaatatcacaatcattgccacatacccaccaaaagactcaaattaaaattttgacaaaattaagtgccaagaagaatgcgaagagttgggagttatcagacattgtaagactgtcagttggtgtgttaacattgagatgaaaccaataatacctggtaaaactgaagatatgtttgccctgtaacctatggtttcacctcttggtttatactgtacataaatacacactaattgtaaccaaatagaaatacaaacatattcacaataacatcatttgtaactgacaaaaatgaacacaacccacatgaccaccaacaatgaagggttacacactggtgtactgtatttttatttatttatattttttatatttatttta

SEQ ID NO: 702640 - DNA, 915 bp, Homo sapiens
atctcaaggggaaccgagaagatataatatttggatgacagaatcattaagaactggctttgcaccctggctacaccattacacacaggagatattagggtgcagtggtgcatgcctgtaatcccagcactttaggaggctgagacaggtggatcacctgaggtcaggagttcaagaccagcctgacaaacatggtgaaaccccatctctactaaatacaaaaaattagctgggtgtggtggcacatgcttctaatcccagctacttgggtggctgaggtaggaaaatcacttgaacttgggaggcggaggttccagtgagctgagagagtaccattgcactcccagcctgggcaacaagagtgaatctctgtctcaaaaaaaaccccaaaaaaacaaaaatcactgccccaccaactttttcacataggatgattaaggattccagagcccatgctacctctaagggctcctacccctgccacaccacacatatcttgacagggcctgttatggagaagaaaatgcccagtaaattaatatcacaatcattgccacatacccaccaaaagactcaaattaaaattttgacaaaattaagtgccaagaagaatgcgaagagttgggagttatcagacattgtaagactgtcagttggtgtgttaacattgagatgaaaccaataatacctggtaaaactgaagatatgtttgccctgtaacctatggtttcacctcttggtttatactgtacataaatacacactaattgtaaccaaatagaaatacaaacatattcacaataacatcatttgtaactgacaaaaatgaacacaacccacatgaccaccaacaatgaagggwtacacactggtgtactgtatttttatttatttatattttttatatttatttta

SEQ ID NO: 702641 - DNA, 650 bp, Homo sapiens
ttaggaagtgtgtgcttggaaatagcgatttgtgatatagcrctgtttaaggtttttgttttgttttgtttttaaaaatcatctggcagatttaaacccagttgcctcggtgttagccagatttaattctgcggttgttaagtaaatccatagggtctgatccatcatggtgactatggagggtgaaatataaactttcctgtaagatgcctgggagcagtcagcacatctgcttctcagatgaatactccgtgtagtgccaataaaattaggattttcaaggctcagtggcttctgatttagttagtctgtcgttaagagaaaagtggctatttaggaaaaattgtcaacagtttcctactcttgcatgctgcttttctgctgtggtcatctgattcaaacggggaattagaacaggcacattggctactcacacatggggagagaaggaggggaatccttgcttctttccctctatgctgggtgcctttgggcagcgccccccttttcttttttttgagacggagtcttgctctgtcgccaggctggagtgcagtggcgtgcactgcaacctccacctcccaggttgaagtgattctcctgcctcagccttccgagtagttgagactacaggcccccgccaccacgcc

SEQ ID NO: 702642 - DNA, 1664 bp, Homo sapiens
tatttatatcatatatgctacttcgtatttgttttaacttaccattgtaaactatgactttcctgactcttgtatggtattaagttagagaaaaagtgatcatagtttttgccatttactgttttgccattaacagtaatggcaaaaactgcaattacttttgcaccaacctaataaataggtgatgattaatgcataatattctatcctatgctttaagttgtccattattattgaatatttagcttgttttattctctttaataatgtcagtaatgtatcttttttcatgtttatgactatttgacatatttaaatttcaaaagtgaaaatacataagcaaaacatactaagagctttatgactatttattgccaaatgacttttcaaaaataatggtttaataccatttctacaaacacatttttaatccagttcatttgctgaatattatttactattctttattttctaattccaagtttatattattgtgttcatcctttaaattatttttataaaagcgatattttacctaaattaaaaagccagtgtgattacccagaattagatgacctcattgatgaatcaacaagtatcaaaaatggaaacatatcttctcattgaaagcatattcctctatttacatgcctttgagatttgccagctcttgtggcttggttttgtttttattcagacacggagagatttgttctgaactaaatcaataaatagcaactaaattaagttgctaactgcatgtactgcagtatgtccccatggaactgagacctgttttaattttagacatatacaacaatgtcaagttttctgcaattagctatgtgtcttgagacttaactacccttgtattgttcatacccagttggtatacacatgaaggaaaactgagaacaaattagaaagtacagcttcattggctgtttttcctttgaatgataaaatgagaatgctacacacagatttgcacttaataatctcaagaagcgacacattttcaacaaccttcagagactccaaattatagtagcattatcattggtttcttcattatagcgcagaggtattttaaataccaggcaaacctattctagtttttctattggaaaaggaacatcactaaactttcctaaagttacaatggtggtctgtgtgtgtgtgtgtgtgggtgtgtgtgtaaaagatactttaaaatttaagagaattaaaaatcctagaatgtatgcattagaaatacagaaaggcattaattgggccaccctttgtcctgattcaatttactaaattttcctctgaaacattcaaatttaaatccagatttatttgttagcayattttctttagtgaacctagcaatcaactaatcaatcaacaaaattaaaaatcaaataaaagcattagcattaatatcttcatccttaacgtcatcaaagaagttatgaacatagtaattaggcattagaaaaataacttttaaatgttggctttactacttaatgttgaaggcaagagacagacatcaagaaactatgtttccagtgctttaacttctttttctgaagaatgaaaatacagtcgctgtcaaattagaaaaactaatttaaaacactgtgcagtacctaatactaaatcaattctcatca

SEQ ID NO: 702643 - DNA, 613 bp, Homo sapiens
tttaaagactctttttacaaagtcctaaatgatgttccccaaattcctaccattttatgttccacacagtgaattctttttttcttttttttgttttttttttgagacgaatctcgctctgtcgcccaggctggagtgcagtggctctatctcggctcactgcaacctccgccttctgagctcaagcaattctctgcctcagtctcccaagtgggtgggattacaggcacccaccaacacacccggctaatttttttgtatttttagtagagacggggtttcaccatcttggccaggctggtcttgaactcctgacctcgtgatccaccagccaaagtgctgggattacaggcgtgagccaccttgcccggcccacacagtgaattcttgttgcactacaaagtttgggagtaaattaatagacagaaaagactgtagtgtcaacttttttattaatgaagtctctgmgtctaggatgcaaaatagatactagcaaaatttcaatagaaaaatgtttttcatgataaaaactatatttatccaattcaaaaaatgtcctcatcagaaattactttcttattttatcctgattgtatctcataatgccaactca

SEQ ID NO: 702644 - DNA, 601 bp, Homo sapiens
tcatgccatccaaaaagaacatgacttgttaagaaactgtgtgtttgcatgaaagagttcatctctttacaacttctcatgrtcatttaatttttttcttaaaaaataaaaaaactaaaaaattccttaattaaattaacttgcttaatttttatttttcacatttaccatctagttgcaaaatatacattttaaacattattccaatttttacctagaaattgcctcttcaataatttttgagtttgagattttacttcaagaatgatgactcatataaaattggttatttatattctaattgcagtaatatagcagccttgttagaatgagtcggcaaggtactagaacttacgcattcaatttttagcagacaataaaatataaattaaataaatggcaagccaaattcctgctcctgtcttggctcagtccttttgtgtagtcccagagcaagaaacagggtccaaaaccaaaagtaatttaaaagtagttagtgatttccaatgtaagctgaggctcaaacatcactaaatttaaccaatttccaactcagagaagtatttctctttttttcagaatcttctttgctcccttctgg

SEQ ID NO: 702645 - DNA, 525 bp, Homo sapiens
gatgccatacaagttttgggcttagaattcaaagggacctatagtttcttccttggtctaagtggagccttgagctaaaatataagtttgactatattgctggagatttcatggaaaggcactaagattacagggaaaggatagccctgcctgctagctctctcctccaagatsccacacatttgtgtaaagtcatcttggacattccagaccagaaaaattattagctgaacttctccaaatcaccccagttaatcccaagtgagcaattgaattgtccaagtaagcacaacttgaattcttcacccacttaattgggagataaaaggaacatgtatttatgtcactaaactttgaatgagtgcattatgaagcattcgtatctggaacaatagatattaaagcttcttttaagcaaagaggaagacgaccatgtctgtgatattattttagaatgtagggaaaaagccatgctttatcaccctaccacaaaactgtaatgaaaacaaaataattatctcttta

SEQ ID NO: 702646 - DNA, 525 bp, Homo sapiens
gatgccatacaagttttgggcttagaattcaaagggacctatagtttcttccttggtctaagtggagccttgagctaaaatataagtttgactatattgctggagatttcatggaaaggcactaagattacagggaaaggatagccctgcctgctagctctctcctccaagatcccacacatttgtgtaaagtcatcttggacattccagaccagaaaaattattagctgaacttctccaaatcaccccagttaatcccaagtgagcaattgaattgtccaagtaagcacaacttgaattcttcacccacttaattgggagataaaaggaacatgtatttatgtcactaaactttgaatgagtgcattatgmagcattcgtatctggaacaatagatattaaagcttcttttaagcaaagaggaagacgaccatgtctgtgatattattttagaatgtagggaaaaagccatgctttatcaccctaccacaaaactgtaatgaaaacaaaataattatctcttta

SEQ ID NO: 702647 - DNA, 525 bp, Homo sapiens
gatgccatacaagttttgggcttagaattcaaagggacctatagtttcttccttggtctaagtggagccttgagctaaaatataagtttgactatattgctggagatttcatggaaaggcactaagattacagggaaaggatagccctgcctgctagctctctcctccaagatcccacacatttgtgtaaagtcatcttggacattccagaccagaaaaattattagctgaacttctccaaatcaccccagttaatcccaagtgagcaattgaattgtccaagtaagcacaacttgaattcttcacccacttaattgggagataaaaggaacatgtatttatgtcactaaactttgaatgagtgcattatgaagcattcgtatctggaacaatagatattaaagcttcttttaagcaaagaggaagaygaccatgtctgtgatattattttagaatgtagggaaaaagccatgctttatcaccctaccacaaaactgtaatgaaaacaaaataattatctcttta

SEQ ID NO: 702648 - DNA, 1678 bp, Homo sapiens
taattgacttaaataaaacactttattttaataaaaaagtttaatgtcatggggctaactgtgctcatactttaaagtaaattaatttttataatatcattaaaatgttctcaagggagagagttctgtaaactgccattgatacccctacacctgttccacccacatcaaacaaaaatggaacaggattgggtggaattggtcaaatgcctagaagaggaagaactgaactgtcaagtagtcaggataatatgaaatcattcaatgtgagctctgaatggttgagaaagaggaaaaagtactgctctagtagttgggtaagggatttgggtttttagcctctttattatcaactaagtggttttggacaagacattcttaacctcgctgagtatcaaaagtgaagggattaggtaataaacaatagattatacagtcatcccttggtrtatgtacaggattggcgtcaggtcccttgcgtataacaaaatccttacatacccaaatgccacagttagccttgtggaactcgtgttataccaaagattgatcctctgtgtactcgggtttctcatcttgtaaatgctgtattttccatcggtgctttgttgaacagaatctacatagaagtgcacaactgcagtcctgttgtgctgttcaagggtcaactgtgtataaagtctgtgtggggaaagagaagatatcatgctagcttattatttatttatttttttaacaagacagttaatgtatattaagctcaagcaaagtctcaggtcctgtgtagtgagccatttccctttcctagagccaggcttactttgtgttcttcattactataaaatacaattctgccattatttatatatattaaataattttaatcggtcagaatggactaagcacttaggtatcactatctaacattttaactacttttaagaagttgttctccactcaggtggcattgagtcaatgcataacctaattgtaaaagagaagcacacctcatttctacataattctatgttgaagtgaaatggtatcagctagaaacacaaataccttataaaaactattcatcccatcttctaattactgtcaggaaataaataaaaacacttgatgttaacctcacgaaggcaaattaccttccctaccacctcccacatgtaagttctaagttagtttttaaactgacaaaaaaactttatggtgttttattccatggcaggttttaggccaaatctcaaacacacacacccaaacacacacacacacacacacacacacacacatacacacacacacacacatcatgctcatacacatacacacgtggaaagtgaaagggatttagttgacattctaaattctgggaaaaatcatcaaattgtttattctgaagtttatttaattgattatataataaatatacttgttacctcaatcacagaatgatttattattaaaacttcatagattttaactttctctcataataataactatggtaaattatttgcagggatccgtgataattcctcttatttcctttgttttgttttgttttgtttgtgagacggagtttcactctgtcgcccaggctggagtgcagtggcgcgatctctgctcactgcaagctccacctcccgggttcacgccattctcctgcctc

SEQ ID NO: 702649 - DNA, 1678 bp, Homo sapiens
taattgacttaaataaaacactttattttaataaaaaagtttaatgtcatggggctaactgtgctcatactttaaagtaaattaatttttataatatcattaaaatgttctcaagggagagagttctgtaaactgccattgatacccctacacctgttccacccacatcaaacaaaaatggaacaggattgggtggaattggtcaaatgcctagaagaggaagaactgaactgtcaagtagtcaggataatatgaaatcattcaatgtgagctctgaatggttgagaaagaggaaaaagtactgctctagtagttgggtaagggatttgggtttttagcctctttattatcaactaagtggttttggacaagacattcttaacctcgctgagtatcaaaagtgaagggattaggtaataaacaatagattatacagtcatcccttggtgtatgtacaggattggcgtcaggtcccttgcgtataacaaaatccttacatacccaaatgccacagttagccttgtggaactcgtgttataccaaagattgatcctctgtgtactcgggtttctcatcttgtaaatgctgtattttccatcggtgctttgttgaacagaatctacatagaagtgcacaactgcagtcctgttgtgctgttcaagggtcaactgtgtataaagtctgtgtggggaaagagaagatatcatgctagcttawtatttatttatttttttaacaagacagttaatgtatattaagctcaagcaaagtctcaggtcctgtgtagtgagccatttccctttcctagagccaggcttactttgtgttcttcattactataaaatacaattctgccattatttatatatattaaataattttaatcggtcagaatggactaagcacttaggtatcactatctaacattttaactacttttaagaagttgttctccactcaggtggcattgagtcaatgcataacctaattgtaaaagagaagcacacctcatttctacataattctatgttgaagtgaaatggtatcagctagaaacacaaataccttataaaaactattcatcccatcttctaattactgtcaggaaataaataaaaacacttgatgttaacctcacgaaggcaaattaccttccctaccacctcccacatgtaagttctaagttagtttttaaactgacaaaaaaactttatggtgttttattccatggcaggttttaggccaaatctcaaacacacacacccaaacacacacacacacacacacacacacacacatacacacacacacacacatcatgctcatacacatacacacgtggaaagtgaaagggatttagttgacattctaaattctgggaaaaatcatcaaattgtttattctgaagtttatttaattgattatataataaatatacttgttacctcaatcacagaatgatttattattaaaacttcatagattttaactttctctcataataataactatggtaaattatttgcagggatccgtgataattcctcttatttcctttgttttgttttgttttgtttgtgagacggagtttcactctgtcgcccaggctggagtgcagtggcgcgatctctgctcactgcaagctccacctcccgggttcacgccattctcctgcctc

SEQ ID NO: 702650 - DNA, 1678 bp, Homo sapiens
taattgacttaaataaaacactttattttaataaaaaagtttaatgtcatggggctaactgtgctcatactttaaagtaaattaatttttataatatcattaaaatgttctcaagggagagagttctgtaaactgccattgatacccctacacctgttccacccacatcaaacaaaaatggaacaggattgggtggaattggtcaaatgcctagaagaggaagaactgaactgtcaagtagtcaggataatatgaaatcattcaatgtgagctctgaatggttgagaaagaggaaaaagtactgctctagtagttgggtaagggatttgggtttttagcctctttattatcaactaagtggttttggacaagacattcttaacctcgctgagtatcaaaagtgaagggattaggtaataaacaatagattatacagtcatcccttggtgtatgtacaggattggcgtcaggtcccttgcgtataacaaaatccttacatacccaaatgccacagttagccttgtggaactcgtgttataccaaagattgatcctctgtgtactcgggtttctcatcttgtaaatgctgtattttccatcggtgctttgttgaacagaatctacatagaagtgcacaactgcagtcctgttgtgctgttcaagggtcaactgtgtataaagtctgtgtggggaaagagaagatatcatgctagcttattatttatttatttttttaacaagacagttaatgtatattaagcycaagcaaagtctcaggtcctgtgtagtgagccatttccctttcctagagccaggcttactttgtgttcttcattactataaaatacaattctgccattatttatatatattaaataattttaatcggtcagaatggactaagcacttaggtatcactatctaacattttaactacttttaagaagttgttctccactcaggtggcattgagtcaatgcataacctaattgtaaaagagaagcacacctcatttctacataattctatgttgaagtgaaatggtatcagctagaaacacaaataccttataaaaactattcatcccatcttctaattactgtcaggaaataaataaaaacacttgatgttaacctcacgaaggcaaattaccttccctaccacctcccacatgtaagttctaagttagtttttaaactgacaaaaaaactttatggtgttttattccatggcaggttttaggccaaatctcaaacacacacacccaaacacacacacacacacacacacacacacacatacacacacacacacacatcatgctcatacacatacacacgtggaaagtgaaagggatttagttgacattctaaattctgggaaaaatcatcaaattgtttattctgaagtttatttaattgattatataataaatatacttgttacctcaatcacagaatgatttattattaaaacttcatagattttaactttctctcataataataactatggtaaattatttgcagggatccgtgataattcctcttatttcctttgttttgttttgttttgtttgtgagacggagtttcactctgtcgcccaggctggagtgcagtggcgcgatctctgctcactgcaagctccacctcccgggttcacgccattctcctgcctc

SEQ ID NO: 702651 - DNA, 828 bp, Homo sapiens
aattctattttacaaatagcttcgccaataggcctaaaatatttgctgagtatacaaatggtagtagttagttctaagctctttctttttatgatttaattaattttaggtagaaatcctctccttgctctgtatgagtaactctcatagcccattttgtttaaaakagagacacaacagacataattgcttgtactgatattatatcttttaatacagataggtaaaactttataagttgcttaactgatgctctcaagaaaagtgaaaaatttggggctcagcagggtggctcatgcctgtaatcctagcactttgaggggtggaggcaggaggatcacttgagcctaggagtttgagaccaggttgggcaacatagtgagacctcttctctaccaaaaaaaaaaaaaaaaaatttagtcaggcatggtcgggctcacttgtgctcccagctactcaggaggctgaggtaggaggatcgcttggggccaggaggtcaaggctgcagtgagctatgatcacaccactgcactccctcctgcaccacagtgagaccctgtatcaaaaaaaaaagtaagaaattattttttgtttctgataaaaaaataagtcatttaaaaaatttacctccttgcttcctctgcttatcatatagaaatggtaggtgttttcccttcctcactctcctgcctcctccattgatttctctttcctgtgagccagcctcttttactctgcgtggagctgaggtgcatctttgaaggcctgcaggtgtagtagtgatgctaatggtggcagtagattcgtcgggggtatccgttagattcc

SEQ ID NO: 702652 - DNA, 764 bp, Homo sapiens
tgtggaactgtaaggccaatatacctctttctttcgtaaattgcccagtgtcgggtatgtcttagcagcttgaaaatggactaatacagtggtcctggcattctggggagtatcttatcttttgaggctgtggccctctgttggctttctggaactggagcctctgcagtataccttgctagtcttttgtatttgaaatattactctgaatacatctgtgcttcctgaaggaaataggagaatttgcatgtattcattaagccattcacacatttattaaacaatatattgaatacctatgaggagtcaggccctattcctagacaccgatgagccaaacaaagttgtccttatgcagcatacgttctagggaagaaagacaataaaccaaaaaaagtaaatatataccttttctagttggaaacagtgctatggagaatgtaaggcagaactgtaaacatgagaaggggagggaaggtatatatttatctggtggtgaagaaaagactgacaagtaacatttgataagagacttcaaagaagtgatgtgaagtgatccttcagatatttaaagtaagagtrttctagaacagtcttagcaagtacaaaggttttgcagtgtgagtgtatgtttcatttatgtcaaggagaggctcagggtatctaaaacccagcaggtgtgacttggagttaaaacccttaattccactgagttttttttttttcccccaattttaaagatggaggtaatgatatctgctttt

SEQ ID NO: 702653 - DNA, 930 bp, Homo sapiens
ggcataagtgtaggattgtattgagtgatggaaatggttcttagtggggtggggagctggaaaggggatggagagggaagataacctgcccctggagtttggccatccctagtctccaatgtccagctgtctcttctcytcttgccattcagacacttcccttctcttctcttcttctctgctgtgctgctctgttcctctgccagtggagtttggggtgtttatgagtacacgttgaggggtgttgtgaaccaggatggttttggaaaaggcaacatttaggcaggaaaacaggagtgcatgttctcatttatggccacgggtccaggcttgacagtggagcccttgccagggaccccaccctgttcagcctagtatttccctgcctcctttctgtatcaattgtagttacatctaaagatgtattaagcttgaaacaaggttagtggcttataagaggaatctggaactaagattgtgagaattgcaggcagcaagaaaaagcatggctgccaaggatgctgttcagctttactaacttttcaggagacagttaagaaaatagcaagataactattagatatgcaaagccactgaagccacaacttctgataaatccttgatattaaagtatttttgaatagatttgagaggcaagtctatatttctttagaaatttggtttaaattactcattcgaacaattattttttagaaataggagagtcaaattaacataactgaattcttaactaggttaaaccaaggtgtaattgtacattactatcaacacgtaagtaaaaatcctaatttgttacataaggaagctttattaattctggtaacatctcaccatccatgattaacttaccatattaaagtgatcagacatacaattatgctaaacacataaaattctgggtaagttttc

SEQ ID NO: 702654 - DNA, 637 bp, Homo sapiens
ttcactctccttaagaacgtaatataacctagaaaattactacagatgtgtgtgtgtgtgygcgtgcgcgcacgcttacatatttgtgacagtaaaaaaaaaaaaaaagagaagactcactgcctttctagggggcacagaggacaataattctaataacacattcctagaagctctcccattcttgaaggtaaaatgcacttgagagccatgacccaccaaaacataaatgattaacaaaaataatgattgcaccattcaatcaaatcacaaagaattagccaggaaataaaaaagaagaaagatgaaggagtaaaaaatagaagaaaagacacaggactgagcttcaagtacaatctagacctgcaataaacaaagaaggttctagataccacattttatcaatgcaaatggtctgaataagtaaatgaactaaaaggcatcgttggaatgtgttttgtgagattgatttactgatagcagctttctacaaaaaataaaaataagtaggtaaatcttaaatcccaaagggaagtcactatacaagacttttgacttatttttatctcctttgagtcttacaagcatatatggtaggcattattataaccaaattttcagataaaggggctaaggt

SEQ ID NO: 702655 - DNA, 2413 bp, Homo sapiens
tattgtaataaccgtatgttcattttaaagataaaagtgtctttgattaaaaaacagtccaggctcggcgcggtggctcacgcctgtaatcgcagctctttgggaggccgaggcgggcagatcacgaggtcaggagatggagaccatcctggctaacacggtgaaaccccgtccctactaaaaatgcaaaaaaattagttgggcttggtggtgggcgcctgtagtcccagctactcgggaggctgaggcaggagaatggcgtgaacccgggaggcggagcttgcagtaagcggagatccggccactgcactctagcccagggacagaacgagactccgtctcaaaacaaaaaacaaaamaaaaaaaaacagtcctcgccaggcgcagtggctcacgcctgtaatcccagcacttttggaggccgaggtgggtggatcactcgaggtccagggttggagaccagcctgaccaacaaggtgaaaccctgtctctactaaaaattcaaatattagccgggagtggtggtgggcacctgtagttccagctactcaggagctgaggcaggagaatcacttgaacccgggaggtggagtaagccgagattgcaccactgcattccagcctgggaggcagagagagactccatcttaaaaaaaaaaaaaaagaaaaaagaaagagaaaaattagctgggcatggtagtgctcacctatagtcccagctactcaggcagctgaggcaggagaatcacttgaacctgggaagtggccaagatcgtgccactgcactccagcctgggcgacagagtgagactccatctcaaaaaaaaaaaaaaagtcaaattttttatccaatcagcatttcctagctgagacccagactcagctaccatatttatgtaacgtcaccttctcatataaggcatatgatctaaaggaacaaatgggtatatctcctaacagaaaatatcaacaccacactaccttgtgttccttgcagatttagtagttattcaccttctctactctgttctattcccctttgtatgtcgttttttacacactcatgacactactccttcgttaggtataaatcacgacagcagatttttttttcctaaaaatccctaagaggctaactggaatttaagttaaaaagtaattcacacagatgctctaaaaaaaaaaaaaaaaggccagtgacatttttaaaatttttaaatttaaccataaccttaccaaaagcaaatggaaatcaactaattgaccatcaaaaatgctgcagtaagactaaccactgaagtaaaatttcttagtttatataaactaaaacagcaagcaactagacaagtgttgaaaaagtaatggacagaatatttattcatacttcaccttacaaaaacaagcaaacaaacaaaacccttgacagacagatttacatggttatttaaaaatgtcaacccaccaggctttacagcacattttaaaagccataaaacaaaggttatttcatattaagactgcataaatatatagcaactttttaaaatttgattttcagttaggctttatttttctttcttcttatttttctttgtagagacaaggtcttgttatgttgcccaggttggtatcaaactgctggcctcaagcaatcctcccacctcccaaagtactgggattacaggtgtgagccaccatacctggcccttatttcacttttaagaaagagaaacaggcttctggtttcaatttagctaagagaaaaacacaaaacttcatcaaacatcaattctatacattttcaaaactgttattaaaatataaatttatgtcttgggtaaaaggttacagatttagaaaacaaaaggatttaatattatgtcaatatagtttgtgattcttatgatattgaattcaactgaattccaatgcattaagaagctgtattagtccattctcacactgttatataaagaaatacccgagactggacaatttaaaaaggaaagaggtttaatggcctcacagttctgcatgactgaggagggctcaggaaacttacaatcatggcagaaggggaagcaaacatgcccatcttcacaaggtgggaggagagagaaaaatgagtagcaaagaagcaacagccccttataaaaccatcatgtcttgggagaactcactatctccagtacagcatcagggaaactgcccccatgatacaattacctccacctggtctctccctggggattatggggattacaattcaacatgagatttgggtgaggacacaaagcctaaccacatcagaagctattcttccaattactgcatatacttgacaaattatagctttctcaatctgttttctggctggtaaaatatacttaaaatatttacacatgtataattc

SEQ ID NO: 702656 - DNA, 636 bp, Homo sapiens
gaggttgcggtgaacccagatcgagccactgtactccagcctgggtaacagagtgagactctgtctcgagaaaaagaaaaaaaaaaagtactataaattctttgattagaattagaaatccttaaattgtaatttgtatctgtacttattattatttcactttattatccagacctgagtttaggtttttaatttttttgcctaataaaaacaatatcaaaagtatttctttttgttcttaatagtgttttcaggtttctaattctcccttaggccttttaggccaatrtttgtctccaattttgtattctataaactggaccaagtaaatggactgtcattgactcattgagcgcataaagaatcttacagaaagattggaagggaaatacattgaagtacgaattgtgatttagttacgataggagaataagagtcaatgtgttttgtttttcaaattggctgtataatgtggttattatagcttatgcattggaaacataaaatacattaatttcactatagttcattaagcaacctcatctggaatcaaccagtatatacaaaaatattgttaaatattttattagtagagtcatttgttttcagaagtcatttcaggaagcttaaagccaa

SEQ ID NO: 702657 - DNA, 636 bp, Homo sapiens
gaggttgcggtgaacccagatcgagccactgtactccagcctgggtaacagagtgagactctgtctcgagaaaaagaaaaaaaaaaagtactataaattctttgattagaattagaaatccttaaattgtaatttgtatctgtacttattattatttcactttattatccagacctgagtttaggtttttaatttttttgcctaataaaaacaatatcaaaagtatttctttttgttcttaatagtgttttcaggtttctaattctcccttaggccttttaggccaatgtttgtctccaattttgtattctataaactggaccaagtaaatggactgtcattgactcattgagcgcataaagaatcttacagaaagattggaagggaaatacattgaagtacgaattgtgatttagttaygataggagaataagagtcaatgtgttttgtttttcaaattggctgtataatgtggttattatagcttatgcattggaaacataaaatacattaatttcactatagttcattaagcaacctcatctggaatcaaccagtatatacaaaaatattgttaaatattttattagtagagtcatttgttttcagaagtcatttcaggaagcttaaagccaa

SEQ ID NO: 702658 - DNA, 636 bp, Homo sapiens
gaggttgcggtgaacccagatcgagccactgtactccagcctgggtaacagagtgagactctgtctcgagaaaaagaaaaaaaaaaagtactataaattctttgattagaattagaaatccttaaattgtaatttgtatctgtacttattattatttcactttattatccagacctgagtttaggtttttaatttttttgcctaataaaaacaatatcaaaagtatttctttttgttcttaatagtgttttcaggtttctaattctcccttaggccttttaggccaatgtttgtctccaattttgtattctataaactggaccaagtaaatggactgtcattgactcattgagcgcataaagaatcttacagaaagattggaagggaaatacattgaagtacgaattgtgatttagttacgataggagaataagagtcaatgtrttttgtttttcaaattggctgtataatgtggttattatagcttatgcattggaaacataaaatacattaatttcactatagttcattaagcaacctcatctggaatcaaccagtatatacaaaaatattgttaaatattttattagtagagtcatttgttttcagaagtcatttcaggaagcttaaagccaa

SEQ ID NO: 702659 - DNA, 618 bp, Homo sapiens
aagttgcgaaagcctacattaataaagtaatgttgcttccataaatatttatgtattataatgcagaattgtcttttgtcttcatttactcgacataycctgaatccaattatagaataaaaaaagcttttaaactttgggtaattagagataaattaacaaaccttgagcctaagaagagagtttagtagtatttcgtaagacaacagaagggaaacagtcctcatttcccttttgtttcccacgctgtttcatattttgagtagtagttcagatctctgtgcttaaacatccattcttttcaaagatcgactccagtgcgtttcccttttaagttgcacaaggcaacaggaaacctgaactatttatcttaaaaggtagcatgtataaaaggtaagcatcttaaaaggtgcatatatatagatatatatgcacatgtgcatgcacacacacacacacacacacatacatacaatttcacttaaataatatgccctgctatctgggagaatttgaagaaactgaaatcaacttaaaaacttctacctatcaaccatagcacatttcataaaattatctaaggttttagagacaattttgttcctgctaagctgaaag

SEQ ID NO: 702660 - DNA, 618 bp, Homo sapiens
aagttgcgaaagcctacattaataaagtaatgttgcttccataaatatttatgtattataatgcagaattgtcttttgtcttcatttactcgacataccctgaatccaattatagaataaaaaaagcttttaaactttgggtaattagagataaattaacaaaccttgagcctaagaagagagtttagtagtatttcgtaagacaacagaagggaaacagtcctcatttcccttttgtttcccacgctgtttcatattttgagtagtagttcagatctctgtgcttaaacatccattcttttcaaagatcgactccagtgcrtttcccttttaagttgcacaaggcaacaggaaacctgaactatttatcttaaaaggtagcatgtataaaaggtaagcatcttaaaaggtgcatatatatagatatatatgcacatgtgcatgcacacacacacacacacacacatacatacaatttcacttaaataatatgccctgctatctgggagaatttgaagaaactgaaatcaacttaaaaacttctacctatcaaccatagcacatttcataaaattatctaaggttttagagacaattttgttcctgctaagctgaaag

SEQ ID NO: 702661 - DNA, 860 bp, Homo sapiens
tctctttaattttatgctagtaattgtatattaaagaacagtagcttaaaaagtgctaacatcagccaggtgtggtagcttgcacctataatcctaacactttgggaggctgaggtgggaggaccatttgagcccaggagttcaagaccagcctgggcaacatagtgagacccaatctctgtgaaagaaaaaaaagaaaattttaagtgctaatatttacctcgagaaaagggcacacctcttttgggtcggtccatgagtgtggcaggctgagtcaatttaatctgtagttggacttggttgcagctttagctagattcactcaccttggctgcaaatattttgaggaagggattaggactttccctcaaactgggcttgggatatgagcactggagagactctaaagatctctttgtgctttattgcccakccctcatgttttagctatgggagatttgtatcagctttaagccaggctgccaaccttttgggttgctggacaactctctttgctctccagttcaacttccagccttttgcttctcagaagactcctttctgcctttcttttctgtccccaggtattggagagcctctgcagtgcattcacagtggctcagatggatatcattcagctgtcttgtcctgcccaaggctgggaaaatttgaaatgatgtacgaaagatatccaatatatttaccactgcccttctgcttttaagccttcaaaactttgctacaatcatctcctttcctatatgcattgtccttgtggtttcttcttcttcttctcttttttttttttctttcaaacaaggtctcgctctgtcatccaggctggcatgcagtggtgcaat

SEQ ID NO: 702662 - DNA, 1095 bp, Homo sapiens
attgcacctatcaacccgtcatctaagttttaagccccacgtgcattaggtatttgtcttaatgctctccctccccttgccctccacccccacccggtgtttgcttttcccctccctatgtccatgtgttctcactattcaactcccacttacgagtgagaacatgaggtgtttggttttctgttcctgtgttagtctgctgagaatgatggcttccagcttcatgttcctgcaaaggacatgaactcattctttttatggctgcatagtattccatggtatatatgtgccacatttctttatccaggctgtcattgatgggcatttgggttggttccaagtctttgctattgtaaatactgctgcaataaacatacgtgtgcacgtgtctttatagtggggcttttggaattctaaagaattctctggatccttggtcaatgatgtcactgctgtggttttcgcattgctgacaacagtctttgctgggagcaacaggccttctgtgtgtcagcttggggctggctcactaagagactcccggcactgtgttgagtctagcatggagccagcgccccctggactcatcaatgagatatggaggggtgtttctaattattcttcagcctcgtggctagccaacacagttcatcttcatcttctcaaaaaaaaaaaaaaaatcatgttttgacttttcatgaactaatctgaattcttggcatatcttgtcttttgcagtggaagtagcttagccataccctttgctccaattcctcaactctgtcccttatttcatcttatttttttcttcttggctcatggatgatatggagcagagatgagaagcttatataataattggagaatcaggtctttggtgaccaaactctaaggcttctttctggatagtaggactttgctggcttcttgcagggcgtaaaggttaagcttgtgagctttggggtcagatttgccttggttcaaatccccgctccacaacatagctattgtgtggagcttggtaagctacttagctcctcttaagcctcagtttacacmgtgaaaaaaggggaaggcgtagccataatacctata

SEQ ID NO: 702663 - DNA, 589 bp, Homo sapiens
ctattaaccagttgatggtcagtggctacattcttgagggattttagacttatccatcatcacaaagagtatattttttacgggttctgagtgaattggtcctgtctgtatgttcctacccttgaaagttaattttgaatcttctagctcctcagtgtggttcataccccttcctgtgactggcccttcatctctctcgttctcccttgggccactggatgtcagtgagaaaagtctaacgatgactcctcctttgacgatgtgagtccctgtgggtatccagcaggtraagagagtagcagcggcaccactgttcagtcaatatttccttttgaaggtgtggaagccctggatcatcagcctgcctttgcttgacaaatgctgaagataatgaaagtgaaggtgtagagtggaacaaccaagacagtccaggcacgtctctcatcaccacctgtttggcgagctcatgtttattcctctcctttgaaggggtggcaggctgtgtgaaccgggcttgagctgccgaatacccaaatcctggagcaaagcgaggctggaagacagatgaagggaatgctttgaaacaata

SEQ ID NO: 702664 - DNA, 1521 bp, Homo sapiens
cagaaatggcctccccctttagagctsgccctctatacacaggtagtgtaattttgtattttttcttattctctgtggtagagattgttggttgactgccaacatctattggcccatttctctaaataacagaatgtttatctgggcacacacctgcatggaattagaatgatatttcccagtgtctcttaaagaaaaatgtggccactttattaaattcaggtaatggcatataagtaaatgatgatgtgtagattgcaggagccttctttaagagacagctggtgtacctctttttcctgtcccttcctttaatccacagcctggaacatggatgcttgcattttgaatcctgaggacaaggactacttgcctggatagtagggtgataggattatgtggaacagagttgccgtattagcctattagtctagtaggactcacttttagactttgtttatagagataaataaactttttgtttgtattattttttaaagcatagttattttgagttttgcttttggagacagatcttttattgcattcccctccttcccccaaaattcttaggttgaagcattaacccaaggtacttcagaatgtgactttacttggaaatagggtcattgcagatgtaattattaacagttaagatgaggtcattaaagtggtctctaatccaatatgactgctcttcttataaaaaggggaaattggggtacaaaggcagacacacgcacagggacacacacacacacacacaaacacacacacacagaatgctgtgtagatgaaggcatggatccaggtgattcctctataaacaaagaaacggcaaagatcgccagcaaatcacaagaagctaggaacgaggtttggagcagattctctctcacagctctgagaaggaatcaagcctgctgacatcttggcaagcctctagaactctgagacaataaatgtctgttatttattttctagccttagcaaaccaatatacaatcttagccaattaaaggctgactagaataaccttagcttaatctagggcaattttcacaccattcagacagcagaaactacatacacatatccatgtacccatctgaacttctgtcataatttctcagtctatcaattttagcagtgtggccaaatgtcagtttctctggaatgccaaaataagggaattttgttgtggctgtcctatgaaaatgaagctctgtcacagagaagtgtgtgagccaaatccaaatactgagtttattttactgtccaaatagaatattttcaccccagtgaagcaattgtaagcatctcatccaaagcatattcactatccttgagtattcttggttgcttattgaatgaataagtgaatgaggtggatttggctgacactaacctttgggattacctcacagcttgccagtggcaagcttagtaagtactgggccatagtgtttgaggataggtctctagagtcatatgtctctaagttcaaatgctagcctcctg

SEQ ID NO: 702665 - DNA, 1521 bp, Homo sapiens
cagaaatggcctccccctttagagctggccctctatacacaggtagtgtaattttgtattttttcttattctctgtggtagagattgttggttgactgccaacatctattggcccatttctctaaataacagaatgtttatctgggcacacacctgcayggaattagaatgatatttcccagtgtctcttaaagaaaaatgtggccactttattaaattcaggtaatggcatataagtaaatgatgatgtgtagattgcaggagccttctttaagagacagctggtgtacctctttttcctgtcccttcctttaatccacagcctggaacatggatgcttgcattttgaatcctgaggacaaggactacttgcctggatagtagggtgataggattatgtggaacagagttgccgtattagcctattagtctagtaggactcacttttagactttgtttatagagataaataaactttttgtttgtattattttttaaagcatagttattttgagttttgcttttggagacagatcttttattgcattcccctccttcccccaaaattcttaggttgaagcattaacccaaggtacttcagaatgtgactttacttggaaatagggtcattgcagatgtaattattaacagttaagatgaggtcattaaagtggtctctaatccaatatgactgctcttcttataaaaaggggaaattggggtacaaaggcagacacacgcacagggacacacacacacacacacaaacacacacacacagaatgctgtgtagatgaaggcatggatccaggtgattcctctataaacaaagaaacggcaaagatcgccagcaaatcacaagaagctaggaacgaggtttggagcagattctctctcacagctctgagaaggaatcaagcctgctgacatcttggcaagcctctagaactctgagacaataaatgtctgttatttattttctagccttagcaaaccaatatacaatcttagccaattaaaggctgactagaataaccttagcttaatctagggcaattttcacaccattcagacagcagaaactacatacacatatccatgtacccatctgaacttctgtcataatttctcagtctatcaattttagcagtgtggccaaatgtcagtttctctggaatgccaaaataagggaattttgttgtggctgtcctatgaaaatgaagctctgtcacagagaagtgtgtgagccaaatccaaatactgagtttattttactgtccaaatagaatattttcaccccagtgaagcaattgtaagcatctcatccaaagcatattcactatccttgagtattcttggttgcttattgaatgaataagtgaatgaggtggatttggctgacactaacctttgggattacctcacagcttgccagtggcaagcttagtaagtactgggccatagtgtttgaggataggtctctagagtcatatgtctctaagttcaaatgctagcctcctg

SEQ ID NO: 702666 - DNA, 2331 bp, Homo sapiens
tgcctcctgggcttaagtgatttttctgcctcagcttcccaagtagctgttggaattataggcacacacccccatgccctgctaattgctttttttttttttttttttagtcaagatggggtttcaccatgttggccaggctggtcttgaactcttgacctcaagtgatccacctgccttggcctcacaaagtgctgggattacaggcgtgaaccaccacacccggccctgttcttagtattttcatggaagaaagttggattggaggaatgtagaagaatttagaatctactcttggctataggtagataataagaactcaaaaacaatgcccagggctacaatctaataacaggtgtattatagtttttcttttagaaatatttcctctctacattgatcacatagaaatgtcagatttaaaaacttcttggggctaagaagccaaaaccaaggaagactttagattttcctccagtgtgaaggttcctgggcctgccaggaagtgataagagtttactcatgtcactgtaaggctgagaactcttgaaaccaggtattctattcacgcttttaaatacgatattttagtcaaggcattggtaatataacccatatttccaatggtatcctgttataaagagagaacagatttttactgaacttatgcaaataaccatattgccataagaaaactcacaaataacttctgaattttggagggatcaagtagggagaaaaagcacatgcttccacctttgttcacaaaaagtatactttaccaaattgctgtaaactatagatagcttaaaagaaaatttatttaaatctggaaaacaaaaagtttaagtaaaaaaccaagttttaaaataaaagtcataaaaacattatcttcatcagttattcaatttcatgaaattaatttttgtttcctttgatcttaattagcagttttgtgaatttatcagagttttggaaaacttttatttagtctattgatcttaaagttgttagaaacttgtcttaggaatacttgttagaatcttttccatgaatctgattagatgccactagagaaaaatcaaaaccatggatgatagagacagactagccatgtttaaaatctgatgaacattcattataatcagcaattgacaagtaaatgtactcatttttgagacatacaacctaataaccaaaattatgactgatgatatactagacttttaagaattctatattactctagaaaatttatatcaataatatacccataaatgtaactgaaaaaaatctagtatgacttattakttgacagtaataatgactttctataaatttaatacatcaaacaagcttaattatttaacatctctacaaaatgagagatacatcctttattttatttttcttcatttttcatacagggtgccaccacaggtaaccatcagagaacacactgctattttcaaataaacagaactgaacaaaagcattttagcatggtgtctatggtatcttactgtacatagaaaactggtgaacatcttcagacactaagagcaggaaataaaatgagtgaatgctatttgttgatacgtttatgaatcactcaatagtgttaatataggctatctttacctgaaagcaaaactacaattactgactctggcagcactggacaattctaaaatgcaggtctaatgaaaagtaggtacaaccagcaagcaagcaagggacagatgccatgtctgcttccaaagggcatgactgattgggaaccaggctctgcagattttaagagttgttatagtcatcttaacagcttaatattaagtttcccttaccttgtatgttggcaatcaacaaaagtgagaatttctgaaatgagctaaataggattaaaaagcagaacactgtccatataacagaattgctgcttcacaacttttgcccagttctcacctgttgtcctacaaaaacctctcatctgataaattttagtgaaaacctctgccaactgtaacagactttctcagcccagctctagatacttagtatttgaaacaaggcttgtgaagtggatgcatccacaggaaaatgcagtgtttctactggaggtaggtgtcaagtttcctttttatgttgtcaaaggaatctgctcccatataatcagcctggccctgttcccactgctccttccattcttctgaggatacaaaaggctgtgccatagctgggatctcgccaagggacagatgtgatatggctccagagacatcttccacatttacatatgagcaggtgtctttgacaaggccaaattgttga

SEQ ID NO: 702667 - DNA, 2750 bp, Homo sapiens
  misc_feature 2105, 2106, 2107, 2108, 2109, 2110, 2111, 2112, 2113, 2114,2115, 2116, 2117, 2118, 2119, 2120, 2121, 2122, 2123, 2124,2125, 2126, 2127, 2128, 2129, 2130, 2131, 2132, 2133, 2134,2135, 2136, 2137, 2138, 2139, 2140, 2141, 2142, 2143: n = A,T,C or G
  misc_feature 2144, 2145, 2146, 2147, 2148, 2149, 2150, 2151, 2152, 2153,2154, 2155, 2156, 2157, 2158, 2159, 2160, 2161, 2162, 2163,2164, 2165, 2166, 2167, 2168, 2169, 2170, 2171, 2172, 2173,2174, 2175, 2176, 2177, 2178, 2179, 2180, 2181, 2182: n = A,T,C or G
  misc_feature 2183, 2184, 2185, 2186, 2187, 2188, 2189, 2190, 2191, 2192,2193, 2194, 2195, 2196, 2197, 2198, 2199, 2200, 2201, 2202,2203, 2204: n = A,T,C or G
gcactgcagcctgggagacagagcgagactcagtctcaaaataaaagaaaagaaaagaaaagaaaaaaatgtgttcagtaagccttggtccccaccatcaaaactaccttgctcagaagcaagatgcaacagctgattatatatttaaactgaaggctgataaacgaagacttcggaattgaagcagtcaggccaccttgggtctggtcctgctgacaattcttctctctcaaaaagatcatcaatatttgctaggaccagagtatccgcatccataaatacacattttgaatactgtgtaagcaaccagcagtggagctttgtcagcgtgatacccaactctggcctcttcattaaggttagatgagcagaattgtgccgtctgagacatctaccatgatgacttcatcaaagactgtctctaaaacttttctcatggagtctcaaacctgaggggtggtgagtatgaccagtctcttggtggtcctgtgctgtttcagagatgaccccagggccaggacacctttggtgtaggcatcattcgtggtcagtgtcacaaaggcctgatctgtcatggtgctgctgggggtgcaggcagccggggcagccgcaggttgggagggagcaagggcagcacggagggagcaagggcagcgaggaggcacagcgggactatcctttaaaactctgcaggggttcaactggaaggtgccaaagttaactctagatcaaaaagaaactatagaattttgatcttagagaagtctgccaaggattcaaaagcttcaaaacacttgatgaaaacatgaccacaggccattgtgaaataatactcattcatttaaccagagtgatatcaaagacttaaaaagcaatacagaaaataacgtggatgtaaaatccttaaccctttcaaagctcaaaaaaatctaataaatataacaggaaattatcttgacaaaatgtaaaatctttcttttttaaggcttctccttactggaagctcatttatccgagcttgcaacaacctgaaagtcatacctgatgagaaggtacttgaattcaatcaaacacgggaaacatatgtgtccaaggttatatgtatacagcatattatacaaaaatgtggccgggtgtggtggctcgcacctgtaatcccagcattttgggaggctgaggaaggtggatcacctgaggtcaggagttcgagaccagcctgaccaacatggggtcaaccccatctttactgaaaatacaaaaattagctgggcgtggtggcgggcacctgtaattccagctactcaggaggctgaggcaggagaactgtttgaacctgggaggcagaggttgcagtgagtcgagatctcgccattgcacttcagcctgggtgacagggtgagactccgtctcaaaaaaaaaaaaaaaaagaaagaaagaaagaaaaatataaataagacctagtatcttgagcagaggaatacgtggcttttagtwaaaccatgagaaatttcttggttacatgaaacaattcagatacatggaaaaaagccaagagggccaggcgcagtggctcacgcctgtaatcccaacactttggcaggctaaggtgggtggatcatgaggtcaggagttcgagaccagcctggccaacatggtgaaaccccgtctctactaaaaatacaaaaattagccaggtgtggtggcgggcacctgtaatcccaggtactcgggaggttgaggcaggagaatcacttgaaactggaaggcagaggttgcatgagccgagatcgcgccactgcactccagtctaggtgacaaaagggaaactctgtctcaaaaaaaaaaaaaagaaagaaagaaagaaaaaagccaagagtacacaaaccaacttacagtgaagaaaaatattgcttttctaagactttaagacagaacatcagaacatttcagtgtcaggttataacagcagagttagaactggagaaaaaagttacaggagctaactaaagagttaaaagagagttattacccaagttgagcaaaaatatatagcttctgaaggggagaaagaagagctgatggcaatgatgcatgacctgcaaatnnnnnnnnnnnnnnnnnnnnnnnnnnnnnnnnnnnnnnnnnnnnnnnnnnnnnnnnnnnnnnnnnnnnnnnnnnnnnnnnnnnnnnnnnnnnnnnnnnnnctcacaaaatgctgggatcacaggtgtgagccagtgtgcccggcccatgagactcttaatgcttacctttccacttgacaggataacagtcgtttgattcattcaattggttgcttttaagcctagttcatagctgaaaaccattatgctaactgggattgtcataacactattagttttactttatattttaccttttaaaatttgtatctgttacctgttaaacttttgcagaagtacaactcctaacagaataattctggtcctgaactttgaggttatagcaaaaactacagaacagacaaaattggacttaacaataaactccaggtacacttagcctgacagccactcttttcaaacctccgttgttgctcaaatgtgccttcaaaggttttgacactgactcctagtcaccaatcacttcttcaacatgggaccagaccagcaacctggggcaggtccaccctggcaccaagggacaatcaaaacctacctacaggatgattgatcagtgatgcttttggagaaagatctttctcaaag

SEQ ID NO: 702668 - DNA, 2116 bp, Homo sapiens
attcaaacacaacaccaatgttatattgtgtgattaatacaaattcacattacatatagccttctatttggctgggttggtccaggaagacactttttgctcactatatgttttaaaattcatgtttatttcttattagtggaaagtgaggtggaggaagaaagtttacaggcaaaaaatgtaaaagtgcattgtagctaaaagstactggattattttagaccaaggatcagtaaactaaaccacggatcagtaaactatggccaacaggtcaaatacaatccactgtctgtttttgcagttttattacaagacggtcatgcccatttgtttacttagtgtctatggctgctttcacactacagtgggtgagttaagtagttaagttaggtagttgcaatagagactatatgacccacaaagtctaaaatatttgttatctggccgtttacagaaaaaatgtaaggaccactgctctagaccttttaggatacaacatggaaaatttctacattagtgccaagtcaaataatcttaattttgcctaatttgtggctttttaaagtgccctttatttgagttctattaaattaaggtttagcttagttgctgtgttcactgaggtttcccatgcacaaaccattacatgggaagaagctgtgaaggttagctttagattagcaaagactatttccatcagatttgcttgctatttttcttatattgctgtaaaattaccatttcggagtcactgtgagaggcctgacccaggctgggtgcaggccctagctcacagtgagaagcttggtcaagggagagaaggggctcaataatgtcatcgtaatcatcttcctctgtatccccctccccatcggcaaaagtacctctagtcaagaaatcggagcgcgtccgcgccattcgagctttctttttatgggccggtctggcaacctgcttgaccaaatgataaaacaaataacacaacaatgtttggggtttttgttctttttgagatgatgccaatgaaagacatcagagggctcatgaatttcttgaaatatccctccacccaaccatgccctttccactagcagaagtgacagggatgaccaaaaggaatctgtatacattactctggatgaaggactagaatggaagctaaatctacactgttctacatagccaaagaagtcatctttcactgccatagtaagtcaacaaagtctcttgcacaaattgccttctttttcttagcaactgggtttttaggcaccattccctgcctggagtacaccttcataattataacaatctccgctcatggcttctttctctaaaaacacttgggagtaaatgggtagatgaggtgctctacctacaagaataataatttccaaaataatgtacatctcttttgtatagaagatagataaacaaaaactcaaaacttacctctctttggcctggcccagctaacttcacaggtttccatgctggttcatcttctttatggagttgaggatttttactgtttaaggcttctttgctgacactttaaataaaacaatgaaattacatttcagttcttagcagatatcccatggcagccaggttaaagacttccagcaaattccataaatattttcagatcttagtcaattcccaagacaattaagtcatattttttctgcttagctaattagtaataataatcctgaacctacgcataagactgaattactaaaggccttgtcctgatgatcagtgggtatattccactatgaatatgacatatgtttaagaatagtagctgcaaaataaactcaagaaataaaatagatctgatgatggggaaaggaaaataccaaacccctgaatctttagaatactagtcttacaaggggcctttccatctaatcattataaaatacctgaaaaatagccatccagggatgaggatctcattatattttatactgagatggttcttattggttagaaaactccttctgaaatctctctttgtagttttcatccactgtctttgagttttaaaacttgacgttgaggctgggtgcagtggctcatgcctgtaaacccagcagtttgggaggcc

SEQ ID NO: 702669 - DNA, 2116 bp, Homo sapiens
attcaaacacaacaccaatgttatattgtgtgattaatacaaattcacattacatatagccttctatttggctgggttggtccaggaagacactttttgctcactatatgttttaaaattcatgtttatttcttattagtggaaagtgaggtggaggaagaaagtttacaggcaaaaaatgtaaaagtgcattgtagctaaaagctactggattattttagaccaaggatcagtaaactaaaccacggatcagtaaactatggccaacaggtcaaatacaatccactgtctgtttttgcagttttattacaagacggtcatgcccatttgtttacttagtgtctatggctgctttcacactacagtgggtgagttaagtagttaagttaggtagttgcaayagagactatatgacccacaaagtctaaaatatttgttatctggccgtttacagaaaaaatgtaaggaccactgctctagaccttttaggatacaacatggaaaatttctacattagtgccaagtcaaataatcttaattttgcctaatttgtggctttttaaagtgccctttatttgagttctattaaattaaggtttagcttagttgctgtgttcactgaggtttcccatgcacaaaccattacatgggaagaagctgtgaaggttagctttagattagcaaagactatttccatcagatttgcttgctatttttcttatattgctgtaaaattaccatttcggagtcactgtgagaggcctgacccaggctgggtgcaggccctagctcacagtgagaagcttggtcaagggagagaaggggctcaataatgtcatcgtaatcatcttcctctgtatccccctccccatcggcaaaagtacctctagtcaagaaatcggagcgcgtccgcgccattcgagctttctttttatgggccggtctggcaacctgcttgaccaaatgataaaacaaataacacaacaatgtttggggtttttgttctttttgagatgatgccaatgaaagacatcagagggctcatgaatttcttgaaatatccctccacccaaccatgccctttccactagcagaagtgacagggatgaccaaaaggaatctgtatacattactctggatgaaggactagaatggaagctaaatctacactgttctacatagccaaagaagtcatctttcactgccatagtaagtcaacaaagtctcttgcacaaattgccttctttttcttagcaactgggtttttaggcaccattccctgcctggagtacaccttcataattataacaatctccgctcatggcttctttctctaaaaacacttgggagtaaatgggtagatgaggtgctctacctacaagaataataatttccaaaataatgtacatctcttttgtatagaagatagataaacaaaaactcaaaacttacctctctttggcctggcccagctaacttcacaggtttccatgctggttcatcttctttatggagttgaggatttttactgtttaaggcttctttgctgacactttaaataaaacaatgaaattacatttcagttcttagcagatatcccatggcagccaggttaaagacttccagcaaattccataaatattttcagatcttagtcaattcccaagacaattaagtcatattttttctgcttagctaattagtaataataatcctgaacctacgcataagactgaattactaaaggccttgtcctgatgatcagtgggtatattccactatgaatatgacatatgtttaagaatagtagctgcaaaataaactcaagaaataaaatagatctgatgatggggaaaggaaaataccaaacccctgaatctttagaatactagtcttacaaggggcctttccatctaatcattataaaatacctgaaaaatagccatccagggatgaggatctcattatattttatactgagatggttcttattggttagaaaactccttctgaaatctctctttgtagttttcatccactgtctttgagttttaaaacttgacgttgaggctgggtgcagtggctcatgcctgtaaacccagcagtttgggaggcc

SEQ ID NO: 702670 - DNA, 3018 bp, Homo sapiens
tacaaaaaattagccgggcgttggggcaggtgcctgtaataccagctacttgggaggctgaggcaggagaatcgcttgaacctgggagatggaggttgcagtgagctgagatcatgccactgtgctccagcctgggcaacagtgcgagacttcgtctcaaaaaacaaaaaataaataaaataaaataaataaaaataaaaataaacaggaagactcatttaaggaaacaaaaaagaaaggaacacgaaataatattaggaacaaaaagacttacaaacaatgacaatccagtagcaacaaccacccctagtatccagatggtactctccaaataccatttctcaatgaaaggaatcaggggtcctttgcaaaatggatgatttctggaaggagtcatttcaaaaggaggacataaaaaccatctttaaggtgccactggcctaagatggaacaaatttgaacagcagaaagaattgatcagtggttattgattgaaacatcagtaataaaaatcctctagttcataaaggtattaagaaatcctcattggtaaccactggaagttaatagggcatcaactcattaatatgaaaattggtatgcaaaggggaagaataaagcatttatcctgccttcctatccgaactatatttttgggataatcaaatagatttgatgaagggaagtgctgtagggaagaatttctgtgaatatatgtagatatattacatctgtagatagaattaatatcacctgtttgcaattcccactaaataatagatcaaggcaacaattattaaaggcttctaaaactatcagaacttgctgatcagtcttagcaacactataacttggaaagccagacattacctgcctcacaatcctctgtaataagaagtatgcagcaccaactatgaagtattcttgctaaaaaaaaaaaaaaaaaattgagccggaatctaatcaccagtttagatgaacttaggtctaactagcatttcgtggaaactacagaagatagaggagcaagttaaataacatcacagggaagcagtgcctccaattcagaatgtggacatcatacaggatagaggcatatttatctgacgaagaaatatcataaaaaagagaggaaactgttagaaaataaagatttattaaccaaatataccacatggactttggatcctaatttggacaactrtaaaaagacatttttgagacaatcagggaaactttaatatagattggctactaaatagaattcaggaattattgttaattttgttagatatgataatggtatcgtggttctgttaaaaaaagttatcagttaaagatgcatatgaaatgatcattatttctgggatttccacagaaatactccagaagaaataatgacagaaagaaagaaaggaagataaaaagaaagagaaagaaaaagaaaagaaaagtgaggggaataagaataagtgtaaaaatataggcaaaattttattaattgttgaaacttagggttcattatattatttcttctacttgtgtgtgttgagaagttttattataaaaagttttaaaatgagggagcataaaataggtaagagaaaaattgaaagtctagaagaatacaatgaaaagtgatattaataaaattacaaaaaaattaaatggaaatttttctaataatataataaattgccagaattgactcaagaataaatagaaaacctaataaacagaacctataaccgtaaaaaaatcatgaaattggttgtcaaaaatctcctctgacactccaaaaaggtcaccaggctcatagtttaatgggctacttgtagcaaaccttcaaaagaaaaagtatagataatacagttaatccttgaagaacatgagtttgaactcatgttcacttgtatgtgacttttcttccacctctgccactcctgagacagcaagaccagcctctcttcatcctcctccttctcagcctactcaatgtgaagatgaaaaggaggaagacctttatgatgacccacttctacttaatgaatagtaaatatattttctctttcttatgatttttaaatacattttctttttcctagcttactttattataagaatacagtatgtaatacataaaacatacaaaatatgtgttaatttgtttatacaacagactgtttatgttgtgggtaaggcttctgatagtacgggtaaagtatgggtatggtagttatgggtaaggtataggtatggcagttatgggtaaggctgttagtacttaagttctggggaactcagaagttataggtaatttttcaactgtgcaggtgcttggtgctcctcacccccttattgttcaagggtcaactgtacctattttacacacactgtttcagagaaaaaagaaagagggaaacctacttatcaaattaaagtaatctggatgctagatctaaaagaatcaatcataggaacttggattatgccccaaactcatatcagctgttttatctgggaaggtgagaaggaagatagacatgggaagggtggttcaatgagatctcagcttgatttataatattttaatgcttttatttaaaaagacatgaagcaatatgacaaagacattaagaactgttaatttcatgtgacagaaacacttgttattttttactttagtaaatttttacattttttcaaaaaaatctacagcaaatcatagtttgctgttcaacttcaacagaagacaaaaccatctctttaaagcatattattaatatgtgccaacctaatgaacagctgtcagacttgctcagtggtaggaagcctagcatgtactatttttagatcaagaaattctgagtagttcaagttactacagctcttgtaaacatctccatcttttctgagcataaactgatgaaagattagagcattttattttgaaaacatttatttgctgtaactcttcagagttgaacagttattaatgaaccactttatgtttatgca

SEQ ID NO: 702671 - DNA, 2785 bp, Homo sapiens
  misc_feature 1691, 1692, 1693, 1694, 1695, 1696, 1697, 1698, 1699, 1700,1701, 1702, 1703, 1704, 1705, 1706, 1707, 1708, 1709, 1710,1711, 1712, 1713, 1714, 1715, 1716, 1717, 1718, 1719, 1720,1721, 1722, 1723, 1724, 1725, 1726, 1727, 1728, 1729: n = A,T,C or G
  misc_feature 1730, 1731, 1732, 1733, 1734, 1735, 1736, 1737, 1738, 1739,1740, 1741, 1742, 1743, 1744, 1745, 1746, 1747, 1748, 1749,1750, 1751, 1752, 1753, 1754, 1755, 1756, 1757, 1758, 1759,1760, 1761, 1762, 1763, 1764, 1765, 1766, 1767, 1768: n = A,T,C or G
  misc_feature 1769, 1770, 1771, 1772, 1773, 1774, 1775, 1776, 1777, 1778,1779, 1780, 1781, 1782, 1783, 1784, 1785, 1786, 1787, 1788,1789, 1790: n = A,T,C or G
gtgtctttcccattccggctatcttctcaaccatcagagttagctcattattagtctcttaggcttagttgctttgttaactttgatgatcatattattaggtatacatggagagtgtctgtttcagatacttattgctgcattatcaatcaccacaaaatgtagtgacttaaaaccacaggcttttattgtttctcatgagtctacagctgattggcccttctgatctgggttgagcatggctaatcttggctgggcttgctcatgcaactgtagttagctggcagatcagctggagacttgttggtctagggtaactttgccaaagacagcttgacttgcctccacgtggtctttggttctccagcaagctagcccaagcttgttcccatggtggtgaacacactcaaatagaggaacaggaaactcaaaggttctttttctttttttttctttttttttttttaagacggaatctcactctgtcacccaggcagtctcgactcactgcaacctccgcctcccaggttcaagtgattctcctgcctcagcctcctgagtatctgggactactggcacatgccaccacgcccaactaatttttggatttttagtagagacagggtttcaccatattgggcgggatggtctcaatctcttgaccttgtgatctgcttgccttggcctgccaaagcaaaaggttctttttctagcctctgcctgagtcaagtttgatactgtctattggtgaaaagcaaggcacaagtccacagtcagtggagagagtggagaaatcagattcagggaggtgtgaaccttgaggcttctggtgcaatcaatctagcacaacatccatattaaaacaatttaaaaactatccaaggccgggcacaatggctcatacctgtaatcccagcactttgcgaggccaaggcgagtggatcacctgaggtcaagagttcgagagcagcctgaccaacatggtgaaaccctgtctctactaaaaacaaaaattagctgggcatggtggcaggtgcctatagttccagctactcaggaggccaagacaggagaattgcttgaaccctggaggcagaggttgcagtgagctggtatcgtgccactgcactccagcctgggtgaaggattgagactctgtctcaaaaaacaaacaaacaaacaaaaacaccaactatccaagctggttggttgtcatatatatgcatatacataagaatgcatttgtagataaatagatgatagatagataaagaatgtctatgtgtgtgcaattttaatccaaaataaaaataataaccaatggagtagtaatcaatggagtagacattagttgtttttggtcgcccttctccagtgtccatttgtcccacttcttccaaaagtacctgatttatttagaggtgaatgactcctcctcttctcttcatgtctgtagttttggtggagtgacacatgaccacatttagtcaaagcacctagcaactgtcattgttcaagggatgagtgcatgtctcaggttaggctactaagagactcaattccaggtctttatttaaaataggctgccctaccaaacttcttgccaggacctgaacctaaaagtaaataacatgggagcagcttcagtcactttgccactgtggagccaagagatggagacaaactcaatnnnnnnnnnnnnnnnnnnnnnnnnnnnnnnnnnnnnnnnnnnnnnnnnnnnnnnnnnnnnnnnnnnnnnnnnnnnnnnnnnnnnnnnnnnnnnnnnnnnnctttttattcatccgtttgaggctgcataggcacaatctcaaattcccaggatatttttggtaaaagaatctgaaacttgaaaaccttttttcttaattcatttggaatcaaattatttgtagtatatcatgtgttgatattaggtttatgggataagcatttattttgtacatctcagattatgaattagctctacaatatttaaaatgttaaatacaatagcgaaatgttaacgtatcaccaaaagagctctccaatgttgtcattttgttgaattggtcaatttcaaagtaacttagaagaaaaattctacttcttatttgaccgaattgatgggttagtctggtttgcytcatttaagcatgtctaagctgcaccaaggactactgtgcccagtgcattgacaaattcccagacttcagacgcttctgaaaattagtggtttcttctgtaatgtcaagagattgggattacacttggaatgtagttatcactagtttagctttaccctctccagaaacacatgcaagccgccccaaatcacctgacaactactcaaaggcataaggagggtttaaccctcaggatctgcaggtttgcttaaaaaaaaaaaaaaatcttgtttcctgcaaggagccaaaataaaataaaaataaactcaacattattttacaaaatcaacattattgtttctcatttaagaagttgagaattccaacatttcagaccttagtaccaaagcaaattcatcctttgcaattaacgttacttaactctgctaatactttccttcctgagagcaattgccatgacttagcagcattcatttcatatcaactttctttcaaggtacttctctgcccattggcaggacgacattctaaataaactttgaaattatttctctgcctactaatctagaacttagccaacggccaaaaatgttaagaaaacaacattcacattgacgctggcactgaatctctaattggta

SEQ ID NO: 702672 - DNA, 999 bp, Homo sapiens
actttcctatgcctcgggtttttatctgcaaaatcagggtaatgatggtccttactaggaaacgttcgtcatgagaactagtgatataatccatgtcttgcacttacagcaagcagcgcctggcacggygggcatggggtaaatgtcagctcttattgaagagttcatagtcaagcagacttgcagtaacaagaagatcaagagagccgttattaagaaaactttattttcttaataaaatctgcacacacatcttcagaaggctttagagctgttgggtagattctttaatgagatgttcaagaatgaggctttgataccagaggcatgactgggggagaatagatgtgatggttgaaatgccttttatggaggctgggaatagctaactcccaagtttttgtgggatattcaaggcaatggctagagccaatttttttagaagaaatgggtggtttgaaagaaaggaaagagagggccaggtgtggtggcttacgccgtaatctcagcactttgggaggccaaggtgggagatcacttgaggtcaggagatcgagacaagcctggccaacacagtgaaacactgtctctactaaaaatacaaaaattagccaggcatggtggtgcacacctgcagtcccagctactcaggaggctgaggcacaagaatcgcttgaagctgggaagcagaggttgcagtgagcagagatcatgcccttgcactccagccttgggcgacagagtgagactctgtcttagaaaaaaagaaaagaaaagaaagagagaagaaaaggttgctaacacccagggaaagggctttggcaaggaaattgagtttttaaatcagagcttttgatcaacttttctgtctggtgtgtgatgcaaccctctccttagccttcgcataaggtcctcagtgaaatctccctgactctctttgctgctggagttagtttgctttctttgggaatgcaaagagtctgggtttgatgtttttgg

SEQ ID NO: 702673 - DNA, 999 bp, Homo sapiens
actttcctatgcctcgggtttttatctgcaaaatcagggtaatgatggtccttactaggaaacgttcgtcatgagaactagtgatataatccatgtcttgcacttacagcaagcagcgcctggcacggtgggcatggggtaaatgtcagctcttattgaagagttcatagtcaagcagacttgcagtaacaagaagatcaagagagccgttattaagaaaactttattttcttaataaaatctgcacacacatctycagaaggctttagagctgttgggtagattctttaatgagatgttcaagaatgaggctttgataccagaggcatgactgggggagaatagatgtgatggttgaaatgccttttatggaggctgggaatagctaactcccaagtttttgtgggatattcaaggcaatggctagagccaatttttttagaagaaatgggtggtttgaaagaaaggaaagagagggccaggtgtggtggcttacgccgtaatctcagcactttgggaggccaaggtgggagatcacttgaggtcaggagatcgagacaagcctggccaacacagtgaaacactgtctctactaaaaatacaaaaattagccaggcatggtggtgcacacctgcagtcccagctactcaggaggctgaggcacaagaatcgcttgaagctgggaagcagaggttgcagtgagcagagatcatgcccttgcactccagccttgggcgacagagtgagactctgtcttagaaaaaaagaaaagaaaagaaagagagaagaaaaggttgctaacacccagggaaagggctttggcaaggaaattgagtttttaaatcagagcttttgatcaacttttctgtctggtgtgtgatgcaaccctctccttagccttcgcataaggtcctcagtgaaatctccctgactctctttgctgctggagttagtttgctttctttgggaatgcaaagagtctgggtttgatgtttttgg

SEQ ID NO: 702674 - DNA, 999 bp, Homo sapiens
actttcctatgcctcgggtttttatctgcaaaatcagggtaatgatggtccttactaggaaacgttcgtcatgagaactagtgatataatccatgtcttgcacttacagcaagcagcgcctggcacggtgggcatggggtaaatgtcagctcttattgaagagttcatagtcaagcagacttgcagtaacaagaagatcaagagagccgttattaagaaaactttattttcttaataaaatctgcacacacatcttcagaaggctttagagctgttgggtagattctttaatgagatgttcaagaatgaggctttgataccagaggcatgactgggggagaatagatgtgatggttgaaatgccttttatggaggctgggaatagctaactcccaagtttttgtgggatattcaaggcaatggctagagccaatttttttagaagaaatgggtggtttgaaagaaaggaaagagagggccaggtgtggtggctyacgccgtaatctcagcactttgggaggccaaggtgggagatcacttgaggtcaggagatcgagacaagcctggccaacacagtgaaacactgtctctactaaaaatacaaaaattagccaggcatggtggtgcacacctgcagtcccagctactcaggaggctgaggcacaagaatcgcttgaagctgggaagcagaggttgcagtgagcagagatcatgcccttgcactccagccttgggcgacagagtgagactctgtcttagaaaaaaagaaaagaaaagaaagagagaagaaaaggttgctaacacccagggaaagggctttggcaaggaaattgagtttttaaatcagagcttttgatcaacttttctgtctggtgtgtgatgcaaccctctccttagccttcgcataaggtcctcagtgaaatctccctgactctctttgctgctggagttagtttgctttctttgggaatgcaaagagtctgggtttgatgtttttgg

SEQ ID NO: 702675 - DNA, 2365 bp, Homo sapiens
tttctgaagaaatgattggagagaaagtgggtaaacgtgtgggtttgccctttctcttccaatcttcccatataatgtttttctaattaagactaatattcttccttgcaatcaaaagggtgagagttacattctgcaccactcaacagccatgcttcagagaggggtcttgggtactggcagtgagcgatatcaacaatgcaacaacaacagtaaagcttacggagcatgactatgtgtactcaatatgagtacttatgtgcattagatgttttagtgcacaagagccttatatagggtgtattgccacctttattttacagagaaggacaaagaggtgaattaacttgtccaaggtcacagagcagctaagacaaaaatgaatgaagaaacgatttccaaataaatatagtcagtctttgattggtttttcgtcctgtcttccacattcattgtgaaaaatgcaaactgtacaaaactgcataaagtagaaagttaaagctccctgtaaccctgcccctaaggtgagagtttgaacttgcgctccgtggtttttcccccagcagagctagaatacttcctataggcaacctgaaaagctctcaggtatctgacttctacaaaggggctggtcctctcttaagccagtttagaaacagaagaatataaagccactttcttaccatttctgctatagaaagtgaacgccaaaccattctggctacaaagagagtcacacccatttggagtgaaagctttcatgagtttacatcactgcttagaaggacaggccaaaaaatacagcaggaggacaatgagagtttaccttcatccacgaacaataaaacgagaacaatgtagaagagaaatctggttgttcatttctcctcatttttatgtctcataagagaaatcatttgggttttctctgtaaaaaaacaaaacaaaaccaaaaaccctagttttagcagcaaaactaatcacaacaaaacgatattctggtgtcattttataaattctgaataaaagctggaggtattcaaatttctaaaccctgcagcacaaaaggcagctttccaaacaggactaggccacgctaactgttgaataggaaaactaattagcatcctgtgtgaactatcttgtctttttttaggaccggaaatcaaatgggaagggttccctcctgttccaagtgagttccagaagaattactcacgctccttaacctatgagtcagaaaggagtctaggagagtgtttccaaaacaggctgacaataagataaacaaagcaattgatctgtggcagtcaggagatcagggctgccactggtcaaagtgagggatcaggtctagagtgtaagatggtaaacctgggatcggctgagtctccctggagaagccgtgccagagctctgcagaccaaccagccccgagccatttcccgaaagtcaatgtccacagggaggtttggttcagaacctttattcaatttcattgatttagtgtatggaattgtagcatctttccccccgtataactcaagggacttgtctgccatcacactgcactgcctagcctggctctctaaatgctttggctatccatgcgtttggacgtcccacaacacaggatattaatcatttcaggactctgggcctgttcccagtgtccatgttcgccactgttgagctgcagccagaaaagcagttcccaaatgacagagacgttcctaaacttaaatacaaagtaatcaaaattcagtttaggagataacccagcatcaagcagatactctcctgggaaggtagaggataaacttcctcattgctccttctagggaagagtctgaagccagggctcagctctgtctgcggctgctacaggcctacaggcatctcctaacggaggatttaggggtgtgcacgaggcctcatgaggacactgccccgctagcctgatccttccttccaagagaaaaccgcagtgtggatgtgccgaggtcggccctgccatggaggaagagcggaagctgactggtgtttttctcgatccgccattagacctattcgtgtacagaggccaggctgaggtgagggtggggtggaggaggaacagtgtcctaaacaagaatcctgtctcatctgcttgccctgacttgcccctctgtccatcygtcacgcagtagtcagtcatctttctaaacgcagctctcagatcacctcctctcctgaaagcctttgagggaaccctccctgaatacacacctacagaaattccaaaattcttcataggccatccaaggcccttcactccttgactttctgcctaactttcagattcattaccagccactccctgagc

SEQ ID NO: 702676 - DNA, 2059 bp, Homo sapiens
  misc_feature 4, 5, 6, 7, 8, 9, 10, 11, 12, 13, 14, 15, 16, 17, 18, 19,20, 21, 22, 23, 24, 25, 26, 27, 28, 29, 30, 31, 32, 33,34, 35, 36, 37, 38, 39, 40, 41, 42, 43, 44, 45, 46, 47,48, 49, 50, 51, 52, 53, 54, 55, 56, 57, 58, 59, 60, 61,62, 63: n = A,T,C or G
  misc_feature 64, 65, 66, 67, 68, 69, 70, 71, 72, 73, 74, 75, 76, 77, 78,79, 80, 81, 82, 83, 84, 85, 86, 87, 88, 89, 90, 91, 92,93, 94, 95, 96, 97, 98, 99, 100, 101, 102, 103, 1164, 1165,1166, 1167, 1168, 1169, 1170, 1171, 1172, 1173, 1174, 1175: n = A,T,C or G
  misc_feature 1176, 1177, 1178, 1179, 1180, 1181, 1182, 1183, 1184, 1185,1186, 1187, 1188, 1189, 1190, 1191, 1192, 1193, 1194, 1195,1196, 1197, 1198, 1199, 1200, 1201, 1202, 1203, 1204, 1205,1206, 1207, 1208, 1209, 1210, 1211, 1212, 1213, 1214: n = A,T,C or G
  misc_feature 1215, 1216, 1217, 1218, 1219, 1220, 1221, 1222, 1223, 1224,1225, 1226, 1227, 1228, 1229, 1230, 1231, 1232, 1233, 1234,1235, 1236, 1237, 1238, 1239, 1240, 1241, 1242, 1243, 1244,1245, 1246, 1247, 1248, 1249, 1250, 1251, 1252, 1253: n = A,T,C or G
  misc_feature 1254, 1255, 1256, 1257, 1258, 1259, 1260, 1261, 1262, 1263: n = A,T,C or G
aatnnnnnnnnnnnnnnnnnnnnnnnnnnnnnnnnnnnnnnnnnnnnnnnnnnnnnnnnnnnnnnnnnnnnnnnnnnnnnnnnnnnnnnnnnnnnnnnnnnnnggtgaggggactacttaaagtaaggggttaattgcatagcttgcaggattttgcaatttttgccctgcagttttttttttaaaccatgttccacttcttttattgtgtatatctcagatgatctcaagaattctgaaagcttttctctgtaattttcagggtcatttagttctcccgtaggaaaacttggcaaaacccagcagagccacagttttaaagtacaaaattggctcatttcatcaagccattttcaatatggtttctaggagaaattctggtgtcactatttgtaagtaacatttctacgtttcaactcataagccattgcttttccgtaactacactaatgcaagttttcttaagctttatgggccaagttgatcactttattctttattttgtcagtaacagaatatgcagaatgaactgcatctgcagttcatttataataaaactgcaaggctgatttaatcgagtagctcaccaatgtcaaaaaatgatactttttcatatgagtgatccctcttaaaatggtgggtgctgacatttgccaaggctacatatttcttgtctatacttaaagagtatgtgtctccctcaggtttaacattaacactgttaatcttatgctgactaatttatgctacgtgcctgtttccgaatcaactaagagcaagacacacagatttttttcttattattcaaatttgttcaaaagataattgactttaaaataatgtagcttggatgtattctacttcatgactccatgcattctgttaaataggtataattgttcctatgttgaagttatttcagtttaagaagtatatattcatgggtgctatttttttatttgatttagttttaattgagctctggagaaaatctagccagtacctatttcactgatgtgaacccttgcakactgtaaatttattaagatcacagcattttaaaaattccttaaaattaagttggtcactcaaaaatatgtagctaaacagaaagaagtattaaaaaactaaatggagaacctcagaagtatagcagattccatnnnnnnnnnnnnnnnnnnnnnnnnnnnnnnnnnnnnnnnnnnnnnnnnnnnnnnnnnnnnnnnnnnnnnnnnnnnnnnnnnnnnnnnnnnnnnnnnnnnntagagcttttctcctatgttttctgccaagagttttcagctccagattttaaatctttactcccttttgagttgatttagtacatgacatgtggtaagggttcaattccattattttgcatgtcagtatccagttctcccaacaccatttattgaaaagactgccctaaccccattgtgtcttcttggaagctttgttgaaaattaattgacaaattttgtgggtttatgttttggctttctatgttattctattgatcaatgtgtctgtttttatgctacttccatgcttttttgactactatggtttggcaaggtattttgaaatcagatagtgtggtatctccaggtttgttcttctttcctacttggggttgttcatgaacttataaacagtctcctagggtatataatacagtttgtcatcctagttttacagtgtctataacatgatatttcctcaaaaattataagcatctaagtattaacaatttactgtctactacaaatttagcattttgatgaaaaattatgtttgattatgtaatttatgacaattcaccactgtgcaggttttgtccatttttcttttaaaatttttctacagcaagtatatcaacttaaaagattttatataacacaaaggaataaaatttcaagaaaatgttttgttttgttttttttactgaaccaaaaatttaattccagctttcaaagtgagacgttttgtatatttaagttcaggaggaatcatttttgacttgtgatatgttgtcagtggagtgaaaaataaaaac

SEQ ID NO: 702677 - DNA, 1253 bp, Homo sapiens
gggaacctaatgcagtaatatcgccttcttttccatttgtccctgatctagatgctatattttttatgcatcccgcctgctgttaagtattttacaattacagatttacaccctatcttttattctgtcccatctcaccctgctagcaaatttttgttttatttttttcatataaagcttccaggctacttgcattacaaggccaagtggaatgttttttattatctcaaattctcaaagggatgtggatggtattgtgtgattttagttattctgtccttatgcatatcagttaatcttccattatccttctttcagaaaaggattgtaaacacgatgccttcatttaatttttaaaaatctagcccaaaagagtcataaagaatctaaagtaaaactacgttttaaaaattccaagtttgctccttatggcacaaaatagccttcatctttcaaagtaaagtcacaagctattccaagttcaaacatgcagataatcctgggcatggatagctattgttattgacagctcctgagacatgcatcatttgttaagcctcttttgcttgaaataggactatcattctagaacaagtatcttgatcataagatctttcccctggaagatcaggccacatgctcaaagggtttctctgagactgtaaggaacttttcatactaaattactttttggacctcctaaaaggtagtgtgaggtcacctaaggatagtctcctctaaactcatagaagccagaagatggcacacaagagcaaagaggtgaggtgacagaaatagtgaaatataatttgtatgcttccaattttccaaagtggctcagtagtattaccagcacaatttggcaagctcataatgcagrcaatctttcaaggaaaaaaaaggcaggtcactctccaccgtgattggattttgtagatacatgccttgactttatccagaaaacatgactacactttcactacctacctcattcagaatctgctgggatgctggaatgacatggcgtattagtctgtttttatgctgctgataaagacatacctgaggctgggaagagaaagaggcttaatggacttacaattccacatggctggggaggcctcctaatcatggtggaaggcaaggaggagcaagtcacgtcttacatggatggcaaagagcttgtgtagggaaattcccatttttaaaaccatcagatctcgagagacttattcactatcgtgagaatagca

SEQ ID NO: 702678 - DNA, 1253 bp, Homo sapiens
gggaacctaatgcagtaatatcgccttcttttccatttgtccctgatctagatgctatattttttatgcatcccgcctgctgttaagtattttacaattacagatttacaccctatcttttattctgtcccatctcaccctgctagcaaatttttgttttatttttttcatataaagcttccaggctacttgcattacaaggccaagtggaatgttttttattatctcaaattctcaaagggatgtggatggtattgtgtgattttagttattctgtccttatgcatatcagttaatcttccattatccttctttcagaaaaggattgtaaacacgatgccttcatttaatttttaaaaatctagcccaaaagagtcataaagaatctaaagtaaaactacgttttaaaaattccaagtttgctccttatggcacaaaatagccttcatctttcaaagtaaagtcacaagctattccaagttcaaacatgcagataatcctgggcatggatagctattgttattgacagctcctgagacatgcatcatttgttaagcctcttttgcttgaaataggactatcattctagaacaagtatcttgatcataagatctttcccctggaagatcaggccacatgctcaaagggtttctctgagactgtaaggaacttttcatactaaattactttttggacctcctaaaaggtagtgtgaggtcacctaaggatagtctcctctaaactcatagaagccagaagatggcacacaagagcaaagaggtgaggtgacagaaatagtgaaatataatttgtatgcttccaattttccaaagtggctcagtagtattaccagcacaatttggcaagctcataatgcagacaatctttcaaggaaaaaaaaggcaggtcastctccaccgtgattggattttgtagatacatgccttgactttatccagaaaacatgactacactttcactacctacctcattcagaatctgctgggatgctggaatgacatggcgtattagtctgtttttatgctgctgataaagacatacctgaggctgggaagagaaagaggcttaatggacttacaattccacatggctggggaggcctcctaatcatggtggaaggcaaggaggagcaagtcacgtcttacatggatggcaaagagcttgtgtagggaaattcccatttttaaaaccatcagatctcgagagacttattcactatcgtgagaatagca

SEQ ID NO: 702679 - DNA, 1253 bp, Homo sapiens
gggaacctaatgcagtaatatcgccttcttttccatttgtccctgatctagatgctatattttttatgcatcccgcctgctgttaagtattttacaattacagatttacaccctatcttttattctgtcccatctcaccctgctagcaaatttttgttttatttttttcatataaagcttccaggctacttgcattacaaggccaagtggaatgttttttattatctcaaattctcaaagggatgtggatggtattgtgtgattttagttattctgtccttatgcatatcagttaatcttccattatccttctttcagaaaaggattgtaaacacgatgccttcatttaatttttaaaaatctagcccaaaagagtcataaagaatctaaagtaaaactacgttttaaaaattccaagtttgctccttatggcacaaaatagccttcatctttcaaagtaaagtcacaagctattccaagttcaaacatgcagataatcctgggcatggatagctattgttattgacagctcctgagacatgcatcatttgttaagcctcttttgcttgaaataggactatcattctagaacaagtatcttgatcataagatctttcccctggaagatcaggccacatgctcaaagggtttctctgagactgtaaggaacttttcatactaaattactttttggacctcctaaaaggtagtgtgaggtcacctaaggatagtctcctctaaactcatagaagccagaagatggcacacaagagcaaagaggtgaggtgacagaaatagtgaaatataatttgtatgcttccaattttccaaagtggctcagtagtattaccagcacaatttggcaagctcataatgcagacaatctttcaaggaaaaaaaaggcaggtcactctccaccgtgattggattttgtagatacatgycttgactttatccagaaaacatgactacactttcactacctacctcattcagaatctgctgggatgctggaatgacatggcgtattagtctgtttttatgctgctgataaagacatacctgaggctgggaagagaaagaggcttaatggacttacaattccacatggctggggaggcctcctaatcatggtggaaggcaaggaggagcaagtcacgtcttacatggatggcaaagagcttgtgtagggaaattcccatttttaaaaccatcagatctcgagagacttattcactatcgtgagaatagca

SEQ ID NO: 702680 - DNA, 1253 bp, Homo sapiens
gggaacctaatgcagtaatatcgccttcttttccatttgtccctgatctagatgctatattttttatgcatcccgcctgctgttaagtattttacaattacagatttacaccctatcttttattctgtcccatctcaccctgctagcaaatttttgttttatttttttcatataaagcttccaggctacttgcattacaaggccaagtggaatgttttttattatctcaaattctcaaagggatgtggatggtattgtgtgattttagttattctgtccttatgcatatcagttaatcttccattatccttctttcagaaaaggattgtaaacacgatgccttcatttaatttttaaaaatctagcccaaaagagtcataaagaatctaaagtaaaactacgttttaaaaattccaagtttgctccttatggcacaaaatagccttcatctttcaaagtaaagtcacaagctattccaagttcaaacatgcagataatcctgggcatggatagctattgttattgacagctcctgagacatgcatcatttgttaagcctcttttgcttgaaataggactatcattctagaacaagtatcttgatcataagatctttcccctggaagatcaggccacatgctcaaagggtttctctgagactgtaaggaacttttcatactaaattactttttggacctcctaaaaggtagtgtgaggtcacctaaggatagtctcctctaaactcatagaagccagaagatggcacacaagagcaaagaggtgaggtgacagaaatagtgaaatataatttgtatgcttccaattttccaaagtggctcagtagtattaccagcacaatttggcaagctcataatgcagacaatctttcaaggaaaaaaaaggcaggtcactctccaccgtgattggattttgtagatacatgccttgactttatccagaaaacatgactacrctttcactacctacctcattcagaatctgctgggatgctggaatgacatggcgtattagtctgtttttatgctgctgataaagacatacctgaggctgggaagagaaagaggcttaatggacttacaattccacatggctggggaggcctcctaatcatggtggaaggcaaggaggagcaagtcacgtcttacatggatggcaaagagcttgtgtagggaaattcccatttttaaaaccatcagatctcgagagacttattcactatcgtgagaatagca

SEQ ID NO: 702681 - DNA, 1417 bp, Homo sapiens
aaaagcgatgatggaatcactttactttttcatgcaagaaacaaatttctgaatgaaaaatgtagattacatattattaacaaaaatgtcaacaagaatcaaagtcaaattatacaatctcttagtaggaaaaaaaagataaaaagttattgaatccagcactatatccattggtagaatcttttaatattagaactaattattttaggtagatggaaggaatgattactatttctagagttgtaatgtagatactaataaatattgtagggttgaaatattgcagggttgcagggcagaattcttcttcagaaggcagaaagctggaaataaatatttcctactccaataacacaagacagctgaagaactaaaaatattttaacttttctggagcccctcagagggctacagtttcaaggcaaacgagtagtgtaaactctatggaaaagcaggacccactaaggggatgacgcatgcgcattggttcacctgagaagaacacagaaggaagggaagccaggtactgtaaccacataagaagaattcgttaacaatgttcgatgggttgctaaagaagcagtgtttagaggaatggcatgagaagttagaacctcttgagagatacacacaaaacgacgttcactcactcaggggctgctctccacagacgaactccgagtgggtgtaagaaagtgtaggccgggcgcggtggctcacgcctgcaatcccagcattttgggaggctgacgcgggcggatcacgaggtcaggagatcgcgaccatccggccaacgtggtgaaaccacgtctctactaaatatatgaaaattagccgggcgtggtgacgggcacctctagtcccagctactcaggaggctgaggcaggagaatggcgtgaacccgggaggcggagcttgcagtgagctgagatcgcgcctctgcactccagcctgggcaacagaccgagactccgtctcaaatttaggacagcctgtgagatcagagtcaccctctcatggtgtaagcctggaggaggacagcagggactcctgtgggaaaggtgacctgtgattcttctctaacgactagagggaccrtaagccctgttgcacagatgaaggcccattgcagctgggggaagtaaaaaagaaacaaaatagttactcctggacacaaaacagaaaactgtgttgtggtctccaatcactgtagatgggccaggaatttctgtcccatacaaagtccaacaaataagcaaggcatattgtagctaccattgagaacagatttcctgagattcattgagggcagattaactaagaaaaccctgataatgagatgccaaggattgggggtcttcctaagacaggacagtagaaaactccttgctttctaacaggccagcaagcatcaag

SEQ ID NO: 702682 - DNA, 1176 bp, Homo sapiens
aagatcaataaaacaaatgaaataagctatgcttgtataaggcttgtatctgaagttttttttgttttgttttgttttttttttgagacagagtctcgctctttcactcaggccagactgcagtggctctatctcggctcactgcaagctccgcctccagggttcacgccattctcctgcctcagcctcctgagtagctgggactacaggcgccagccagcgcgcccggctaatttattatatttttagtagagacggggtttcaccgtgttagccaagatggtctcgatctcctgacctcatgatccgcccgcctyggcctcccaaagtgctgagattacaggcgtgagccaccgcgcccggcctggtactatctatctgaagttttaggcatccattggaggtcttggaatacatcccccatggatcaaggggtactactatatcatatgtttatatatatgtgtatttatgtatatacacagccctacacatatgaggtatgtatatacataaatgtgtgcatatacatatatacacacatatatatgcatgtgtgtagagatatatatatacacatacatagttacatacacataaatatatacaaaacacacatacacatgcctagaatctacatagagaaatttagtagaaaaaggaggtataataaagttattacatttctttaattctccagatgttcttgaagagcaactggattagaaaccgtagatctagtgaatggtttattttttaggtaagcatattgagtccggaatagggaaataattttcataattattcatgcatttatatatttaaaatttatttttggcctattttggggagaaacagaaaacttctatcagggactgtaaacaccatgaagacaagcaaagacacagaaagggatgaaatatgacattgttgcaagctttggatatattttagagagggtctagactgtaactttatgatgtggggatatcagaaacaatatctgatgaagtgatgtaaaatgacactgagaattattttcagcgagccacttttaaagatgagcagacaacgaagattgtctttattatgtcagaaatcaattgaccatatatatgtgaatctggttctcaacactttattccattttattaattgaagtgtatttttttaccc

SEQ ID NO: 702683 - DNA, 1891 bp, Homo sapiens
ccagcatgtattcttcctgtaattgacccctctgctctttttctcttctaataccaaatctgccaaagtgaggttttgctctgtcacatctcagggtaacatcagtgaagcatacaaatgacattaagagacaaaatagggctggacgcagtggctcatgcccttaatcccagcactttgggaggctgaggcaggccgatcacttgaggctagggagttcaagcccaggctggctaatgtggcaaaaccccgcctcttctaaaaatacaaaattatctgggcatggtggcacatgcctgtagtctcagatacttgggaggctgaggcgcaagaattgcttgaacccaggaggcggaggtttcagtgagctgaaatcacgccactgcactccagcctgggcaacagagccagaccctgtcttaaaaaaatgagagagagagagagagacagacagacagagacagagacagagaaagaaagagaaagagaaagagaatatagagccaggcattgtggctcatgcctgtaagtcccagcactttgggaggctgaggttggtggatcacttggagctcaggagtttgataccagcctgggcaacatggcaaaaccctgtctccatgaaaaatacaaaaataggccgggcattggtggctcatggctgtagtcccagctatttaggaggctgaggtgagaggattcctcgagctcaggaatttgaggctgcaatgagctatggttatgccacttcactccaacctggccaacaaagggagattctatctgttaaaacgaacgagcaaaaatacaacaaaacctgattctaatactcattaccttggtgatctctgacaacttacttactgtatctaggctctactttatcatcctaaaaatggaacttttaatagaacctacctcaaagagctgttgtgatggctaaattaattgagacatgtagaatctctataatataatagtaagtgtgagatattattactacctggtaatttctatgaccatcttaaagattcattttcagtacagcaacaatatggtaatatttatcctcacatgacaatgtgctatgcaatgtttaatttattccaatgagatatattcattagtgtttctttggctgcacatgggattttattttatgatggtgaaccaagaaaatattgtagactctgatactttcaataaattcttaggattattaaaaagaatamaggaaatcaaaatacataagaaaacatatggagttaaggaaagcaaccatgtttaaaaggcaagataacgatatcattgcatacagatcagacctcacttgcatggtgaaggtctgtaactgtcaaaggacatctgtaatagccagcagatagatacagtatggtgtagtgcattttattacttttatttgctttgtacaagtagaaaaatcaactgatgcaatcaaacagtgaagtaaatgaaaatatagtgcattcgatatagtgcatattgataaaaattatggattgtcaactcagtgagagactacaaagttaattcatcatagaatggtccccctcctcaaagatgtaaaaacaactggaacacaaattttaaccacagtttattacttttttttagataaataacgggaaaatctgtgaaaaaggcagttattaagcaagaacaactagagagaaagaataaacctgagaatttctatggatgtcttctaaacttaagcataattgatatatctactcatgtaaacagaatgggctaactgaaacaaaatcaggtgctaatcagaatttaccgattattgagctacaaagtatgttcggttaacagacttctatgtggaaataaaaacattgataaggaaatagtaggatcc

SEQ ID NO: 702684 - DNA, 608 bp, Homo sapiens
caactcaggaggctgaggcaagaaaatcacttgaacccaggaggcggaggttgcagtgagccaagatcacaccattgcactccagcctgggcgatagagtgagactctgtctcaaaaaataaaataaaataaaataaaataaaaagagactgaggcagaagaatcacttgaacccaggaggaggaggttgcagtgagcygagatcatgctgctgccctccagcctgggcaacagagtgagactctatctcaaaaaacaacaacaacaacaacaacaacaacaacaaaagagaaatgtagtgaccagaaatactttcatactgctaagaagagactacaaaaaaaggaaatgatcttttcttaatgtatgcatactgtattacctagtgaatgcagaagtatgtataactgatataggtggagcagttgagttttttagtcacaaagaatattagtcaatcactaacttagttgtgatcttcaactagttatttaatgtctttgaatctattttctttttaacttttgaaccttttttttaacggtgaagtatcaaattactgtaaagatgagaaatgttattaagtgactggtacaggcgatacattt

SEQ ID NO: 702685 - DNA, 1691 bp, Homo sapiens
attcatcactttttctgtgacacttccccaattttagctctgtcctgcactgatacatacaacaccgaaatcctgatattcattattgttggttccaccctgatggtgtcccttttcacaatatctgcatcctatgtgttcattctctttaccatcctgaaaattaattccacttcaggaaagcagaaagctttctctacttgcgtctctcatctcttgggagtcaccatcttttatagcactctgatttttacttatttaaaaccaagaaagtcttattccttgggaagagatcaagtggcttctgttttttatactattgtgattcccrtgctgaatccactcatttatagtcttagaaacaaagaggtgaaaaatgctgtcatcagagtcatgcagagaagacaggactccaggtaattaatatagcaggaatgctgaacatttaaactcatcttttctttcattcctgttgggtattttcttagtctctctataaaaacaattgaatcttttaatttgtttgcatttctgttgtgctaccctttgcttcactaaacatgattttaaacatttcaaggcatatgtttttagaaatccaaatggtaattagaaatcataatatgtgtgtcatgttttcagtctacatatatgtgtttgaagcaactgatgtggaaaataagaaaatatggttgtcatttttaattatattattcaaattcttatgtatacttcaattgtagataaatttattatggaaagaactatttgggacacaatgataatagttttagatgttattccatttattatatggggaagaattatagcagagtgggtaggagtacctattttggaataaaacttcccaagaattagattctaaatatgctacatttttagctgtatagccagtaatacgttacctaaagcttaagcctcccttccctaagtgcacaagataaataataactccaaatctgatcagagggtagttgtagagtatttaaagcaataataattaatgcttcccattatcattagaagacctacattactgcacaaagccttttttcaagaatgtaaacttgtgtttaacaaattatttttggttaatttaattgacagaactaaaaagaacaaaaatcagcagctcacaattttggatttcagaagcaaaatatttcagtagaattaagttatagaaaaatagcctatattaagataatgttggagaaaatttgaaaaatattacaaaatattgaagaaaatagaaatcctctacaaatattgagttttggctgctcttgatgtgggggtagccattattcttttctttacttctctaataaacccattttcagttttagaaaaacaaatattgagttttgtgcatgttcttctagatcaatagtttcaaatatgtgcatgtatataacacatataaacaaaatttgtatcactttccatgtactgattttcagctttctgtatccatttacaagtttaatgttgtcatcgacaactctaatataaattttttcttggtacatggacaaaatcaagactcacttcacaatgttttggacttgaaatataaactcaccaacttacaaatctacatgcagtgatatctcttttgcgtgcaaaacttcaaaaactggatttctgtaatgtgtcaaatgtgtcaa

SEQ ID NO: 702686 - DNA, 1207 bp, Homo sapiens
aaaaagatgttcattgggctatcagcaagggtttcaagttggaatagatggtacgttaatattagcataattaaggagggttttaaaaagaggtatatttacaagatatggccaagggtaggtaaatcacaagggatttgcaatactctgaagctagttcccacctctatgactaaaagaacaagagaaaggagttgccaccggaatcacaaaaagagactcatagagacaggtctacctggagaagagttatgactttcagttctatcccacagagaagaacaaaaatgattatcccaacctcaccttcctctttatatattatcttctgctgggactctctaaaccaaacctgactaggagcaaagagtaagggagaccattaactcagccttstagagcagaaaatgggatggagaagggtggagaaaggatatgaaggggcaaacaaaagatatacagtgcaaaagcaggacctctggaatattgcttgaatagtctttatgtttttgtttgccacctcaggcagtttacttgaaaggaagtgctcaagcagacagattgaaatcaaagacccaagaaacctccttggttgggtcacctttttagagcttcttttggaaggctggaacaatcctgactcaactcagctggtgaagagagatggtcagtgtgctgacctgtatggggccaaaagggatgaaatcaagtcaacctttttgaagaaaaaacagttaacattattgttatgcgaaaaccctttgttcaaatgaaatctcacctcaagcttcaggtcttcacacatgaaggtgcagctgctctggatgaagtgtctgtggaatgaaggggaaggggaatatggaagcctccaagaactcttgaactcttgggctagagctctgatggcacagttttggaatagctggtcttttttaaaggctcttttcatgtaccgagggaaaccaagacctggtgagcagaagtgtattgtccacagtcacccaggaagctagtggccactctactgccaaagccaggtctcttcactcttagtctcattgttctttccatcttctcctggtgggtatcatagcctggacatttttttccttaaattgcaaatattctgtgtgcacaggctgtttcctccagaatattcttatggtgctgaggcaggagagctgcccatgctatttgctcatagaca

SEQ ID NO: 702687 - DNA, 2211 bp, Homo sapiens
cgtgagccacctcgcctggctgataacttgcatttctaacaagttcccaggtgaagctagaactgttggtctgagcacacactttaaagggacactgagaagcttaaggatgtcaagtgtgtgatatgatcaaatttacatttaaaagaatgcatcataatcacttagtcctggagaccccagagctctgaaacagaagctccgagaggaaagctctaaaggctsaataacaaaaacactgggaaattaggtggttttccattcccttaattcaacgaagtggaaggaggacctaaccaggttatcagctgatatgttattaaaaatgattattgataatatataactatgtaatttggattcataatttaggagttcaaaaattcagtgtcattgctataacaaaactcttttcattcctacatagttatttatgaaaacatggattttgaggcttatatagagaaaataaaaatataaataaaagtgatagccctattttattctagtaatgagcagtatttgtctatggattcataaactaactgaacaaaaaggtcccattcattttattaggagataaattttcttaaaaatattttaccttttatgtttaaagtcactcatcaaaattgttaaacatatattctattttgattaattatgtagagacaaatatcacagtaactcagtccagaagagtgtatttttaatcatttaaaaacaatatcatggcaagagcaaactataataacaatttaatattatataaatatttttattgcagagacgtgtagttgagtgaccaataaaagcataaaatacattacattgggataaagttttctgaaggaaatgaaataaaaacacaagtctgagaaaaaaaatggagtgatataaaatttctttacaagaaaaattcttatatatcttgtaagaagagtatcaaatctccaaggcatttagatttcactaaaaagatttaagagagcaatgtaacatttacagtgcaccagaaattctaattcttttcaactatataaatagatcaaagaaaagagttaccaacttaaaaatgttggtgggaaaggagttacataaatgtttataattcttttactgaatatgtgagaaaaaaaattttgaaattattgccctagtgagtatttttccccttactctattttgagagaggtgaattcccttgcttgtcaataaaggctgtcttggatggtgtttgcctaaagggtttaagtgcaggggaagggaaacagacttctactttaaactaccaattctgccttctcatgcccagaaaagatcataaaaagagaccaccaggatccataatcagaaaatcgcctgtagaggccgagctacaggctgggagcattgaaaccctccacttgagatagaggctgaaagcaatgtggtaatatttaaatactgtttagacattgcacttattaagaaataaatttcattctcaataagatttaaagaatggagcagtctgacacagagaaagagttcaccaaaatttgggcagtatatatttagaaagccatttctattggaaagtagatgaggccattttaaagttctctactcaacaacagatcctccgtacacgatctgaagaacaaaatcaaccctttctaatgaatgtcataacaattttggaattctagagaattctgaatctcttacagatatgaaacccgtggctcaaaaaaagctgaatgccttgcccaaggtcacacagttttttagtgacaggtgtaataaaagactccatttcctaccttctcagtcttttgctctttccactctatgaccagaaaggttaagccacaaatagtctcttagttgccaatttcccatgccaccgaagactttatatgcaagggaatgttgttaaaatcacctgagagtgatcacctgttgttgggaacagctgagcaaccaacacagctcataaagccagagaagacagagggcagcttcctgagtgcgtgatatattctctaacattatttgagaaagaaaataactttaaaatactacaaaaattctttataatgaacactgtaccaatgttgatataaaaacttggtctggtaaaatgtccctcttcctttttcctgaaatatgggaagcatgtgggttcctttcctaatcttgctgctgttcaaagcagagaaaaattcc

SEQ ID NO: 702688 - DNA, 1041 bp, Homo sapiens
gaatgatttatacaaacttctctagctatttagtagcagaagagggactgaaagccaagtcttctgaaccccagctgcagagatccattggaagacacgcatatcagttatccagaaaaaaaataatgccacttccaaaagagtttaaagctctaaagcctagctcttaatttgttctaaagaaaattttatcacaaacattaggatacggtgtattttttaaacaagtaattagtattttcaaagttgcatccttgtgttgttttcctgtaaaaaagactcttacttatacccaaatatatatgcagcaataacattaagtcagaaatatttttgggacttacttgtggctacctatttcctttgatgcttcagtatcctaggaggatctggttactgattggcttttgcgtatctattttaaccctagatattagatgasattcaactcacaccccaccactattttgaaaaccttatatacttacccagattagataattcattctgtgccccatgactttgttactgctaaattttggattctaactggctatacaaaggaaagaaaggccctaagagagtgggaaaaaaaaaatcacttttggaatgccaagcagcattggtgccttttatcttgtatccttttcactccattaaggataaaacatctctttagggtcataatattggactgaaatatcttatgttctcattggaatatttttgtccaattatcagaaacatcactttatcagcaaaataagcacccctcaccctgccaccctgtccccggttaatattcatctaactctattgatgaacaagtcctaagtcactagtaccctaaaatgacttttaacataggggtgtttccttactatgttaacatttaaataactcacttccttaatacaatcatcaaagacaaaaatcaaccccagaaatgctgccaagtttgctgactaattgtgaattatgtgtgcatgtaaggagtagagcacttacataacaggagctaatctgtcaacagtaacatca

SEQ ID NO: 702689 - DNA, 1041 bp, Homo sapiens
gaatgatttatacaaacttctctagctatttagtagcagaagagggactgaaagccaagtcttctgaaccccagctgcagagatccattggaagacacgcatatcagttatccagaaaaaaaataatgccacttccaaaagagtttaaagctctaaagcctagctcttaatttgttctaaagaaaattttatcacaaacattaggatacggtgtattttttaaacaagtaattagtattttcaaagttgcatccttgtgttgttttcctgtaaaaaagactcttacttatacccaaatatatatgcagcaataacattaagtcagaaatatttttgggacttacttgtggctacctatttcctttgatgcttcagtatcctaggaggatctggttactgattggcttttgcgtatctattttaaccctagatattagatgacattcaactcacaccccaccactattttgaaaaccttatatacttacccagattagataattcattctgtgccccatgactttgttactgctaaattttggattctaactggctatacaaaggaaagaaaggccctaagagagtgggaaaaaaaaaatcacttttggaatgccaagcagcattggtgccttttatcttgtatccttttcactccattaaggataaaacatctctttagggtcataatattggactgaaatatcttatgttctcattggaatatttttgtccaattatcagaaacatcactttatcagcaaaataagcacccctcaccctgccaccctgtccccgrttaatattcatctaactctattgatgaacaagtcctaagtcactagtaccctaaaatgacttttaacataggggtgtttccttactatgttaacatttaaataactcacttccttaatacaatcatcaaagacaaaaatcaaccccagaaatgctgccaagtttgctgactaattgtgaattatgtgtgcatgtaaggagtagagcacttacataacaggagctaatctgtcaacagtaacatca

SEQ ID NO: 702690 - DNA, 1041 bp, Homo sapiens
gaatgatttatacaaacttctctagctatttagtagcagaagagggactgaaagccaagtcttctgaaccccagctgcagagatccattggaagacacgcatatcagttatccagaaaaaaaataatgccacttccaaaagagtttaaagctctaaagcctagctcttaatttgttctaaagaaaattttatcacaaacattaggatacggtgtattttttaaacaagtaattagtattttcaaagttgcatccttgtgttgttttcctgtaaaaaagactcttacttatacccaaatatatatgcagcaataacattaagtcagaaatatttttgggacttacttgtggctacctatttcctttgatgcttcagtatcctaggaggatctggttactgattggcttttgcgtatctattttaaccctagatattagatgacattcaactcacaccccaccactattttgaaaaccttatatacttacccagattagataattcattctgtgccccatgactttgttactgctaaattttggattctaactggctatacaaaggaaagaaaggccctaagagagtgggaaaaaaaaaatcacttttggaatgccaagcagcattggtgccttttatcttgtatccttttcactccattaaggataaaacatctctttagggtcataatattggactgaaatatcttatgttctcattggaatatttttgtccaattatcagaaacatcactttatcagcaaaataagcacccctcaccctgccaccctgtccccggttaatattcatctaactctattgatgaacaagtcctaagtcaytagtaccctaaaatgacttttaacataggggtgtttccttactatgttaacatttaaataactcacttccttaatacaatcatcaaagacaaaaatcaaccccagaaatgctgccaagtttgctgactaattgtgaattatgtgtgcatgtaaggagtagagcacttacataacaggagctaatctgtcaacagtaacatca

SEQ ID NO: 702691 - DNA, 598 bp, Homo sapiens
tgaaagtgaatagtatttttgttttgaaatcaatccaatttcttattcttttgagtcagtctaaactgatttttttcagtcttctccttttcacagatgctgttattactatctttctctttttttaaaagtaagataatcaactattaaagagtagtgtttcaaggtattctagcatctgaggctgtctctgtaactaaatcaaatggactgaatgatcatragtataagaaaggacccaaacgtctgtattgttttagccctagaacttgtgaggttcgcaaatcagtttactgccaagtatttctagaaactgatgtatttgcatacagaacctattatgtataaactttttaaaaaagcaataataagaattcattttgtttcctagactcactttatttcattaatatttaacattacagaatcaaagttagggtcaacacacgacctttataactcaggatccccaccattttgaaggcaatagattcttcttacaagtacagtaacatgttgtttaatttgtgtttttccctttgtaccataaaaggaaaggaactcatttcacagaggttactgattgaattcactgctt

SEQ ID NO: 702692 - DNA, 598 bp, Homo sapiens
tgaaagtgaatagtatttttgttttgaaatcaatccaatttcttattcttttgagtcagtctaaactgatttttttcagtcttctccttttcacagatgctgttattactatctttctctttttttaaaagtaagataatcaactattaaagagtagtgtttcaaggtattctagcatctgaggctgtctctgtaactaaatcaaatggactgaatgatcataagtataagaaaggacccaaacgtctgyattgttttagccctagaacttgtgaggttcgcaaatcagtttactgccaagtatttctagaaactgatgtatttgcatacagaacctattatgtataaactttttaaaaaagcaataataagaattcattttgtttcctagactcactttatttcattaatatttaacattacagaatcaaagttagggtcaacacacgacctttataactcaggatccccaccattttgaaggcaatagattcttcttacaagtacagtaacatgttgtttaatttgtgtttttccctttgtaccataaaaggaaaggaactcatttcacagaggttactgattgaattcactgctt

SEQ ID NO: 702693 - DNA, 598 bp, Homo sapiens
tgaaagtgaatagtatttttgttttgaaatcaatccaatttcttattcttttgagtcagtctaaactgatttttttcagtcttctccttttcacagatgctgttattactatctttctctttttttaaaagtaagataatcaactattaaagagtagtgtttcaaggtattctagcatctgaggctgtctctgtaactaaatcaaatggactgaatgatcataagtataagaaaggacccaaacgtctgtattgttttagccctagaacttgtgaggttcgcaaatcagtttactgccaagtatttctagaaactgatgtatttgcatacagaacctattatgtataaactttttaaaaaagcaataataagaattcattttgtttcctagactcactttatttcattaatatttaacattacagaatcaaagttagggtcaacacacgacctttataactcaggatccccaccattttgaaggcaatagattcttcttacaagtacagtaacatgttgyttaatttgtgtttttccctttgtaccataaaaggaaaggaactcatttcacagaggttactgattgaattcactgctt

SEQ ID NO: 702694 - DNA, 1397 bp, Homo sapiens
agtaaggttgaaaaatgtaaagaccaacacacggccttcaatgcctaaaatatttgctattaggcctattatagaaaaagtcccaacccctgacctacaatgtacttttattccttcaactacctaatctctacttacattcagatcgagatgcattagttctacatgaaaacaaaagaatatgcatactgcccattgaaatggggttaccaccacttctctaagcaagcctttttttcctgaacagtcatactctttaagcatacatttattctatagaaatttcctgtttatttttctgtctttgctgtattctcctttgtaagagatacttttcaattttctatctgcatcacaaaaacctagagcatagcaagcagataatattgtttgcagacttgaaatggcaggaatmgtgctggcaaatgaagatcccaccattgttatctgcctaaagtcaaagggatgacaaagtagtaggaaaaatgttgtgattacaatttcttacaatacagccttataatggcactagttgaaataacgagtaaaaaaacaatggaagttaataaagagaaaaaatctgattaccagaaagtaagtctgtcaggaaagttttgttctaagaggaaaaaatagatttgagatcccaaccatgtgccaaatgcatcttgctaggatggtattaatgatccagttttcttatttagctaaaaccctaagaaaaggaataatatatctatgcccccaaactgggaaacagatgaatgttacattctgtcactttctgaagttcatggctctttagactagatgagaacaagttgcccaaaaatctcttttcccaaagcagtgatgtgggatctgaatggctattaaacaagctcaagtgtggaatgtacacatgcaaaatagttcgatttatctctttttactgccctagaatgtacagttttacattttcctttcctaatgggaagccgattccttaatgatatcttaggatgctaccattacttttcattcactttgatattataaggattctgcccagcctggatgaaaatactaacctcaacccttctcaaatcctgtctcctacccttccctcagtaggctcgtacttgggaatgtgaagtggatgaggaaaggtagctgggttttcactaggttttgaactacagattgttagagtggtggatgaggggtggggagggcatgatttggttctaggacaaacttttctctgttaacttccagtatccagttctctcttttttatataacagcattttaggtattgttaatatatctctatcctatctctcagttcctgcattaagagaaaaagactatatacaaataatatatccctcataagtatcaaactcaataaataa

SEQ ID NO: 702695 - DNA, 1463 bp, Homo sapiens
cacaacctccaaacctggctgaacagcaaagactagctcatctcagggaatttagctgaaaatctcaagcaaacttaatatatagcaaggtaaaataacataattcaaaaaacaaaactacagttaaggaaatataacaatatccacaagatacaaaagtttgttttattgtaatattattttgatgcttagtttttatcacaaaattctatttcacaccataatacttgataatttattctatgtagacacagagaggaaaggggacctggtggaaatatgagctaaccagttaacaaagaggggtgcagactctaaaccagaacaaccacagggaagaacatctcatccaaattctgagctttataaaaaaagaaaactgggagcaagagaaaattatgtttgcatacgatttaggaatctttaaatcattttcacatacctttgttgattcctgaaatatccctgcttccatggagcagaaattattaccttctgttcaggagaatggactataaaacagcaactcatagggaaaaaaaagaatgtgataaagaagtgaagaaaggggaagcatgagatataaaagttttatttttaaacacagctatccattgacatgggaaaaatgtgggatgggattctgaatgatttttttatccccttcccttctttatacttctctacagatttttttttttttttttttttgagacagggtctcactctgatgtccaggctggagtgcagtggcgtgacatcggctcactgcaatttctgcctcccgggttcaagcaattctcctgcctcagcctccctagtagctgggattgcaggcacctaccaccatgcccggctaattttttcattgttagtagagatggaggttcaccatgttggccaggctggtctggaactcctgacaagtgatctgcccacctcggcctctcaaagtgctggaattaaggcgtgagccattgcacccagcatttttccacagatttttttatatgcaaaaattccttttattataagaaggaggaaaagacaaaattagcaagaacttaatttgtttttttacttatttaattaactaatgaattttttttatgagacggagtctcgctctgtcgcccaggatagagtgcagtggcgtgatcttggctcactgcaagttccaccwcccgggttcatgccattctcctgcctcagcctcccgagtagctgggactacaggcgcctgccaccactcctggctaattttttgtattttttagtagagatggggtttcaccatgtgatgttagccaggatggtctcgatctcctgacctcgtgatctgcccacctcggcctcccaaagtgctgggattacaggcgtgagccactgtgcccagccaatttataattactacttatttattcctaaaatctaattactaaatattacaataatgtaattct

SEQ ID NO: 702696 - DNA, 1325 bp, Homo sapiens
tgcaaggaaaatcaggagagcccaagagtaaggaattttttagttgagtactgctggggaaatgaacatgcttgactaaaaatctctctgcaggcctgtgctctcagccaaagcttaccatatggtcgtttaccccctgcagaactgggcctcaagggcagctgctgatcctgcacacaaagaggggtgcctcttgagacacccaataacagtcttacaccccatatcaaatgcagagcagcccaaagccatggctggaccagcacctggggtgggcctgctgggaccacacatttctctgtgtatccaggttccatgtagcaggctattgctctttggagtataccccagggaggcttttaatagcaagaactgtacaagaatcagtagggaaggaggctctggctttggagcctgctatggtttgaatgtggcccctaatattcatgtgttggaaacttaatcctccatgcaacagtgctgagagatgggacctgtaaaaggtgacaaggtcatgagggctctgctttcctttaagggttaatttttttagggcaggagtgggttcccgttaaaaaaaaaaaaaaaaaaaaaaaaaaaaaaaaaaaaaaaaggcagttcggccagattttctctctgtctcccatgcccactttccttctaccacagggtgacactcatcagatgccagtgccatgctcttggacttaccagcctccacaaccatgagtgacatcaatttctcttgcttataagttactcagtctgtggtattctgttacagaagcagaaaacaaaggcagagccttttcatcaggaagttctattaaccctgcacgccacagtggggtcacagggacaggtttggatgtccattgagagatggggggytagttcagggacattagcagctttctcattacctctcccctgagagtcagggtctggccttttctgggaagaatgaggtctggagaggggttgattattactccttctcaggtgggagggatgtgagtggacactgatggaaggtgtggcttcccttgtaaggattcctgatctacccacttaccttgccttaggtaattcacagctggggtaggaccatttaccaagctgctcattgctgtcttctctctaggagactgcagaggatgcaaagggaattttgccttcctcttgtctagaaagtttaaggcttttggtctggggcggggagggggtggttgttattagtttttcagttttctggccccaaatagaagttgaaaaagtggttttacaccccttgaggcaggctccctcgtgggagaaaaagttat

SEQ ID NO: 702697 - DNA, 1325 bp, Homo sapiens
tgcaaggaaaatcaggagagcccaagagtaaggaattttttagttgagtactgctggggaaatgaacatgcttgactaaaaatctctctgcaggcctgtgctctcagccaaagcttaccatatggtcgtttaccccctgcagaactgggcctcaagggcagctgctgatcctgcacacaaagaggggtgcctcttgagacacccaataacagtcttacaccccatatcaaatgcagagcagcccaaagccatggctggaccagcacctggggtgggcctgctgggaccacacatttctctgtgtatccaggttccatgtagcaggctattgctctttggagtataccccagggaggcttttaatagcaagaactgtacaagaatcagtagggaaggaggctctggctttggagcctgctatggtttgaatgtggcccctaatattcatgtgttggaaacttaatcctccatgcaacagtgctgagagatgggacctgtaaaaggtgacaaggtcatgagggctctgctttcctttaagggttaatttttttagggcaggagtgggttcccgttaaaaaaaaaaaaaaaaaaaaaaaaaaaaaaaaaaaaaaaaggcagttcggccagattttctctctgtctcccatgcccactttccttctaccacagggtgacactcatcagatgccagtgccatgctcttggacttaccagcctccacaaccatgagtgacatcaatttctcttgcttataagttactcagtctgtggtattctgttacagaagcagaaaacaaaggcagagccttttcatcaggaagttctattaaccctgcacgccacagtggggtcacagggacaggtttggatgtccattgagagatggggggttagttcagggacattagcagctttctcattacctctcccctgagagtcagggtctggccttttctgggaagaatgaggtctggagaggggttgattattactccttctcaggtgggagggatgtgagtggacactgayggaaggtgtggcttcccttgtaaggattcctgatctacccacttaccttgccttaggtaattcacagctggggtaggaccatttaccaagctgctcattgctgtcttctctctaggagactgcagaggatgcaaagggaattttgccttcctcttgtctagaaagtttaaggcttttggtctggggcggggagggggtggttgttattagtttttcagttttctggccccaaatagaagttgaaaaagtggttttacaccccttgaggcaggctccctcgtgggagaaaaagttat

SEQ ID NO: 702698 - DNA, 655 bp, Homo sapiens
caagaccaaattagagaaaagaaatataacaactttataaaaactaaattctatgatacaattatttatactttgtaccatcttcaagcctcaaaaagatttttattgtttaaaaaatattttatttttaagatatactttattragataataacttaataagtaaaatatttaaaaagataatttctttgattcaaagtcttttatatttttgtgtctgtagttgaaaaataaagctaataggtttctttcttacccatagaatctctctcagcattgtattaatccagccaggtctctgtgcaaagatgacataaaaaagtcattcctgtgatgccctccttctctaacttctaaaaagggaatcctccagtgaattttaacttcttactttttttgtatttcatcctctcttccctaggaagagaaataaagtggctaaggtcatattgcaggtcatatttctaacgttctgcaattctgatggttctttgaagaaaagatcagagtgctactgaatatatagcaggaagtcctaaccttcttcagaggaagcaaattttcaggtgtgtcttcaaagacaaataggagttctgtggaagattgaagaagagagatgtatagatgtgtaaagaacagtccaggtagggatcag

SEQ ID NO: 702699 - DNA, 850 bp, Homo sapiens
cttgcactaaaaatagaactgtaagtacaaagatagtggaaaaatacacaggttagttaattccagcaggtgtagatataagtaagagagtgtgatgattaatactgaggtacaacttgattggattgaaggatgcaaagtattgatcccctgggtgtgtctgtgaggttgctgccaaaggagattaacatttgagtaagtgtgctggggaaggcagacccacagttaatctggtgggcacagtctaatcagctgccagcaaatgtaaagsaggcagaataagcctgaaggagctagacaggcctaatctcccagcctacatctttctcccctgctggatgcttcctgccatcagacatcagactccaagttcttcagtttttagactgagactggctttccttgctcctcaggcttgcagacagcctattgtgggtctttgtgatcatgtaaggtaatacttaataaactcccctttatctatctatctatctatctatctatctatctatctatctatctatctatctacctatcctattagttctgttcctctagagaaccctgactaatacagagagtaagcatcttgttctttgcaacatataaaacacaggaagcataacatttgcacatttggaagtagactagctagcattatgattgtcaccaaagaagtactgctgaatgccaaatatgatcacagaattagaaacactgaagaaccatccctccctaacaaccctcctctccccagtctaacacacacacacacacacatacacctgtactaacacacatacaaggaagaagagattatttttcaagggtactcactggaaacctgaat

SEQ ID NO: 702700 - DNA, 599 bp, Homo sapiens
gaaaaagctatacagacatttacttctactctataataacagaattgttaaacttttattatggacttaaaaacaaataagaaaataaaacaaaaaacaaaggcccatatatatgtcctgtagacataatatatgcaactaatatatacacataacgatatccaaacaaaatacaaaactacaaaataaaacatctacccttccctcrtttccaaactgtttccccaatataaccattgttaataatattttatgtatcctttgaaaaaattaaaaatgctttattgagctatgactacacactcagaatggcttaaaaatgttagtgtaattcaaaatgctggtgacaatgcagagaaactggaattattattattataatttttttttgagatagagtctcactctgtcacccaggctggaatgcagtggcatgatttcagctcaccaaaacctctgcctcccaggctcaagcgattctcctgcctcagcctcctgagtagctgggattacaggcacccaccaccatgcctggctaatttttgtatttttagtagaaatggggtttcaccatgtcagccaggctggtcttgaactcc

SEQ ID NO: 702701 - DNA, 2127 bp, Homo sapiens
tgttgcccagagtaggcatgaaaattcacaataagcaatcattgatttaccttttaagtaccactttgtcaaaatgaggtgaaaccaataagtctacattcaagtctacacaggtttatgattcttaccttgaagagtatgggtcaagccacttatgtcctacataattcatatattatttctaattagattttttccatatttcactggcagatagtgagcaatgcaaagtacaaagcacttccacaaattttgtggcaagacagactgaattgcctaatagggtgtgaagcacagctacatagaagatatatgaagcatattatcattgggagtaagcacagctccattgatttcatgaaacaaaacaaaattaaattgcatagaaactcaaagacatggtaaatatgggttttgagtctaatagacctgagtttgaaacctggctctattatttactagttttctagctgtgtggccttagactaacttcctcacctgtgaattgagtgtaatataccagactcaaagtgttacacaaagcttgcactgtgaagtgtgtggaatattaaccttgggtgcacaatataggaggcaccaaagaacttagtaatcaagacaaataatattatatttcaatcttttttwaaaaaaaaatcaaatttaatgcagaactccacaaagcagaaaacatcaatttttaaaataaagacaagatcaaattctgcatgtggatgacttggcttcccttggccctctctaatcctggccctgaatgttaaggaagttaaacaaggtaataagtgaagtaactttggcgtagtccttgccttgaatattcagttataaactatgacattgaggaaatggccctttagtcttggtaaaaaaaaatccatagtgaataatgttcaaatacaaagaaacctaatctatttattgctctttgtttttaattcttaattacatacatagtatataagtatattattggtaaggttagcacccctttaaaactagaatttttctaagcatttatatgcataggtatatatgtatagaatacatatgatagtaatttttttctttttttatgaaactggtatcttgatatacaaacatatctacaagttggcttttgtttcattcaacactatgccttatcaatgcctcatcattgtaaattattgcatagagtttcataatatggatatactgcagtttgttcatttagtccccccgttgatatttatttagagttgtttacagtttatcaatattatacacagtgcttcagtgaacatttttatacctgcacgtagttttttttctaatttagctactgagaagtagaattgctgaattttataggatatgaaccctgatttcatttaaattgttaatgtttaactgccttagtggccattccaattgatggtcccactagaagggcatgacagtacttgttttaccacaccaccattgacatattatatcaaacgaattcattatttattaatcttaactatcaattaataatgagtatttaataatttaattaataatgaataatatttaatgaaataattataattaatcattttataaataaatttataaaaacaccaataaacttcttataaataattttataaatattttataaagaaattataatttagttaatttgattaataatatttgataatagaatatttaattaatttaattgataatgaataatatttatataggtatatctacacatagttttagccattttctaatttagctactaagaagtagaattgctggattttataggatatgaacactgatttcatttaaatttttagtgtttaattgccttaatgaccattccaattgatggttccactagaagggtaagacagtacatgttttaccactctcattaacatatgatatcatcaaactaattcattatttgccaatctgaatgaaatctgatggtttaaaatgttatttcattgctgttcttttcgcattttcttacttgagaatgggcatctttttaatatatttatggggcatttgtatatcctgttctatgaagtgcattttcatatattttgtccatatgtacat

SEQ ID NO: 702702 - DNA, 2127 bp, Homo sapiens
tgttgcccagagtaggcatgaaaattcacaataagcaatcattgatttaccttttaagtaccactttgtcaaaatgaggtgaaaccaataagtctacattcaagtctacacaggtttatgattcttaccttgaagagtatgggtcaagccacttatgtcctacataattcatatattatttctaattagattttttccatatttcactggcagatagtgagcaatgcaaagtacaaagcacttccacaaattttgtggcaagacagactgaattgcctaatagggtgtgaagcacagctacatagaagatatatgaagcatattatcattgggagtaagcacagctccattgatttcatgaaacaaaacaaaattaaattgcatagaaactcaaagacatggtaaatatgggttttgagtctaatagacctgagtttgaaacctggctctattatttactagttttctagctgtgtggccttagactaacttcctcacctgtgaattgagtgtaatataccagactcaaagtgttacacaaagcttgcactgtgaagtgtgtggaatattaaccttgggtgcacaatataggaggcaccaaagaacttagtaatcaagacaaataatattatatttcaatcttttttaaaaaaaaaatcaaatttaatgcagaactccacaaagcagaaaacatcaatttttaaaataaagacaagatcaaattctgcatgtggatgacttggcttcccttggccctctctaatcctggccctgaatgttaaggaagttaaacaaggtaataagtgaagtaactttggcgtagtccttgccttgaatattcagttataaactatgacattgaggaaatggccctttagtcttggtaaaaaaaaatccatagtgaataatgttcaaatacaaagaaacctaatctatttattgctctttgtttttaattcttaattacatacatagtatataagtatattattggtaaggttagcacccctttaaaactagaatttttctaagcatttatatgcataggtatatatgtatagaatacatatgatagtaatttttttctttttttatgaaactggtatcttgatatacaaacatatctacaagttggcttttgtttcattcaacactatgccttatcaatgcctcatcattgtaaattattgcatagagtttcataatatggatatactgcagtttgttcatttagtccccccgttgatatttatttagagttgtttacagtttatcaatattatacacagtgcttcagtgaacatttttatacctgcacgtagttttttttctaatttagctactgagaagtagaattgctgaattttataggatatgaaccctgatttcatttaaattgttaatgtttaactgccttagtggccattccaattgatggtcccactagaagggcatgacagtacttgttttaccacaccaccattgacatattatatcaaacgaattcattatttattaatcttaactatcaattaataatgagtatttaataatttaattaataatgaataatatttaatgaaataattataattaatcattttataaataaatttataaaaacaccaataaacttcttataaataattttataaatattttataaagaawttataatttagttaatttgattaataatatttgataatagaatatttaattaatttaattgataatgaataatatttatataggtatatctacacatagttttagccattttctaatttagctactaagaagtagaattgctggattttataggatatgaacactgatttcatttaaatttttagtgtttaattgccttaatgaccattccaattgatggttccactagaagggtaagacagtacatgttttaccactctcattaacatatgatatcatcaaactaattcattatttgccaatctgaatgaaatctgatggtttaaaatgttatttcattgctgttcttttcgcattttcttacttgagaatgggcatctttttaatatatttatggggcatttgtatatcctgttctatgaagtgcattttcatatattttgtccatatgtacat

SEQ ID NO: 702703 - DNA, 582 bp, Homo sapiens
ggccaaagcccccggacaatgttctcactcccttcaaaccacaaccaagcaactcttggagctctcctgatacacagcagcggcgagacccccacacacccaccttcttggcagaaagggccagttttttggctggtggaggagacatggtgcttgcaggctcagtggtggtgttgctcaggacaggggacttcagcttcaccgtcttagaatctgctccacttggcggcgttttggagtggccagcggtggaacagttcgtttcctgagaatcgcagagatgggccgctccrctcctgggggtctggggggccttggtggagtcgctgctggccgagtgctctgggctggagctgctggagcccctcctgtcgaggccagcgctctcgtcgttccccttcagcccatgcccgttggcagtggctgtagccaggagcttaggtgaggtagagaggacaacatccctgctgtcccaggagccctgcctttggctcccagatctgctgctattcgagttgctggtcccaggcagcccctgagcagttctgggggaaaagtgctgtggaggagctggcttcttca

SEQ ID NO: 702704 - DNA, 472 bp, Homo sapiens
tcgcagacagaccaccaacaaagacagaactaagacatcaggactgcagaggccgaactgccttcaccacccaaagctcctttaccacaggggaacacagaagagggggatcttggtcagtgaygcccccctgtacctcctggctgccccaatgctttgtctgtcctgtgaggttggcgattcgtccaactcctcaccagccaagcacacgcaaccacagggagaaccagttggcacccagaagatcccggcccaaagcttacctggctctatggacgggccaagtggaggcaacgacggggtgagaggttttcatggggtgggtgaggtcggaggatggtgaggggggaggtggacggaggtcattgccggtcgccctccacagggtgctggcctgcagttatcgacataaataaaaacttggtggtctaaaaaaggtttccgtgagtgaagagggaaaacaaaagtaaca

SEQ ID NO: 702705 - DNA, 1241 bp, Homo sapiens
ttttcaaaaaaagcactagagtgggagggaacaaagcaaaggagacaagcagctgttaacgtcgaaggaaagaaacaaaacaaaacaaaacaaaacagtttcatggagcrctaggtggaaagacttccagccagcctcactcagagacagtgggagtggagccttcctctctctatcttgctaaatgcccacttcactcatcttcctctgcaagccttgttcccactttaggctggtacaaaagtaattgtggtttttgtcattactttcaatagcaaaaaccagaattgcttttgcaccaacctaaatagtggttggtgcaaaaatatgttcaaaagaacacacattattctccttatcccttacatagcactttagcattggtttacacccatgctcttggggtcttaccatacctacagtactacaaagtattccatattctttccctaaatacaattctgctgccatcagtattatattgttacacttgaaaagctgcgtgttccctattaattaagtctggatgttccttagtaaataagtctgtcaaaaaccctcagaatggattctagtactggatgtagcaggggataggaggggcgggggacttggattagggaatcttctactttcccttctacttcaaaactctttgactctaccctttgttaagtaggtatttttcagcattatttaaaaatcagataataaaagtatccaaaaataaaaagaacttctataatatccaagataatatagaaattcaaatagttcacccaaaaaaagtaccagtatttacactcggcatacatcatttgaaatttcagattcatacagtatttattttacttgttttatgaaaacaggattgaaatgtgctgctttccacgtgtgcaggtttgttgcaagggtatatttagtgatgctgaggtttgggcttctatttgatcctgtcaccaaaatagtgaacacagcacccagtgggaagtttttcagcccttgcgccactccttttggagtccctaagtgtctgttgttcccattttttaatgtctgtgtgcaccaaagattatctcccacttataagtgagaacacgcatcatcatttttaatagcttcacattatattgccgggcgcagtggctcacgcctggaatcccagcactttgggaggctgaggcgggtggatcacgaggtcaggagatcgagaccatcctggctaacacggtgaaaccccg

SEQ ID NO: 702706 - DNA, 1241 bp, Homo sapiens
ttttcaaaaaaagcactagagtgggagggaacaaagcaaaggagacaagcagctgttaacgtcgaaggaaagaaacaaaacaaaacaaaacaaaacagtttcatggagcactaggtggaaagacttccagccagcctcactcagagacmgtgggagtggagccttcctctctctatcttgctaaatgcccacttcactcatcttcctctgcaagccttgttcccactttaggctggtacaaaagtaattgtggtttttgtcattactttcaatagcaaaaaccagaattgcttttgcaccaacctaaatagtggttggtgcaaaaatatgttcaaaagaacacacattattctccttatcccttacatagcactttagcattggtttacacccatgctcttggggtcttaccatacctacagtactacaaagtattccatattctttccctaaatacaattctgctgccatcagtattatattgttacacttgaaaagctgcgtgttccctattaattaagtctggatgttccttagtaaataagtctgtcaaaaaccctcagaatggattctagtactggatgtagcaggggataggaggggcgggggacttggattagggaatcttctactttcccttctacttcaaaactctttgactctaccctttgttaagtaggtatttttcagcattatttaaaaatcagataataaaagtatccaaaaataaaaagaacttctataatatccaagataatatagaaattcaaatagttcacccaaaaaaagtaccagtatttacactcggcatacatcatttgaaatttcagattcatacagtatttattttacttgttttatgaaaacaggattgaaatgtgctgctttccacgtgtgcaggtttgttgcaagggtatatttagtgatgctgaggtttgggcttctatttgatcctgtcaccaaaatagtgaacacagcacccagtgggaagtttttcagcccttgcgccactccttttggagtccctaagtgtctgttgttcccattttttaatgtctgtgtgcaccaaagattatctcccacttataagtgagaacacgcatcatcatttttaatagcttcacattatattgccgggcgcagtggctcacgcctggaatcccagcactttgggaggctgaggcgggtggatcacgaggtcaggagatcgagaccatcctggctaacacggtgaaaccccg

SEQ ID NO: 702707 - DNA, 1241 bp, Homo sapiens
ttttcaaaaaaagcactagagtgggagggaacaaagcaaaggagacaagcagctgttaacgtcgaaggaaagaaacaaaacaaaacaaaacaaaacagtttcatggagcactaggtggaaagacttccagccagcctcactcagagacagtgggagtggagccttcctctctctatcttgctaaatgcccacttcactcatcttcctctgcaagccttgttcccactttaggctggtacaaaagtaattgtggtttttgtcattactttcaatagcaaaaaccagaattgcttttgcaccaamctaaatagtggttggtgcaaaaatatgttcaaaagaacacacattattctccttatcccttacatagcactttagcattggtttacacccatgctcttggggtcttaccatacctacagtactacaaagtattccatattctttccctaaatacaattctgctgccatcagtattatattgttacacttgaaaagctgcgtgttccctattaattaagtctggatgttccttagtaaataagtctgtcaaaaaccctcagaatggattctagtactggatgtagcaggggataggaggggcgggggacttggattagggaatcttctactttcccttctacttcaaaactctttgactctaccctttgttaagtaggtatttttcagcattatttaaaaatcagataataaaagtatccaaaaataaaaagaacttctataatatccaagataatatagaaattcaaatagttcacccaaaaaaagtaccagtatttacactcggcatacatcatttgaaatttcagattcatacagtatttattttacttgttttatgaaaacaggattgaaatgtgctgctttccacgtgtgcaggtttgttgcaagggtatatttagtgatgctgaggtttgggcttctatttgatcctgtcaccaaaatagtgaacacagcacccagtgggaagtttttcagcccttgcgccactccttttggagtccctaagtgtctgttgttcccattttttaatgtctgtgtgcaccaaagattatctcccacttataagtgagaacacgcatcatcatttttaatagcttcacattatattgccgggcgcagtggctcacgcctggaatcccagcactttgggaggctgaggcgggtggatcacgaggtcaggagatcgagaccatcctggctaacacggtgaaaccccg

SEQ ID NO: 702708 - DNA, 1241 bp, Homo sapiens
ttttcaaaaaaagcactagagtgggagggaacaaagcaaaggagacaagcagctgttaacgtcgaaggaaagaaacaaaacaaaacaaaacaaaacagtttcatggagcactaggtggaaagacttccagccagcctcactcagagacagtgggagtggagccttcctctctctatcttgctaaatgcccacttcactcatcttcctctgcaagccttgttcccactttaggctggtacaaaagtaattgtggtttttgtcattactttcaatagcaaaaaccagaattgcttttgcaccaacctaaatagtggttggtgcaaaaatatgttcaaaagaacacacattattctccttatcccttacatagcactttagcattggtttacacccatgctcttggggtcttaccatacctacagtactacaaagtattccatattctttccctaaatacaattctgctgccatcagtattatattgttacacttgaaaagctgcgtgttccctattaattaagtctggatgttccttagtaaataagtctgtcaaaaaccctcagaatggattctagtactggatgtagcaggggataggaggggcgggggacttggattagggaatcttctactttcccttctacttcaaaactctttgactctaccctttgttaagtaggtatttttcagcattatttaaaaatcagataataaaagtatccaaaaataaaaagaacttctataatatccaagataatatagaaattcaaatagttcacccaaaaaaagtaccagtatttacactyggcatacatcatttgaaatttcagattcatacagtatttattttacttgttttatgaaaacaggattgaaatgtgctgctttccacgtgtgcaggtttgttgcaagggtatatttagtgatgctgaggtttgggcttctatttgatcctgtcaccaaaatagtgaacacagcacccagtgggaagtttttcagcccttgcgccactccttttggagtccctaagtgtctgttgttcccattttttaatgtctgtgtgcaccaaagattatctcccacttataagtgagaacacgcatcatcatttttaatagcttcacattatattgccgggcgcagtggctcacgcctggaatcccagcactttgggaggctgaggcgggtggatcacgaggtcaggagatcgagaccatcctggctaacacggtgaaaccccg

SEQ ID NO: 702709 - DNA, 918 bp, Homo sapiens
attgattgagacctgtctcagatacttgtgggttcacataacctaagtacatcctcctgtgtactttaagtcacctgtagattacgtatatagttgttgtattgttttgggaatgatgacaagaaaaaagcctgcatatgttcaggacagaagcaaccattgcaggtgtaactacatttttgatctgtgatcagccgaatctgaggatgtggaacccgcaggtatggagggccaactgtactggcagaaaaaagtagaggcagaatgaggtgccagctaccagaaaggcggctgactcaagttagagaaaagaggctgcgttgctggggatcacactaaaggggcacatgcctgcctcacatcaggactcagagctcgagcagggaagcccacacgggtaggtgcatctgccaagcccagaaggctgtgtgccctgccatgaggaccttggaacaggggcatagtgtgggttggggtgaggttggggtggcaaggagtagtctcagcaccagtcccccactcttagctccccagggttttcaccagcttgtcaccatgagaagctgaagaatgaataycagcagccatggtgtgttccttgtggctctgagggcttacagaggctctagggggcttttcaagacatctggttcctgaatgggataccaaagtttaagtttcagaggcttttcctaaggcctaaagttggcagaaacactgtcaaaggcctctaaaataagagggctaatcaatgggaagactcaaaaggtatttgtggcataataagaaataaattcttacagaacaccaaataaaagttgcttaattataccaagtaaaaagaaaaagtatatatatttgatccttgtccccagtacctgctataggctcctaaaacccttggaatttcttgagtga

SEQ ID NO: 702710 - DNA, 918 bp, Homo sapiens
attgattgagacctgtctcagatacttgtgggttcacataacctaagtacatcctcctgtgtactttaagtcacctgtagattacgtatatagttgttgtattgttttgggaatgatgacaagaaaaaagcctgcatatgttcaggacagaagcaaccattgcaggtgtaactacatttttgatctgtgatcagccgaatctgaggatgtggaacccgcaggtatggagggccaactgtactggcagaaaaaagtagaggcagaatgaggtgccagctaccagaaaggcggctgactcaagttagagaaaagaggctgcgttgctggggatcacactaaaggggcacatgcctgcctcacatcaggactcagagctcgagcagggaagcccacacgggtaggtgcatctgccaagcccagaaggctgtgtgccctgccatgaggaccttggaacaggggcatagtgtgggttggggtgaggttggggtggcaaggagtagtctcagcaccagtcccccactcttagctccccagggttttcaccagcttgtcaccatgagaagctgaagaatgaatatcagcagccatggtgtgttccttgtggctctgagggcttacagaggctctagggggcttttcaagacatctggtwcctgaatgggataccaaagtttaagtttcagaggcttttcctaaggcctaaagttggcagaaacactgtcaaaggcctctaaaataagagggctaatcaatgggaagactcaaaaggtatttgtggcataataagaaataaattcttacagaacaccaaataaaagttgcttaattataccaagtaaaaagaaaaagtatatatatttgatccttgtccccagtacctgctataggctcctaaaacccttggaatttcttgagtga

SEQ ID NO: 702711 - DNA, 918 bp, Homo sapiens
attgattgagacctgtctcagatacttgtgggttcacataacctaagtacatcctcctgtgtactttaagtcacctgtagattacgtatatagttgttgtattgttttgggaatgatgacaagaaaaaagcctgcatatgttcaggacagaagcaaccattgcaggtgtaactacatttttgatctgtgatcagccgaatctgaggatgtggaacccgcaggtatggagggccaactgtactggcagaaaaaagtagaggcagaatgaggtgccagctaccagaaaggcggctgactcaagttagagaaaagaggctgcgttgctggggatcacactaaaggggcacatgcctgcctcacatcaggactcagagctcgagcagggaagcccacacgggtaggtgcatctgccaagcccagaaggctgtgtgccctgccatgaggaccttggaacaggggcatagtgtgggttggggtgaggttggggtggcaaggagtagtctcagcaccagtcccccactcttagctccccagggttttcaccagcttgtcaccatgagaagctgaagaatgaatatcagcagccatggtgtgttccttgtggctctgagggcttacagaggctctagggggcttttcaagacatctggttcctgaatgggataccaaagtttaagtttcagaggcttttcctaaggcctaaagttggcagaaacactgtcaaaggcctctaaaataagagggctaatcaatgggaagactcaaaaggtatttgtggcataataagaaataaattcttayagaacaccaaataaaagttgcttaattataccaagtaaaaagaaaaagtatatatatttgatccttgtccccagtacctgctataggctcctaaaacccttggaatttcttgagtga

SEQ ID NO: 702712 - DNA, 918 bp, Homo sapiens
attgattgagacctgtctcagatacttgtgggttcacataacctaagtacatcctcctgtgtactttaagtcacctgtagattacgtatatagttgttgtattgttttgggaatgatgacaagaaaaaagcctgcatatgttcaggacagaagcaaccattgcaggtgtaactacatttttgatctgtgatcagccgaatctgaggatgtggaacccgcaggtatggagggccaactgtactggcagaaaaaagtagaggcagaatgaggtgccagctaccagaaaggcggctgactcaagttagagaaaagaggctgcgttgctggggatcacactaaaggggcacatgcctgcctcacatcaggactcagagctcgagcagggaagcccacacgggtaggtgcatctgccaagcccagaaggctgtgtgccctgccatgaggaccttggaacaggggcatagtgtgggttggggtgaggttggggtggcaaggagtagtctcagcaccagtcccccactcttagctccccagggttttcaccagcttgtcaccatgagaagctgaagaatgaatatcagcagccatggtgtgttccttgtggctctgagggcttacagaggctctagggggcttttcaagacatctggttcctgaatgggataccaaagtttaagtttcagaggcttttcctaaggcctaaagttggcagaaacactgtcaaaggcctctaaaataagagggctaatcaatgggaagactcaaaaggtatttgtggcataataagaaataaattcttacagaacaccaaataaaagttgcttaattataccaagtaaaaagaaaaagtatatatatttgatccttgkccccagtacctgctataggctcctaaaacccttggaatttcttgagtga

SEQ ID NO: 702713 - DNA, 918 bp, Homo sapiens
attgattgagacctgtctcagatacttgtgggttcacataacctaagtacatcctcctgtgtactttaagtcacctgtagattacgtatatagttgttgtattgttttgggaatgatgacaagaaaaaagcctgcatatgttcaggacagaagcaaccattgcaggtgtaactacatttttgatctgtgatcagccgaatctgaggatgtggaacccgcaggtatggagggccaactgtactggcagaaaaaagtagaggcagaatgaggtgccagctaccagaaaggcggctgactcaagttagagaaaagaggctgcgttgctggggatcacactaaaggggcacatgcctgcctcacatcaggactcagagctcgagcagggaagcccacacgggtaggtgcatctgccaagcccagaaggctgtgtgccctgccatgaggaccttggaacaggggcatagtgtgggttggggtgaggttggggtggcaaggagtagtctcagcaccagtcccccactcttagctccccagggttttcaccagcttgtcaccatgagaagctgaagaatgaatatcagcagccatggtgtgttccttgtggctctgagggcttacagaggctctagggggcttttcaagacatctggttcctgaatgggataccaaagtttaagtttcagaggcttttcctaaggcctaaagttggcagaaacactgtcaaaggcctctaaaataagagggctaatcaatgggaagactcaaaaggtatttgtggcataataagaaataaattcttacagaacaccaaataaaagttgcttaattataccaagtaaaaagaaaaagtatatatatttgatccttgtccccagtacctgytataggctcctaaaacccttggaatttcttgagtga

SEQ ID NO: 702714 - DNA, 977 bp, Homo sapiens
tgatggcaaaatttattatattgggtgagactgtgactctcagtataacagcagggctcatgtaatataaactgaatataacagcactactcctatcccttccaaccagtattagaaggcagcatttcccaaaatacgttgcattaaaacacaaatcctgccaatttggtaaattcctggtcccaaaaatgtgggaaatgttgcatgctgtatgcctgtcttaaaaagagtcacattgctcactagcatattaaattaaggcgctaagagatcctrcagtaaggaaacatatataatattgcctagcccataacccatttggactgtatacctctcaaataccaaagtggtctccaaattgcacccaggaaatctcagtttgttttctcttccagatggcctacactgcttaactctgatatgtgagtgaggctacacttcatacaacttatgctcagcattagcccaagaggtgccaatgctggatgtaaacccaaagttcctccacagtctgtgaggcatatgggaaagatcccattgcaaagtcaagagagaatcctttggcagagctctattaggaggcttatataagatgggaagtgtttactggaggctttttggtgacatttgtgacataaaactcatcagagctgactccataccctctttattccctttctgtccccaacccagggaaaactgaatctgccctcactgaagactgaccgtgctctgaaatctgctggccttgttcattttagtaacggttcctgaattctcttaaattctttgagatccaaagatggcctcttcagtgacaacaatctccctgctacttcttgcatccttcacatccctgtcttgtgtgtggtacttcatgttttcttgccaagactgtgttgatcttcagatactctctttgccagatgaagttatttgctaactccagaaattcctgcagacatcctactcggcca

SEQ ID NO: 702715 - DNA, 1736 bp, Homo sapiens
aactccatatgcatttttgcaacctctgttctagtctcttcaatatgaagtagtagtagatctgataatgctcaggcaacagaatcttctgccttgagttagtaggagatagtaggcacaaggattttaggtagtgagagtttgggtggaatatggggtgtgcaagaaagcgtagtcgaaattaagaaggagcatccagtgaggtaggatgaaaagggattatggtattgtggaaatcaagtgtcttgacctagtttcactccaaaagcagaaactgagatgggtgctttcttacaggtaattcatttgcacacctgttagcaagaaacagaagttgaaggactggaacaagtgaactaggaaagagggaacgccaatccaagggtgcgttattgagctgctcacttctgtgagcaactggggcttgatcctgaggaagccctgtgagaaagcaataaagatatgccttttgctgggaagaaggtggtatttatttgctagatcccatctctcgttggtcaagggttgcccatggtgttaacaccttcaaattttcaggtttgtttatatctctggatagctgaagaattcctgtagacgtctcctattgcaaagccccagagcagaaagtgaaccacagatagtacaatcrggaggaggtacctcagctagagtgaaaacatgaggctttttcctgatagagtgatccataccttcttctccaaggggttaatgtctttatttgcttcttataaccttatttgcaaagttatactcattctgaagattccattttacctaaaattgtgtgtttgaaatagtaaaaccaagcccggcatggtggctgatgcctgtaatcccagcactatgggaggccaaagcaggaagctcacttgagcaccaggaattggagaccagcctgagcaaaatagcgagaccctctttctgcagaaatgaatgaatgaatgagtgaaataataaaaccaatcctagagagggctttgtggttcacttgaattttgccaaatgtgtccctggcaaataataggttatggtcacggaataaggattttaataccttgagtaaaactgattattaatacattgaaactgaatgaacttaaactgtgataagaaatataaatatgcctcttttcatagttttaggcccctgctgtaagactaaagaggaataactaactttccttttcttaccctttgcttcataagctatgatgagaattgtgtacttgtcttcgtacactttttactctctgagtatgttgacggtgacaactgggttgtcttacctattgttgtttccagggcttaatatgatgccttactctaaataggtcctccataaatggtggttgagttaatccaaggaaataaataaatatatgtgtgtatgtataaaatgtgcacgtgcatgatggcattcgtaaactttaaagttaactgtaataaaaacttgttttaaagtataataatgttttagactttcttcctttttttctttccttaaacagatagaaggacaaggacagaatcaccagcactggctgaaggtaaatatgtctttgggggaaatgattattcaaatataaatgaaaagttatgatttcaataaaaacttatattaactatatataatttaagggaaatgttctatacacaatattgagttgctaaaaatgttgttaggaaatattgattgtttagtttttggctta

SEQ ID NO: 702716 - DNA, 1736 bp, Homo sapiens
aactccatatgcatttttgcaacctctgttctagtctcttcaatatgaagtagtagtagatctgataatgctcaggcaacagaatcttctgccttgagttagtaggagatagtaggcacaaggattttaggtagtgagagtttgggtggaatatggggtgtgcaagaaagcgtagtcgaaattaagaaggagcatccagtgaggtaggatgaaaagggattatggtattgtggaaatcaagtgtcttgacctagtttcactccaaaagcagaaactgagatgggtgctttcttacaggtaattcatttgcacacctgttagcaagaaacagaagttgaaggactggaacaagtgaactaggaaagagggaacgccaatccaagggtgcgttattgagctgctcacttctgtgagcaactggggcttgatcctgaggaagccctgtgagaaagcaataaagatatgccttttgctgggaagaaggtggtatttatttgctagatcccatctctcgttggtcaagggttgcccatggtgttaacaccttcaaattttcaggtttgtttatatctctggatagctgaagaattcctgtagacgtctcctattgcaaagccccagagcagaaagtgaaccacagatagtacaatcaggaggaggtacctcagctagagtgaaaacatgaggctttttcctgatagagtgatccataccttcttctccaaggggttaatgtctttatttgcttcttataaccttatttgcaaagttatactcattctgaagattccattttacctaaaattgtgtgtttgaaatagtaaaaccaagcccggcatggtggctgatgcctgtaatcccagcactatgggaggccaaagcaggaagctcacttgagcaccaggaattggagaccagcctgagcaaaatagcgagaccctctytctgcagaaatgaatgaatgaatgagtgaaataataaaaccaatcctagagagggctttgtggttcacttgaattttgccaaatgtgtccctggcaaataataggttatggtcacggaataaggattttaataccttgagtaaaactgattattaatacattgaaactgaatgaacttaaactgtgataagaaatataaatatgcctcttttcatagttttaggcccctgctgtaagactaaagaggaataactaactttccttttcttaccctttgcttcataagctatgatgagaattgtgtacttgtcttcgtacactttttactctctgagtatgttgacggtgacaactgggttgtcttacctattgttgtttccagggcttaatatgatgccttactctaaataggtcctccataaatggtggttgagttaatccaaggaaataaataaatatatgtgtgtatgtataaaatgtgcacgtgcatgatggcattcgtaaactttaaagttaactgtaataaaaacttgttttaaagtataataatgttttagactttcttcctttttttctttccttaaacagatagaaggacaaggacagaatcaccagcactggctgaaggtaaatatgtctttgggggaaatgattattcaaatataaatgaaaagttatgatttcaataaaaacttatattaactatatataatttaagggaaatgttctatacacaatattgagttgctaaaaatgttgttaggaaatattgattgtttagtttttggctta

SEQ ID NO: 702717 - DNA, 1299 bp, Homo sapiens
tattttgcttggttgttatgaatataggtgtatcatgtgggcacaaagtaaattacagtatgctgacatgaccaatgaaagtttaagtcttgaggctgtctccaagcctgtccgtatggagaaggctttgcttgtgatcccgtggcaggcaaaacaaaatctgtaatactgaaggccatttagtataatggaaataaatcaaatggttattttaaacccaaaggaactatagctactttgctttatatggggagtgacaaactcatatcaagagaagtcaatcaataccattcccttctctggagagtctaattggggctgactaaagcaaagacctggatttcagtggctctctctagtaccactacagggaaagagcaatactagatagccccttgtttacaccagcctgttgatgtgtctgtggttatgcaagggtggagagcataactcttctgtctaataaagtgaaaggaatagaaatttgaggaaagctctgaagcagcagcaccagtgggataactgtataaattaccttgttatccccagacctttaatagaaagtgctacacactcacctgatgtttttggagggctgggggaatcaaggagaaagttctttattcagcttcaggggttatgtggcacagtacagacacagctcttgtgggaaggcatcacaattaataacgtaaccttagaagaagcaattcagagtcagaattggccaggaaaagcacataccatcctcaccttccccttccctgttagaatttatggtaagaatgaggaatatggsgttaccaccacgtgtgggataaggctcaagtccattccactgagttgaaaaagacaaggcacctcagctgatgcctaaggtactctagtaatgggctgagaaattggtaggaagacgggtgcccttgcaggctcagatactgttacatgcccctgagcaaaattcaggattgcagagcaggaatgcactctactctctacttcttgcaaagaaaggatctcgttaactctggagaagagatttatttttttctatagaattgttgttatgtaattacacataaaacatatgtctagcttcttaaagggaactggcttcaaatgagaaaatttatcaaaatttcctttcaaagtgtttatcacttgctaacatgcatatttcatactcgagctcgctgtttggataagagattcataacttcattgaaaacactgtcttatttcttgaaagcagagaaaaggtgtgcaaggagacaggctcgctcttagatatagcttaaa

SEQ ID NO: 702718 - DNA, 577 bp, Homo sapiens
gaaatcaaataaataggttcagataagagcaggattcagaatctgggctacaacaagcagatattccaccaaattgttttagtcagaaaatctcatcttcaggtatgatctcctcaaccttctcattctctaaggcatacacttttgttaagtctttctttttgaaatttcattcaattttcacacacaattttttttaaattggatactggagatgactgtacttttactttgtatttatttaaaatattttcaaaattttattttttattaacaaataataactttacatattcatggggtacatattttgatatgtacaatgtatagtgatcagttaagggtaattagcatgtccatctcaaacatttacaagagaagttggaacaatccagaatcagtgggcaccacattctcttacacagttaaacactcatttttctccataccttcctatttctttttacatgttttttatttatttatttatttatttatttatttttattagtaagctacattcaatcatattttaaycatatttttaaaagataatacatcatgaaaaagtagaatt

SEQ ID NO: 702719 - DNA, 1160 bp, Homo sapiens
taaactttattctggaacaattttattaatctctttaaagcttaaaattaacagatatttaaaataaaatatttctagggtatttcatctgtgtggattaaaaaagaaaaagtaaattatgtaaagcaaaataagtggtataaagagaaattgcactggacacctgtgaaaacacagcaagacaggttatttgagctactgctgtggaagagagagacttcagtatagaagatgcacaacactgaataccaccgggatagtgggggatgtgtagagaattacagcatgaaagcatcagtggatggaaaattactaagaggaacttgattagatgcaagtgtgaggggaagaaaaaacaatcaaaggtagcagggattctcctaaactcgcctrgaaggataactgctgaaacaaaactcagcaggctaaggacaatgaacggctagaacgaaagaggggtcggaggagattgactgaagtttggttaaggaggaagtcgttgtcagtggagaaaaaatcctttacacatgtgcaaaagtaataggataggaaggtcaaactattttgtacattactgtttgttcactgtcattcaaggagtttggtctcatgattgcatacgattttaaagctggcacttcccatataagtcattcacgtctttaatgtgaagattccaagtcttctccaaactgaacaaactgctttaatagattaattcaactacatgaatttaaattagattttgaaaggtgccctactgtcctagaaattttagttttctctttggaatcaatgagtcattaattggtcccttcaagtcactaaaacgaacatgttacccctaaaactcttctccgttccaaactctctcccactaccaacacccatcactgttatttaaatataataatggtcccagaaaagataagaagggatcaacttacaaagtgaatatttatttgatcctctctttccttgttcttactgctctagcatgagcttttctcctgcctctaaactatttgacaccagtcagagccaaccacatgactctgaaacgtggtaatcaagggacaacccaaactttgataagctgatgcttgcagtttccttaaataattttcttagtctgtgtaagctacgctatatttgactga

SEQ ID NO: 702720 - DNA, 1042 bp, Homo sapiens
tgctcttgtctgttccgcacaaaggaaaatatcctgaaaatgtgcatcatacaggcaaaagagttcccaattcagctggaacttcagtgacataaaacaataatagacaaattaaaaagcaaattcaagtttttctgacggagcccgtggtgctaataccatttattctgaccctgtatgaattttctgccattggagtgaaattaccagaattcaatttgcaagcgaacaaaagaaaaggaaaaaaatttaatttactttatgtagcagcaaaatgattgcatcataggcaatgttcaagatttgtcttcaaaaagatgggaaaataatcttgtaatatatctccctatatggrttagaaagattcaagtgagcacctaataaaaaagcatcttattaatgcttacgtttgcaacgcttcactagcagctttaaagacaaatccagtacattctcttctccagtaatggttacacatattacattctttctttaaatggaacttctttaatatcatacataactttaaggcatccctctttttcacatgtggaagcacctgaattatctttattaattgcctgataaagccttgctttatcaattgacttaaaatgattgtatagtatgtatcaacttaatgtctaaatgtcatgaggacactatttgaaataaattcacttaatcagatatatacatatatagagtgtgacttttaaatgtcagcacaacagaaatatgaatataaactcttatgagcaagtaatagatacaattcacttattgccatatatatttattatataaaatatgatgtgttcttaattcaaaaaatggcaaatgcacataaaacaatcttggaaactaaattttgcaactggttcaaatcgatttaggttactgttacaaaattccatgcaagagagattaagggatttttcttgtaaagtataaaaggagaaatgaaagtctgaacgatttcagggaaaaagaattaaaccttcatacaaagaaatgattctgaacagaacataaatggaat

SEQ ID NO: 702721 - DNA, 1042 bp, Homo sapiens
tgctcttgtctgttccgcacaaaggaaaatatcctgaaaatgtgcatcatacaggcaaaagagttcccaattcagctggaacttcagtgacataaaacaataatagacaaattaaaaagcaaattcaagtttttctgacggagcccgtggtgctaataccatttattctgaccctgtatgaattttctgccattggagtgaaattaccagaattcaatttgcaagcgaacaaaagaaaaggaaaaaaatttaatttactttatgtagcagcaaaatgattgcatcataggcaatgttcaagatttgtcttcaaaaagatgggaaaataatcttgtaatatatctccctatatggattagaaagattcaagtgagcacctaataaaaaagcatcttattaatgcttacgtttgcaacgcttcactagcagctttaaagacaaatccagtacattctcttctccagtaatggttacacatattacattctttctttaaatggaacttctttaatatcatacataacttyaaggcatccctctttttcacatgtggaagcacctgaattatctttattaattgcctgataaagccttgctttatcaattgacttaaaatgattgtatagtatgtatcaacttaatgtctaaatgtcatgaggacactatttgaaataaattcacttaatcagatatatacatatatagagtgtgacttttaaatgtcagcacaacagaaatatgaatataaactcttatgagcaagtaatagatacaattcacttattgccatatatatttattatataaaatatgatgtgttcttaattcaaaaaatggcaaatgcacataaaacaatcttggaaactaaattttgcaactggttcaaatcgatttaggttactgttacaaaattccatgcaagagagattaagggatttttcttgtaaagtataaaaggagaaatgaaagtctgaacgatttcagggaaaaagaattaaaccttcatacaaagaaatgattctgaacagaacataaatggaat

SEQ ID NO: 702722 - DNA, 626 bp, Homo sapiens
cactttaccctaatgccccgtgtttcatgagattctctagtcaagctggttggaacagaagtggttttggccctgagttatctttgagaaatgttcattttcatcttctaaggtgctttattgctgacctgttgccattttctatagattggtgctaaacttgtyagctggtgatatggtttggctgcgttcccacccaaatctcgtcttgaattgtagctcccacaattcccacatgttgtgggagggaccaggtgggaggtaattgatcacgggggtgggtctttcctgtgctgttcttgtgatatgaataagtctcatgagatctgatggttttataaaggggagctctcctgcatacactctttttgcctgctgccatgtaagacatgcctttgctctcctttgctttcctccatgactgtgaggcctccccagccatgtggaactgtgagttcatgaaacctctttcctttataaattacccagtctcaggcaactctttattagcagtgtgagaatgaactaatacgggtggttatttccccatccttgtgtattttcttcatacatatgcagtgatagacacttggaggaaaacttcagcagttccctctgcagatctc

SEQ ID NO: 702723 - DNA, 551 bp, Homo sapiens
agtaggaagaaggacacaccacatagcaatgtgctactcgtttgaggtactcatggagcagctctccatcaaacagytcagaaaagcatgcagagctggagaaccaagactttttaggcatttgtgtataagcaatagataaaatatctatgacaaaggacagagaaaaacaccccacatctccaaagtcctggtctgctgaagggtggtgggatgggaggaaggctggtaaaccccgctacatggagacacaaatgaacacagagagagagagagagaatgaagagaggaaaaatgttatcatcttcccatggaaacaaatgaaaagtgagcatgagagaacgtttgacacaggaattgggacctagtgactttgtgtgtgtgtgtgaagcagggtaaacaaaaatcacaagaaatctaactgaacctcactgatattttcaaatgatggaacagagtttgctgcagaaatgaagcaaaagggaatgggaatgggggctagcgaagaaagagtaactgtgggagatgttcttttgggactcttgtagcaa

SEQ ID NO: 702724 - DNA, 1266 bp, Homo sapiens
ttctacttttatatttcatgcaactccctaaatttgttccagctctggatagggtcaaggccatctcctgtggcctggattttcagattccctggtggggatgtgtgctccccaaacaattttttgaaaacaaaaaattattttgttatcaaaataatttgaacagcaggcctttcacactctggaaacttaaaatttttcacttgtcttatggagtaggctgaagcctagtgattcattcaaagggcatgtggattctttcagttttttaagttcctatggtggttcttggaaaaataaaatcacaatgtgaatctctacctgttattctgtccttccacatgggaagggcacactaacactgcctcctcgccatgatcttgaaaaaatattattttcttttgggtttagtttattttttgtagtaaaacatttcattttttttctcatttccttttatgtatattgtataggtatttcctttatggttgccrtgcgaattacattttacatactaaaattaaaacactctaatgtgaatttttataatgtagtaccttcgcaaatcagggtttccctcttctccagggttttatttatttatttatttatttatttttaaattcttttagactgcatcagtccaaggcataagcttaatttcaataacatatagagtatgcttctatgaagctatgccctaccccctttagtttatgtcatgaaactatacccctatacatcatgtatctaaaaacatagactaataattttaatgcattagtttcttaaatcatgtaaaaacaaaaagtgtaattataaaccacaattactatatttttagattttataattagtcaccatttcctgtgatgcagggaactacttttacttggttccaagctgattccagttggggtttggagtagtagaaacctttccgtctattctctatgtggccatcctgagtttctgtgttcaccaggatttttgtcactcctctcatacagtccagcactctctctcagctattttcatttaaatgtaatcgtttattaattgttctggctgcctatgtgaagggggattaggactagcagcttctagccagccatcttgataatgtcacctgcccatacattttctttaccatgatctctatttcattagaaatcttttagtttttgagtactactgtttttcattaaagggaacactctagtatttcttgcaggataggtctggtggtaacaatgtccctcagcg

SEQ ID NO: 702725 - DNA, 1266 bp, Homo sapiens
ttctacttttatatttcatgcaactccctaaatttgttccagctctggatagggtcaaggccatctcctgtggcctggattttcagattccctggtggggatgtgtgctccccaaacaattttttgaaaacaaaaaattattttgttatcaaaataatttgaacagcaggcctttcacactctggaaacttaaaatttttcacttgtcttatggagtaggctgaagcctagtgattcattcaaagggcatgtggattctttcagttttttaagttcctatggtggttcttggaaaaataaaatcacaatgtgaatctctacctgttattctgtccttccacatgggaagggcacactaacactgcctcctcgccatgatcttgaaaaaatattattttcttttgggtttagtttattttttgtagtaaaacatttcattttttttctcatttccttttatgtatattgtataggtatttcctttatggttgccgtgsgaattacattttacatactaaaattaaaacactctaatgtgaatttttataatgtagtaccttcgcaaatcagggtttccctcttctccagggttttatttatttatttatttatttatttttaaattcttttagactgcatcagtccaaggcataagcttaatttcaataacatatagagtatgcttctatgaagctatgccctaccccctttagtttatgtcatgaaactatacccctatacatcatgtatctaaaaacatagactaataattttaatgcattagtttcttaaatcatgtaaaaacaaaaagtgtaattataaaccacaattactatatttttagattttataattagtcaccatttcctgtgatgcagggaactacttttacttggttccaagctgattccagttggggtttggagtagtagaaacctttccgtctattctctatgtggccatcctgagtttctgtgttcaccaggatttttgtcactcctctcatacagtccagcactctctctcagctattttcatttaaatgtaatcgtttattaattgttctggctgcctatgtgaagggggattaggactagcagcttctagccagccatcttgataatgtcacctgcccatacattttctttaccatgatctctatttcattagaaatcttttagtttttgagtactactgtttttcattaaagggaacactctagtatttcttgcaggataggtctggtggtaacaatgtccctcagcg

SEQ ID NO: 702726 - DNA, 656 bp, Homo sapiens
attggataatgcccacccacatcatggagggtcatctgctttcctcagtctactgattcaaatcttaatcacgtctaacagatgccttcacagcaacatttagactggtattgaccaaacaactgggtactacggcctggccgagttgacacatgtaattcaccattgtactaccccatcttgggaaagctctagatgtccttaactgcaatgaataattcctataatgacaccaccagytgacagttggaaatgctctttaattagctcatggttctcatgcttacccaaggtcatggcgtcctttcttatatggccacatcccagcaaagtcagcagtcacttctggtgaatgatttgatgagcacgaaaaggcaacatccaccccaactccccccaaaatatttctccttttctcttccagaaaccttaacatactacatcactcactttgggggttaaattgtgaaccgcagaagtctaagctggtggacattgctccggcaacgtgagggagtaggtgaagctgattttttcagagccagtggtagtcattggtgctgttgctctcacttccagtgcagagcaggtttgtgcctcaccctctgtgagttaactatggccacaggcctgctttggcaatggaggtgaggatg

SEQ ID NO: 702727 - DNA, 1000 bp, Homo sapiens
catctcttgggtaaacgtttcccaaactgaggaataacaagagcaacgtttggaggcagaaaagtatctgtcacattcaaagaacagcaaggaaaccaggtggctggagcagaggtgaataagtgcgaagttctggaagctgaggtcaaaaaggtaagtgcagattttatcacatagggctttagagccattccaggtgccttgcttttactctgaagtgggaaactaccagaggcttttgggtataggagtcgtgtgacctgactttgattttaacagaatcactccagctgctctgttgactatgaccaaaggaggacaagggcagacataggaaggccagtgaaggttgcattaaatgcaatgaagtttgactagatatttatctgccccagcctctggtccttaagtttatacatctaagctaagatactgttagcggraaagaaggagcaaagcaacgtgcaacaaatctatgtcattttttggcaacaagtcataaaaatttttgaggggtaaagagagaaaatattaagaagtgttctccttcacctttctttctctctctttctagccaagctttccatgctcacctaaactggtggcatttttgtctttgatgtgactgattttgaggtgaaggaatgaatctatgacttggtggtactcctgctggccttctatcgatccgtgaattaaaaaggaaagaaaaatttcctaagaaggaccaaagggagttaggaaaggtggtttataaagtgggagagataatcctagacggatgtacaagggcgaaagaaaatcctatgacttgatcttgttaggaagctgacctagaaagactgggctttgtaagaagccttgatcaagagttacaagaaagggaacatataaaaatgctggaaaggttttcaacctcaacattatcactgggagggatccctcatagttggatcttgaattttggggaattaaagcacagagggtaccatcctaattc

SEQ ID NO: 702728 - DNA, 1384 bp, Homo sapiens
attagcaatttttccagatcttctccttcccctgacccagcccaccaacaggccccagtgtgtgttgttccctgccgtgtgtccatgtgttctcatcaatcagttcccacttataaataagaacatgcggtgtttggttttctgttcctgtgttagtttgctgaggataacggcttccagctccatccatgtccttgcaaaggacatgatctcattccttttatggctgcacaatattccattgcrtatatgtaccacattttctttatccagtctatcatctatgggcatttatgaatgattttaagtcagtagaatgtaattatttcttataatagacattttaagatcattgattccatgaagcactggtgccacattttacctactaggtgcaaatgatgtttgagttaggcaaatgacattgtgagaggagataagcaatcttgttcttcaggcaattgtcatataactaaagtaaatcattacacagtgcataggaaattttatgaaacaatctgatttttttaaaaaaggaaagaaatggaaaaataatcttgattaataattcttaaatatattaaactgaatattttaactaccctgcgcttttgaaaacaagaaagaaaaaataatcactaaatttctactatgatgggagagaaggcatagaaggttttcggaatgaatataaatttgaatataaatttgggaatgaatataaatttccaacaaaagccatattttaaatatcttcctcagtatgctgtgtgacacacctattatagcctgcaaagagtagactgtcttagaaagccaagtttgtgtctgagtagtactcagtcctcaagagtgatgagaaggctgtcagaaagagttaaaaaaaacctttcagcctaataaatagaatgtgattttgagagaataagctcaaaaatctatgacatcttcatgagtaaattgtatagaataacagtgacagcacatatgtaaggaggataataatgatgcagtccacaatcaaagtttatctatttatagcttcttgagtcttttgcttttgaaaccttttgtcttatctcctccttccttttctttttcttttttttatcattatgctttaagttctagggtacatgtgcacaatgtgcaggtttgttacatagctatacatgtgccatgggttaagttgtgaaaatgtctagcattagatattgcagtaacaactaggcgatcagctatttgattccctgcagtcaaggtcctggaagagatgtatgagccctaatatgagtaatgtaaaaagggtgcattctactcctaactgctgtttgcaattgggtaaataaataaataaagtcatcagttattcatctgtatgaaa

SEQ ID NO: 702729 - DNA, 1384 bp, Homo sapiens
attagcaatttttccagatcttctccttcccctgacccagcccaccaacaggccccagtgtgtgttgttccctgccgtgtgtccatgtgttctcatcaatcagttcccacttataaataagaacatgcggtgtttggttttctgttcctgtgttagtttgctgaggataacggcttccagctccatccatgtccttgcaaaggacatgatctcattccttttatggctgcacaatattccattgcatatatgtaccacattttctttatccagtctatcatctatgggcatttatgaatgattttaagtcagtagaatgtaattatttcttataatagacattttaagatcattgattccrtgaagcactggtgccacattttacctactaggtgcaaatgatgtttgagttaggcaaatgacattgtgagaggagataagcaatcttgttcttcaggcaattgtcatataactaaagtaaatcattacacagtgcataggaaattttatgaaacaatctgatttttttaaaaaaggaaagaaatggaaaaataatcttgattaataattcttaaatatattaaactgaatattttaactaccctgcgcttttgaaaacaagaaagaaaaaataatcactaaatttctactatgatgggagagaaggcatagaaggttttcggaatgaatataaatttgaatataaatttgggaatgaatataaatttccaacaaaagccatattttaaatatcttcctcagtatgctgtgtgacacacctattatagcctgcaaagagtagactgtcttagaaagccaagtttgtgtctgagtagtactcagtcctcaagagtgatgagaaggctgtcagaaagagttaaaaaaaacctttcagcctaataaatagaatgtgattttgagagaataagctcaaaaatctatgacatcttcatgagtaaattgtatagaataacagtgacagcacatatgtaaggaggataataatgatgcagtccacaatcaaagtttatctatttatagcttcttgagtcttttgcttttgaaaccttttgtcttatctcctccttccttttctttttcttttttttatcattatgctttaagttctagggtacatgtgcacaatgtgcaggtttgttacatagctatacatgtgccatgggttaagttgtgaaaatgtctagcattagatattgcagtaacaactaggcgatcagctatttgattccctgcagtcaaggtcctggaagagatgtatgagccctaatatgagtaatgtaaaaagggtgcattctactcctaactgctgtttgcaattgggtaaataaataaataaagtcatcagttattcatctgtatgaaa

SEQ ID NO: 702730 - DNA, 1384 bp, Homo sapiens
attagcaatttttccagatcttctccttcccctgacccagcccaccaacaggccccagtgtgtgttgttccctgccgtgtgtccatgtgttctcatcaatcagttcccacttataaataagaacatgcggtgtttggttttctgttcctgtgttagtttgctgaggataacggcttccagctccatccatgtccttgcaaaggacatgatctcattccttttatggctgcacaatattccattgcatatatgtaccacattttctttatccagtctatcatctatgggcatttatgaatgattttaagtcagtagaatgtaattatttcttataatagacattttaagatcattgattccatgaagcactggtgccacattttacctactaggtgcaaatgatgtttgagttaggcaaatgacattgtgagaggagataagcaatcttgttcttcaggcaattgtcatataactaaagtaaatcattacacagtgcataggaaattttatgaaacaatctgatttttttaaaaaaggaaagaaatggaaaaataatcttgattaataattcttaaatatattaaactgaatattttaactaccctgcgcttttgaaaacaagaaagaaaaaataatcactaaatttctactatgatgggagagaaggcatagaaggttttcggaatgaatataaatttgaatataaatttgggaatgaatataaatttccaacaaaagccatattttaaatatcttcctcagtatgctgtgtgacacacctattatagcctgcaaagagtagactgtcttagaaagccaagtttgtgtctgagtagtactcagtcctcaagagtgatgagaaggctgtcagaaagagttaaaaaaaacctttcagcctaataaatagaatgtgattttgagagaataagctcaaaaatctatgacatcttcatgagtaaattgtatagaataacagtgacagcacatatgtaaggaggataataatgatgcagtccacaatcaaagtttatctatttatagcttcttgagtcttttgcttttgaaaccttttgtcttatctcctccttccttttcyttttcttttttttatcattatgctttaagttctagggtacatgtgcacaatgtgcaggtttgttacatagctatacatgtgccatgggttaagttgtgaaaatgtctagcattagatattgcagtaacaactaggcgatcagctatttgattccctgcagtcaaggtcctggaagagatgtatgagccctaatatgagtaatgtaaaaagggtgcattctactcctaactgctgtttgcaattgggtaaataaataaataaagtcatcagttattcatctgtatgaaa

SEQ ID NO: 702731 - DNA, 2564 bp, Homo sapiens
  misc_feature 1227, 1228, 1229, 1230, 1231, 1232, 1233, 1234, 1235, 1236,1237, 1238, 1239, 1240, 1241, 1242, 1243, 1244, 1245, 1246,1247, 1248, 1249, 1250, 1251, 1252, 1253, 1254, 1255, 1256,1257, 1258, 1259, 1260, 1261, 1262, 1263, 1264, 1265: n = A,T,C or G
  misc_feature 1266, 1267, 1268, 1269, 1270, 1271, 1272, 1273, 1274, 1275,1276, 1277, 1278, 1279, 1280, 1281, 1282, 1283, 1284, 1285,1286, 1287, 1288, 1289, 1290, 1291, 1292, 1293, 1294, 1295,1296, 1297, 1298, 1299, 1300, 1301, 1302, 1303, 1304: n = A,T,C or G
  misc_feature 1305, 1306, 1307, 1308, 1309, 1310, 1311, 1312, 1313, 1314,1315, 1316, 1317, 1318, 1319, 1320, 1321, 1322, 1323, 1324,1325, 1326: n = A,T,C or G
ggccagtttgaggcaggggcccacgctgacctccctcagcgtgagagaggccagtgtgaggcaggggctcacgctgacctccctcagcgtgagagaggccagtgtgaggcaggggctcacgctgacctccctcagcgtgagagaggccaatgtgaggcaggggctsacgcctctggaaagggtgccagaggcatgagttgggcctcaacaggccaccttgacggaggagctgggccgcacacaggctgctgggaggcaggcagggacttggtcccgggaggccgccgtgaggcgagagctgggcctggagacgcccctgggaggcaagagcggggcctgcagaggctgttctccagccagacctgggcctgtacaggccaccgggaggcaggaggtgggactgaggagcttcgctggagaaagttcagggtctacaaaagccggcgggagctgggcaggagctgagccaaaagagcttgcttgctgggaggccggagctgggcctggagaggctgacttcaggaccacttgggcctgcagaggccgccgggaggcccaagctgggcctggagaagcccaccgaccggaggccgtttggggcctggagacgccgtcggagggcaggagctgagcctggagaggccaccgtgaggcctgagctgggcctggggagcttggcttgaggaagctgtgggccgaccaaggccaccacgagctgggcaggcactgagtccaaagaggttgttgggaggcaggagtcgggcctgcagacgcagccgggaggaagagctgggcccggagaggacgccgggaggctgtaagtgggtctggagaggccgacttgaggagcttctgggcccggagaggccgccggaagggaaaaactgggccgggaaaggccgttgtgaggaatgagccccatgggcctgaggaggccactggcaggcgggagctgggcctgccgaagcggcggagaggccggagctttggactcgggaggccgcaggcgagagcgagctgggcgtggagagtccgctgtgaggcagaggctgggcctgtgcaagctttcgggaggcagcctgcagaggctgactggaggtcaagtttggggcctgcagaggccgcggaaagtcagaagcggggcctgggaaggccgccgggaggcatgagctgggctgggctgaaagaggccactgggagacaggaggagctggaccggagagacgnnnnnnnnnnnnnnnnnnnnnnnnnnnnnnnnnnnnnnnnnnnnnnnnnnnnnnnnnnnnnnnnnnnnnnnnnnnnnnnnnnnnnnnnnnnnnnnnnnnnacaaacatccatgtgaccatatgattcctcccttttttttaacatgagagtatcacatatgcatcctgattgatagcctgctttttgcttggcatttgttccattactcccataatttaaatgcttgtattcatatttagtgaaatgttaataactgctagtacgtaaaagagagtttcttctagtaattttcactaaccaagatgaatttcagaaataaaattcttaacattatcattgtttcttggtatggaaatttcagaagcaggttgaactgaaaaaagtccaagaggaatagagaaatatcacaaggaagtgaatctggactgtagtagagataaatattaatacttacagataatgcttactatgtgctaggcagtgttctaaatgttttacatatattattgaagtctcacaacagtcccatgaggcaggtagcttttatcaccattttacacatgagaaaactgagcaacgcagactaacacttgatccaggtagtacagtggcagaggcctgattctaacccaggcagtctggctcaagagtccaagctctttaccaccactctttctgtcttcctttcttgtcttcttttttctttctttccctccctccctcctttcttcccttcctttcttttccttccctccctccctccctcctttctttttttcttttctttctccttcttttccttttctttcttttcatttttttgagacattggctcactctgtctccccaggctgagtgcagtggtgcagtcacggctcactgcagcctcaacctccctgggtcaagtgatcctcccacctcagcttcctgagtagctgggtctacaggtgcacaccaccatgcctggctaattttttctatttttcatagtgacaaggtctcactttgttgtctgggctggtctcaaactcctgacctcaagcaatcctcccaccttcacccaccaaagcactgagattataggtgtgagccaccacacccagccttttaccactgctttaaattccatttagatctaatattgatagaatgataaccatatcaaccagatttttaaaatatgcaaacaatggtgccattttttgtatctgtacgacaaaaatatatagagtttgtattatagcttttatctgtttagagcactcttgggaaaggcagggaaattactgtgaaggtattggtattcgagaagtaagttcctggagtgtttgccttct

SEQ ID NO: 702732 - DNA, 2564 bp, Homo sapiens
  misc_feature 1227, 1228, 1229, 1230, 1231, 1232, 1233, 1234, 1235, 1236,1237, 1238, 1239, 1240, 1241, 1242, 1243, 1244, 1245, 1246,1247, 1248, 1249, 1250, 1251, 1252, 1253, 1254, 1255, 1256,1257, 1258, 1259, 1260, 1261, 1262, 1263, 1264, 1265: n = A,T,C or G
  misc_feature 1266, 1267, 1268, 1269, 1270, 1271, 1272, 1273, 1274, 1275,1276, 1277, 1278, 1279, 1280, 1281, 1282, 1283, 1284, 1285,1286, 1287, 1288, 1289, 1290, 1291, 1292, 1293, 1294, 1295,1296, 1297, 1298, 1299, 1300, 1301, 1302, 1303, 1304: n = A,T,C or G
  misc_feature 1305, 1306, 1307, 1308, 1309, 1310, 1311, 1312, 1313, 1314,1315, 1316, 1317, 1318, 1319, 1320, 1321, 1322, 1323, 1324,1325, 1326: n = A,T,C or G
ggccagtttgaggcaggggcccacgctgacctccctcagcgtgagagaggccagtgtgaggcaggggctcacgctgacctccctcagcgtgagagaggccagtgtgaggcaggggctcacgctgacctccctcagcgtgagagaggccaatgtgaggcaggggctcacgcctctggaaagggtgccagaggcatgagttgggcctcaacaggccaccktgacggaggagctgggccgcacacaggctgctgggaggcaggcagggacttggtcccgggaggccgccgtgaggcgagagctgggcctggagacgcccctgggaggcaagagcggggcctgcagaggctgttctccagccagacctgggcctgtacaggccaccgggaggcaggaggtgggactgaggagcttcgctggagaaagttcagggtctacaaaagccggcgggagctgggcaggagctgagccaaaagagcttgcttgctgggaggccggagctgggcctggagaggctgacttcaggaccacttgggcctgcagaggccgccgggaggcccaagctgggcctggagaagcccaccgaccggaggccgtttggggcctggagacgccgtcggagggcaggagctgagcctggagaggccaccgtgaggcctgagctgggcctggggagcttggcttgaggaagctgtgggccgaccaaggccaccacgagctgggcaggcactgagtccaaagaggttgttgggaggcaggagtcgggcctgcagacgcagccgggaggaagagctgggcccggagaggacgccgggaggctgtaagtgggtctggagaggccgacttgaggagcttctgggcccggagaggccgccggaagggaaaaactgggccgggaaaggccgttgtgaggaatgagccccatgggcctgaggaggccactggcaggcgggagctgggcctgccgaagcggcggagaggccggagctttggactcgggaggccgcaggcgagagcgagctgggcgtggagagtccgctgtgaggcagaggctgggcctgtgcaagctttcgggaggcagcctgcagaggctgactggaggtcaagtttggggcctgcagaggccgcggaaagtcagaagcggggcctgggaaggccgccgggaggcatgagctgggctgggctgaaagaggccactgggagacaggaggagctggaccggagagacgnnnnnnnnnnnnnnnnnnnnnnnnnnnnnnnnnnnnnnnnnnnnnnnnnnnnnnnnnnnnnnnnnnnnnnnnnnnnnnnnnnnnnnnnnnnnnnnnnnnnacaaacatccatgtgaccatatgattcctcccttttttttaacatgagagtatcacatatgcatcctgattgatagcctgctttttgcttggcatttgttccattactcccataatttaaatgcttgtattcatatttagtgaaatgttaataactgctagtacgtaaaagagagtttcttctagtaattttcactaaccaagatgaatttcagaaataaaattcttaacattatcattgtttcttggtatggaaatttcagaagcaggttgaactgaaaaaagtccaagaggaatagagaaatatcacaaggaagtgaatctggactgtagtagagataaatattaatacttacagataatgcttactatgtgctaggcagtgttctaaatgttttacatatattattgaagtctcacaacagtcccatgaggcaggtagcttttatcaccattttacacatgagaaaactgagcaacgcagactaacacttgatccaggtagtacagtggcagaggcctgattctaacccaggcagtctggctcaagagtccaagctctttaccaccactctttctgtcttcctttcttgtcttcttttttctttctttccctccctccctcctttcttcccttcctttcttttccttccctccctccctccctcctttctttttttcttttctttctccttcttttccttttctttcttttcatttttttgagacattggctcactctgtctccccaggctgagtgcagtggtgcagtcacggctcactgcagcctcaacctccctgggtcaagtgatcctcccacctcagcttcctgagtagctgggtctacaggtgcacaccaccatgcctggctaattttttctatttttcatagtgacaaggtctcactttgttgtctgggctggtctcaaactcctgacctcaagcaatcctcccaccttcacccaccaaagcactgagattataggtgtgagccaccacacccagccttttaccactgctttaaattccatttagatctaatattgatagaatgataaccatatcaaccagatttttaaaatatgcaaacaatggtgccattttttgtatctgtacgacaaaaatatatagagtttgtattatagcttttatctgtttagagcactcttgggaaaggcagggaaattactgtgaaggtattggtattcgagaagtaagttcctggagtgtttgccttct

SEQ ID NO: 702733 - DNA, 2564 bp, Homo sapiens
  misc_feature 1227, 1228, 1229, 1230, 1231, 1232, 1233, 1234, 1235, 1236,1237, 1238, 1239, 1240, 1241, 1242, 1243, 1244, 1245, 1246,1247, 1248, 1249, 1250, 1251, 1252, 1253, 1254, 1255, 1256,1257, 1258, 1259, 1260, 1261, 1262, 1263, 1264, 1265: n = A,T,C or G
  misc_feature 1266, 1267, 1268, 1269, 1270, 1271, 1272, 1273, 1274, 1275,1276, 1277, 1278, 1279, 1280, 1281, 1282, 1283, 1284, 1285,1286, 1287, 1288, 1289, 1290, 1291, 1292, 1293, 1294, 1295,1296, 1297, 1298, 1299, 1300, 1301, 1302, 1303, 1304: n = A,T,C or G
  misc_feature 1305, 1306, 1307, 1308, 1309, 1310, 1311, 1312, 1313, 1314,1315, 1316, 1317, 1318, 1319, 1320, 1321, 1322, 1323, 1324,1325, 1326: n = A,T,C or G
ggccagtttgaggcaggggcccacgctgacctccctcagcgtgagagaggccagtgtgaggcaggggctcacgctgacctccctcagcgtgagagaggccagtgtgaggcaggggctcacgctgacctccctcagcgtgagagaggccaatgtgaggcaggggctcacgcctctggaaagggtgccagaggcatgagttgggcctcaacaggccaccttgacggaggagctgggccgcacacaggctgctgggaggcaggcagggacttggtcccgggaggccgccgtgaggcgagagctgggcctggagacgcccctgggaggcaagagcggggcctgcagaggctgttctccagccagacctgggcctgtacaggccaccgggaggcaggaggtgggactgaggagcttcgctggagaaagttcagggtctacaaaagccggcgggagctgggcaggagctgagccaaaagagcttgcttgctgggaggccggagctgggcctggagaggctgacttcaggaccacttgggcctgcagaggccgccgggaggcccaagctgggcctggagaagcccaccgaccggaggccgtttggggcctggagacgccgtcggagggcaggagctgagcctggagaggccaccgtgaggcctgagctgggcctggggagcttggcttgaggaagctgtgggccgaccaaggccaccasgagctgggcaggcactgagtccaaagaggttgttgggaggcaggagtcgggcctgcagacgcagccgggaggaagagctgggcccggagaggacgccgggaggctgtaagtgggtctggagaggccgacttgaggagcttctgggcccggagaggccgccggaagggaaaaactgggccgggaaaggccgttgtgaggaatgagccccatgggcctgaggaggccactggcaggcgggagctgggcctgccgaagcggcggagaggccggagctttggactcgggaggccgcaggcgagagcgagctgggcgtggagagtccgctgtgaggcagaggctgggcctgtgcaagctttcgggaggcagcctgcagaggctgactggaggtcaagtttggggcctgcagaggccgcggaaagtcagaagcggggcctgggaaggccgccgggaggcatgagctgggctgggctgaaagaggccactgggagacaggaggagctggaccggagagacgnnnnnnnnnnnnnnnnnnnnnnnnnnnnnnnnnnnnnnnnnnnnnnnnnnnnnnnnnnnnnnnnnnnnnnnnnnnnnnnnnnnnnnnnnnnnnnnnnnnnacaaacatccatgtgaccatatgattcctcccttttttttaacatgagagtatcacatatgcatcctgattgatagcctgctttttgcttggcatttgttccattactcccataatttaaatgcttgtattcatatttagtgaaatgttaataactgctagtacgtaaaagagagtttcttctagtaattttcactaaccaagatgaatttcagaaataaaattcttaacattatcattgtttcttggtatggaaatttcagaagcaggttgaactgaaaaaagtccaagaggaatagagaaatatcacaaggaagtgaatctggactgtagtagagataaatattaatacttacagataatgcttactatgtgctaggcagtgttctaaatgttttacatatattattgaagtctcacaacagtcccatgaggcaggtagcttttatcaccattttacacatgagaaaactgagcaacgcagactaacacttgatccaggtagtacagtggcagaggcctgattctaacccaggcagtctggctcaagagtccaagctctttaccaccactctttctgtcttcctttcttgtcttcttttttctttctttccctccctccctcctttcttcccttcctttcttttccttccctccctccctccctcctttctttttttcttttctttctccttcttttccttttctttcttttcatttttttgagacattggctcactctgtctccccaggctgagtgcagtggtgcagtcacggctcactgcagcctcaacctccctgggtcaagtgatcctcccacctcagcttcctgagtagctgggtctacaggtgcacaccaccatgcctggctaattttttctatttttcatagtgacaaggtctcactttgttgtctgggctggtctcaaactcctgacctcaagcaatcctcccaccttcacccaccaaagcactgagattataggtgtgagccaccacacccagccttttaccactgctttaaattccatttagatctaatattgatagaatgataaccatatcaaccagatttttaaaatatgcaaacaatggtgccattttttgtatctgtacgacaaaaatatatagagtttgtattatagcttttatctgtttagagcactcttgggaaaggcagggaaattactgtgaaggtattggtattcgagaagtaagttcctggagtgtttgccttct

SEQ ID NO: 702734 - DNA, 2564 bp, Homo sapiens
  misc_feature 1227, 1228, 1229, 1230, 1231, 1232, 1233, 1234, 1235, 1236,1237, 1238, 1239, 1240, 1241, 1242, 1243, 1244, 1245, 1246,1247, 1248, 1249, 1250, 1251, 1252, 1253, 1254, 1255, 1256,1257, 1258, 1259, 1260, 1261, 1262, 1263, 1264, 1265: n = A,T,C or G
  misc_feature 1266, 1267, 1268, 1269, 1270, 1271, 1272, 1273, 1274, 1275,1276, 1277, 1278, 1279, 1280, 1281, 1282, 1283, 1284, 1285,1286, 1287, 1288, 1289, 1290, 1291, 1292, 1293, 1294, 1295,1296, 1297, 1298, 1299, 1300, 1301, 1302, 1303, 1304: n = A,T,C or G
  misc_feature 1305, 1306, 1307, 1308, 1309, 1310, 1311, 1312, 1313, 1314,1315, 1316, 1317, 1318, 1319, 1320, 1321, 1322, 1323, 1324,1325, 1326: n = A,T,C or G
ggccagtttgaggcaggggcccacgctgacctccctcagcgtgagagaggccagtgtgaggcaggggctcacgctgacctccctcagcgtgagagaggccagtgtgaggcaggggctcacgctgacctccctcagcgtgagagaggccaatgtgaggcaggggctcacgcctctggaaagggtgccagaggcatgagttgggcctcaacaggccaccttgacggaggagctgggccgcacacaggctgctgggaggcaggcagggacttggtcccgggaggccgccgtgaggcgagagctgggcctggagacgcccctgggaggcaagagcggggcctgcagaggctgttctccagccagacctgggcctgtacaggccaccgggaggcaggaggtgggactgaggagcttcgctggagaaagttcagggtctacaaaagccggcgggagctgggcaggagctgagccaaaagagcttgcttgctgggaggccggagctgggcctggagaggctgacttcaggaccacttgggcctgcagaggccgccgggaggcccaagctgggcctggagaagcccaccgaccggaggccgtttggggcctggagacgccgtcggagggcaggagctgagcctggagaggccaccgtgaggcctgagctgggcctggggagcttggcttgaggaagctgtgggccgaccaaggccaccacgagctgggcaggcactgagtccaaagaggttgttgggaggcaggagycgggcctgcagacgcagccgggaggaagagctgggcccggagaggacgccgggaggctgtaagtgggtctggagaggccgacttgaggagcttctgggcccggagaggccgccggaagggaaaaactgggccgggaaaggccgttgtgaggaatgagccccatgggcctgaggaggccactggcaggcgggagctgggcctgccgaagcggcggagaggccggagctttggactcgggaggccgcaggcgagagcgagctgggcgtggagagtccgctgtgaggcagaggctgggcctgtgcaagctttcgggaggcagcctgcagaggctgactggaggtcaagtttggggcctgcagaggccgcggaaagtcagaagcggggcctgggaaggccgccgggaggcatgagctgggctgggctgaaagaggccactgggagacaggaggagctggaccggagagacgnnnnnnnnnnnnnnnnnnnnnnnnnnnnnnnnnnnnnnnnnnnnnnnnnnnnnnnnnnnnnnnnnnnnnnnnnnnnnnnnnnnnnnnnnnnnnnnnnnnnacaaacatccatgtgaccatatgattcctcccttttttttaacatgagagtatcacatatgcatcctgattgatagcctgctttttgcttggcatttgttccattactcccataatttaaatgcttgtattcatatttagtgaaatgttaataactgctagtacgtaaaagagagtttcttctagtaattttcactaaccaagatgaatttcagaaataaaattcttaacattatcattgtttcttggtatggaaatttcagaagcaggttgaactgaaaaaagtccaagaggaatagagaaatatcacaaggaagtgaatctggactgtagtagagataaatattaatacttacagataatgcttactatgtgctaggcagtgttctaaatgttttacatatattattgaagtctcacaacagtcccatgaggcaggtagcttttatcaccattttacacatgagaaaactgagcaacgcagactaacacttgatccaggtagtacagtggcagaggcctgattctaacccaggcagtctggctcaagagtccaagctctttaccaccactctttctgtcttcctttcttgtcttcttttttctttctttccctccctccctcctttcttcccttcctttcttttccttccctccctccctccctcctttctttttttcttttctttctccttcttttccttttctttcttttcatttttttgagacattggctcactctgtctccccaggctgagtgcagtggtgcagtcacggctcactgcagcctcaacctccctgggtcaagtgatcctcccacctcagcttcctgagtagctgggtctacaggtgcacaccaccatgcctggctaattttttctatttttcatagtgacaaggtctcactttgttgtctgggctggtctcaaactcctgacctcaagcaatcctcccaccttcacccaccaaagcactgagattataggtgtgagccaccacacccagccttttaccactgctttaaattccatttagatctaatattgatagaatgataaccatatcaaccagatttttaaaatatgcaaacaatggtgccattttttgtatctgtacgacaaaaatatatagagtttgtattatagcttttatctgtttagagcactcttgggaaaggcagggaaattactgtgaaggtattggtattcgagaagtaagttcctggagtgtttgccttct

SEQ ID NO: 702735 - DNA, 2564 bp, Homo sapiens
  misc_feature 1227, 1228, 1229, 1230, 1231, 1232, 1233, 1234, 1235, 1236,1237, 1238, 1239, 1240, 1241, 1242, 1243, 1244, 1245, 1246,1247, 1248, 1249, 1250, 1251, 1252, 1253, 1254, 1255, 1256,1257, 1258, 1259, 1260, 1261, 1262, 1263, 1264, 1265: n = A,T,C or G
  misc_feature 1266, 1267, 1268, 1269, 1270, 1271, 1272, 1273, 1274, 1275,1276, 1277, 1278, 1279, 1280, 1281, 1282, 1283, 1284, 1285,1286, 1287, 1288, 1289, 1290, 1291, 1292, 1293, 1294, 1295,1296, 1297, 1298, 1299, 1300, 1301, 1302, 1303, 1304: n = A,T,C or G
  misc_feature 1305, 1306, 1307, 1308, 1309, 1310, 1311, 1312, 1313, 1314,1315, 1316, 1317, 1318, 1319, 1320, 1321, 1322, 1323, 1324,1325, 1326: n = A,T,C or G
ggccagtttgaggcaggggcccacgctgacctccctcagcgtgagagaggccagtgtgaggcaggggctcacgctgacctccctcagcgtgagagaggccagtgtgaggcaggggctcacgctgacctccctcagcgtgagagaggccaatgtgaggcaggggctcacgcctctggaaagggtgccagaggcatgagttgggcctcaacaggccaccttgacggaggagctgggccgcacacaggctgctgggaggcaggcagggacttggtcccgggaggccgccgtgaggcgagagctgggcctggagacgcccctgggaggcaagagcggggcctgcagaggctgttctccagccagacctgggcctgtacaggccaccgggaggcaggaggtgggactgaggagcttcgctggagaaagttcagggtctacaaaagccggcgggagctgggcaggagctgagccaaaagagcttgcttgctgggaggccggagctgggcctggagaggctgacttcaggaccacttgggcctgcagaggccgccgggaggcccaagctgggcctggagaagcccaccgaccggaggccgtttggggcctggagacgccgtcggagggcaggagctgagcctggagaggccaccgtgaggcctgagctgggcctggggagcttggcttgaggaagctgtgggccgaccaaggccaccacgagctgggcaggcactgagtccaaagaggttgttgggaggcaggagtcgggcctgcagacgcagccgggaggaagagctgggcccggagaggacgccgggaggctgyaagtgggtctggagaggccgacttgaggagcttctgggcccggagaggccgccggaagggaaaaactgggccgggaaaggccgttgtgaggaatgagccccatgggcctgaggaggccactggcaggcgggagctgggcctgccgaagcggcggagaggccggagctttggactcgggaggccgcaggcgagagcgagctgggcgtggagagtccgctgtgaggcagaggctgggcctgtgcaagctttcgggaggcagcctgcagaggctgactggaggtcaagtttggggcctgcagaggccgcggaaagtcagaagcggggcctgggaaggccgccgggaggcatgagctgggctgggctgaaagaggccactgggagacaggaggagctggaccggagagacgnnnnnnnnnnnnnnnnnnnnnnnnnnnnnnnnnnnnnnnnnnnnnnnnnnnnnnnnnnnnnnnnnnnnnnnnnnnnnnnnnnnnnnnnnnnnnnnnnnnnacaaacatccatgtgaccatatgattcctcccttttttttaacatgagagtatcacatatgcatcctgattgatagcctgctttttgcttggcatttgttccattactcccataatttaaatgcttgtattcatatttagtgaaatgttaataactgctagtacgtaaaagagagtttcttctagtaattttcactaaccaagatgaatttcagaaataaaattcttaacattatcattgtttcttggtatggaaatttcagaagcaggttgaactgaaaaaagtccaagaggaatagagaaatatcacaaggaagtgaatctggactgtagtagagataaatattaatacttacagataatgcttactatgtgctaggcagtgttctaaatgttttacatatattattgaagtctcacaacagtcccatgaggcaggtagcttttatcaccattttacacatgagaaaactgagcaacgcagactaacacttgatccaggtagtacagtggcagaggcctgattctaacccaggcagtctggctcaagagtccaagctctttaccaccactctttctgtcttcctttcttgtcttcttttttctttctttccctccctccctcctttcttcccttcctttcttttccttccctccctccctccctcctttctttttttcttttctttctccttcttttccttttctttcttttcatttttttgagacattggctcactctgtctccccaggctgagtgcagtggtgcagtcacggctcactgcagcctcaacctccctgggtcaagtgatcctcccacctcagcttcctgagtagctgggtctacaggtgcacaccaccatgcctggctaattttttctatttttcatagtgacaaggtctcactttgttgtctgggctggtctcaaactcctgacctcaagcaatcctcccaccttcacccaccaaagcactgagattataggtgtgagccaccacacccagccttttaccactgctttaaattccatttagatctaatattgatagaatgataaccatatcaaccagatttttaaaatatgcaaacaatggtgccattttttgtatctgtacgacaaaaatatatagagtttgtattatagcttttatctgtttagagcactcttgggaaaggcagggaaattactgtgaaggtattggtattcgagaagtaagttcctggagtgtttgccttct

SEQ ID NO: 702736 - DNA, 2564 bp, Homo sapiens
  misc_feature 1227, 1228, 1229, 1230, 1231, 1232, 1233, 1234, 1235, 1236,1237, 1238, 1239, 1240, 1241, 1242, 1243, 1244, 1245, 1246,1247, 1248, 1249, 1250, 1251, 1252, 1253, 1254, 1255, 1256,1257, 1258, 1259, 1260, 1261, 1262, 1263, 1264, 1265: n = A,T,C or G
  misc_feature 1266, 1267, 1268, 1269, 1270, 1271, 1272, 1273, 1274, 1275,1276, 1277, 1278, 1279, 1280, 1281, 1282, 1283, 1284, 1285,1286, 1287, 1288, 1289, 1290, 1291, 1292, 1293, 1294, 1295,1296, 1297, 1298, 1299, 1300, 1301, 1302, 1303, 1304: n = A,T,C or G
  misc_feature 1305, 1306, 1307, 1308, 1309, 1310, 1311, 1312, 1313, 1314,1315, 1316, 1317, 1318, 1319, 1320, 1321, 1322, 1323, 1324,1325, 1326: n = A,T,C or G
ggccagtttgaggcaggggcccacgctgacctccctcagcgtgagagaggccagtgtgaggcaggggctcacgctgacctccctcagcgtgagagaggccagtgtgaggcaggggctcacgctgacctccctcagcgtgagagaggccaatgtgaggcaggggctcacgcctctggaaagggtgccagaggcatgagttgggcctcaacaggccaccttgacggaggagctgggccgcacacaggctgctgggaggcaggcagggacttggtcccgggaggccgccgtgaggcgagagctgggcctggagacgcccctgggaggcaagagcggggcctgcagaggctgttctccagccagacctgggcctgtacaggccaccgggaggcaggaggtgggactgaggagcttcgctggagaaagttcagggtctacaaaagccggcgggagctgggcaggagctgagccaaaagagcttgcttgctgggaggccggagctgggcctggagaggctgacttcaggaccacttgggcctgcagaggccgccgggaggcccaagctgggcctggagaagcccaccgaccggaggccgtttggggcctggagacgccgtcggagggcaggagctgagcctggagaggccaccgtgaggcctgagctgggcctggggagcttggcttgaggaagctgtgggccgaccaaggccaccacgagctgggcaggcactgagtccaaagaggttgttgggaggcaggagtcgggcctgcagacgcagccgggaggaagagctgggcccggagaggacgccgggaggctgtaagtgggtctggagaggccgacttgaggagcttctgggcccrgagaggccgccggaagggaaaaactgggccgggaaaggccgttgtgaggaatgagccccatgggcctgaggaggccactggcaggcgggagctgggcctgccgaagcggcggagaggccggagctttggactcgggaggccgcaggcgagagcgagctgggcgtggagagtccgctgtgaggcagaggctgggcctgtgcaagctttcgggaggcagcctgcagaggctgactggaggtcaagtttggggcctgcagaggccgcggaaagtcagaagcggggcctgggaaggccgccgggaggcatgagctgggctgggctgaaagaggccactgggagacaggaggagctggaccggagagacgnnnnnnnnnnnnnnnnnnnnnnnnnnnnnnnnnnnnnnnnnnnnnnnnnnnnnnnnnnnnnnnnnnnnnnnnnnnnnnnnnnnnnnnnnnnnnnnnnnnnacaaacatccatgtgaccatatgattcctcccttttttttaacatgagagtatcacatatgcatcctgattgatagcctgctttttgcttggcatttgttccattactcccataatttaaatgcttgtattcatatttagtgaaatgttaataactgctagtacgtaaaagagagtttcttctagtaattttcactaaccaagatgaatttcagaaataaaattcttaacattatcattgtttcttggtatggaaatttcagaagcaggttgaactgaaaaaagtccaagaggaatagagaaatatcacaaggaagtgaatctggactgtagtagagataaatattaatacttacagataatgcttactatgtgctaggcagtgttctaaatgttttacatatattattgaagtctcacaacagtcccatgaggcaggtagcttttatcaccattttacacatgagaaaactgagcaacgcagactaacacttgatccaggtagtacagtggcagaggcctgattctaacccaggcagtctggctcaagagtccaagctctttaccaccactctttctgtcttcctttcttgtcttcttttttctttctttccctccctccctcctttcttcccttcctttcttttccttccctccctccctccctcctttctttttttcttttctttctccttcttttccttttctttcttttcatttttttgagacattggctcactctgtctccccaggctgagtgcagtggtgcagtcacggctcactgcagcctcaacctccctgggtcaagtgatcctcccacctcagcttcctgagtagctgggtctacaggtgcacaccaccatgcctggctaattttttctatttttcatagtgacaaggtctcactttgttgtctgggctggtctcaaactcctgacctcaagcaatcctcccaccttcacccaccaaagcactgagattataggtgtgagccaccacacccagccttttaccactgctttaaattccatttagatctaatattgatagaatgataaccatatcaaccagatttttaaaatatgcaaacaatggtgccattttttgtatctgtacgacaaaaatatatagagtttgtattatagcttttatctgtttagagcactcttgggaaaggcagggaaattactgtgaaggtattggtattcgagaagtaagttcctggagtgtttgccttct

SEQ ID NO: 702737 - DNA, 874 bp, Homo sapiens
atctttcaggacttggcttcaaaagtcaccttaactggaaccttctctcaccctccagaagagcttcccattgcacttgatgcatgaactattatttgatcatttttgagttatattccaagtctttttgtacctgaataacatgttgcccagtcagtctctcttcctggactctgaagtctttcatggtagatccagctggaagtgacaaaaagacattcttttgaaatagaacggtgacayagacagacataagttcttaaatgttttaaatggtatgtgaaactttaactaaattcatagccttttggggaacacttaggagggaaacttactgggaatgtcataaaggattaatttgtattttattttattttattttttgagacagaatctcattctgtcacctaggttggagtgcagtgctgcaatcagggctcactgcagccttgaccacctgggctcaggtaatctcatttaatttttatttggtttaaaaaactcagtcttggttgagcgtggtggcttctgcctgtaatctcaacactttgggaggctgagagaggtatattactcgaggccagcagtttgatatcagcctggaaaacatattaaggccctgtctctaccaaaaaataacagagtgaatgtgtggaagacaatttttccaaagacctggggtgaaggaaatgatttcaggatgattcaagtgcattacgtatattgcgcactttatttctattattattacattgtaatatataatgaaataattctacaactcactaaaatgtagaatcagtgggatcgctgagcttgttttcctgcaactagactgtccatctggggtgatgggagacagtcaccccaggca

SEQ ID NO: 702738 - DNA, 874 bp, Homo sapiens
atctttcaggacttggcttcaaaagtcaccttaactggaaccttctctcaccctccagaagagcttcccattgcacttgatgcatgaactattatttgatcatttttgagttatattccaagtctttttgtacctgaataacatgttgcccagtcagtctctcttcctggactctgaagtctttcatggtagatccagctggaagtgacaaaaagacattcttttgaaatagaacggtgacacagacagacataagttcttaaatgttttaaakggtatgtgaaactttaactaaattcatagccttttggggaacacttaggagggaaacttactgggaatgtcataaaggattaatttgtattttattttattttattttttgagacagaatctcattctgtcacctaggttggagtgcagtgctgcaatcagggctcactgcagccttgaccacctgggctcaggtaatctcatttaatttttatttggtttaaaaaactcagtcttggttgagcgtggtggcttctgcctgtaatctcaacactttgggaggctgagagaggtatattactcgaggccagcagtttgatatcagcctggaaaacatattaaggccctgtctctaccaaaaaataacagagtgaatgtgtggaagacaatttttccaaagacctggggtgaaggaaatgatttcaggatgattcaagtgcattacgtatattgcgcactttatttctattattattacattgtaatatataatgaaataattctacaactcactaaaatgtagaatcagtgggatcgctgagcttgttttcctgcaactagactgtccatctggggtgatgggagacagtcaccccaggca

SEQ ID NO: 702739 - DNA, 874 bp, Homo sapiens
atctttcaggacttggcttcaaaagtcaccttaactggaaccttctctcaccctccagaagagcttcccattgcacttgatgcatgaactattatttgatcatttttgagttatattccaagtctttttgtacctgaataacatgttgcccagtcagtctctcttcctggactctgaagtctttcatggtagatccagctggaagtgacaaaaagacattcttttgaaatagaacggtgacacagacagacataagttcttaaatgttttaaatggtatgtgaaactttaactaaattcatagccttttggggaacacttaggagggaaacttactgggaatgtcataaaggattaatttgtattttattttattttattttttgagacagaatctcattctgtcacctaggttggagtgcagtgctgcaatcagggctcactgcagccttgaccacctgggctcaggtaatctcayttaatttttatttggtttaaaaaactcagtcttggttgagcgtggtggcttctgcctgtaatctcaacactttgggaggctgagagaggtatattactcgaggccagcagtttgatatcagcctggaaaacatattaaggccctgtctctaccaaaaaataacagagtgaatgtgtggaagacaatttttccaaagacctggggtgaaggaaatgatttcaggatgattcaagtgcattacgtatattgcgcactttatttctattattattacattgtaatatataatgaaataattctacaactcactaaaatgtagaatcagtgggatcgctgagcttgttttcctgcaactagactgtccatctggggtgatgggagacagtcaccccaggca

SEQ ID NO: 702740 - DNA, 606 bp, Homo sapiens
tgatccgcccgccttggcctcccaaagtgctgggattacaggtgttagccaccatgcccggctggcagcaatgattttcatgtcttgttattacttcactcctttgattactggtgtcataatgattaccatttgtttaatggtttctaggtaccaggtacttggctaagcactttatatgcattatctcttaattctcacaatcctatggggatacattgcattattcattgcttttcagawgagaaaattgagacagattaatagcttgcctggaataactcacatagtatatggatatgaacatatgctctgcctattttttttcagagatggtttcataatttttattttcttacagttttttgcactgggatccaaataaggtctatacattgcagttggttgacagctgtaccctttttccatctcttctattttctttgcaatttttttgttgttgttgagagaatgtcgttatttgtcttctagatttattttcagtcttgattttgccaattcagtatgtactaacatttaacatttcttctatctcctgtatttcctgtgaagtgatatatctggattataggggtttgattagat

SEQ ID NO: 702741 - DNA, 960 bp, Homo sapiens
taccgtgtatgtacatatttgctagccctggaaggaaactgaaatttttctgtatctttcttggccttaagtaattgaaaaggtttgaaataaataagtttagaatatcttaaatgttacaacttgattctatatttctgtactacattttctgtgtctaatttcattatttacagaaaacagaagaagaaaaatgaagaaaggatgtagtagtcaatgaagggaccttaaagaacagtgaaaaagataagtgggtgaacttttcaaagaaaaaaggaagtccatggattttactttttcaaagatgtagctgaagattttactttttcaaagatgtacatggtgtattgccagatgactttcagcgtgaattgcatctgaagatagaaatctggaaggagtgaaagattaagttgagatctgtaagagagtgtcagatagcagaaggttcttttttgcattttaatttttattatgacaataatatgcatattaatggcacaaaactgtggaaaatggaagcacaagtaatactataaaaatcatttctagtcacatcataagtatattattttggtgattctcaaacatcataaaatattttttaggccaggcgcagtggctcacgcctgtaatcccagcactttgagaggctgaggtggatggatcacgaggtcaggagatcgagaccatcctggctaacacagtgaaaccccatctctactaaaaatacaaaaaaaattagccgggtgtggtggcgggagcctgtagtcccagctacttgggaggctgaggcaggagaatgacatgaacctgggaggcagagtttgcagtgagccgagatagcaccactgcactccagcctggacaacagagtgagactccgtctctctctctctctctctctctctctctmtatatatatatatatatatatatatgtgtgtgtgtgtgtgtgtg

SEQ ID NO: 702742 - DNA, 960 bp, Homo sapiens
taccgtgtatgtacatatttgctagccctggaaggaaactgaaatttttctgtatctttcttggccttaagtaattgaaaaggtttgaaataaataagtttagaatatcttaaatgttacaacttgattctatatttctgtactacattttctgtgtctaatttcattatttacagaaaacagaagaagaaaaatgaagaaaggatgtagtagtcaatgaagggaccttaaagaacagtgaaaaagataagtgggtgaacttttcaaagaaaaaaggaagtccatggattttactttttcaaagatgtagctgaagattttactttttcaaagatgtacatggtgtattgccagatgactttcagcgtgaattgcatctgaagatagaaatctggaaggagtgaaagattaagttgagatctgtaagagagtgtcagatagcagaaggttcttttttgcattttaatttttattatgacaataatatgcatattaatggcacaaaactgtggaaaatggaagcacaagtaatactataaaaatcatttctagtcacatcataagtatattattttggtgattctcaaacatcataaaatattttttaggccaggcgcagtggctcacgcctgtaatcccagcactttgagaggctgaggtggatggatcacgaggtcaggagatcgagaccatcctggctaacacagtgaaaccccatctctactaaaaatacaaaaaaaattagccgggtgtggtggcgggagcctgtagtcccagctacttgggaggctgaggcaggagaatgacatgaacctgggaggcagagtttgcagtgagccgagatagcaccactgcactccagcctggacaacagagtgagactccgtctctctctctctctctctctctctctctatmtatatatatatatatatatatatgtgtgtgtgtgtgtgtgtg

SEQ ID NO: 702743 - DNA, 960 bp, Homo sapiens
taccgtgtatgtacatatttgctagccctggaaggaaactgaaatttttctgtatctttcttggccttaagtaattgaaaaggtttgaaataaataagtttagaatatcttaaatgttacaacttgattctatatttctgtactacattttctgtgtctaatttcattatttacagaaaacagaagaagaaaaatgaagaaaggatgtagtagtcaatgaagggaccttaaagaacagtgaaaaagataagtgggtgaacttttcaaagaaaaaaggaagtccatggattttactttttcaaagatgtagctgaagattttactttttcaaagatgtacatggtgtattgccagatgactttcagcgtgaattgcatctgaagatagaaatctggaaggagtgaaagattaagttgagatctgtaagagagtgtcagatagcagaaggttcttttttgcattttaatttttattatgacaataatatgcatattaatggcacaaaactgtggaaaatggaagcacaagtaatactataaaaatcatttctagtcacatcataagtatattattttggtgattctcaaacatcataaaatattttttaggccaggcgcagtggctcacgcctgtaatcccagcactttgagaggctgaggtggatggatcacgaggtcaggagatcgagaccatcctggctaacacagtgaaaccccatctctactaaaaatacaaaaaaaattagccgggtgtggtggcgggagcctgtagtcccagctacttgggaggctgaggcaggagaatgacatgaacctgggaggcagagtttgcagtgagccgagatagcaccactgcactccagcctggacaacagagtgagactccgtctctctctctctctctctctctctctctatatmtatatatatatatatatatatgtgtgtgtgtgtgtgtgtg

SEQ ID NO: 702744 - DNA, 960 bp, Homo sapiens
taccgtgtatgtacatatttgctagccctggaaggaaactgaaatttttctgtatctttcttggccttaagtaattgaaaaggtttgaaataaataagtttagaatatcttaaatgttacaacttgattctatatttctgtactacattttctgtgtctaatttcattatttacagaaaacagaagaagaaaaatgaagaaaggatgtagtagtcaatgaagggaccttaaagaacagtgaaaaagataagtgggtgaacttttcaaagaaaaaaggaagtccatggattttactttttcaaagatgtagctgaagattttactttttcaaagatgtacatggtgtattgccagatgactttcagcgtgaattgcatctgaagatagaaatctggaaggagtgaaagattaagttgagatctgtaagagagtgtcagatagcagaaggttcttttttgcattttaatttttattatgacaataatatgcatattaatggcacaaaactgtggaaaatggaagcacaagtaatactataaaaatcatttctagtcacatcataagtatattattttggtgattctcaaacatcataaaatattttttaggccaggcgcagtggctcacgcctgtaatcccagcactttgagaggctgaggtggatggatcacgaggtcaggagatcgagaccatcctggctaacacagtgaaaccccatctctactaaaaatacaaaaaaaattagccgggtgtggtggcgggagcctgtagtcccagctacttgggaggctgaggcaggagaatgacatgaacctgggaggcagagtttgcagtgagccgagatagcaccactgcactccagcctggacaacagagtgagactccgtctctctctctctctctctctctctctctatatatatatatatatatatatrtatgtgtgtgtgtgtgtgtgtg

SEQ ID NO: 702745 - DNA, 960 bp, Homo sapiens
taccgtgtatgtacatatttgctagccctggaaggaaactgaaatttttctgtatctttcttggccttaagtaattgaaaaggtttgaaataaataagtttagaatatcttaaatgttacaacttgattctatatttctgtactacattttctgtgtctaatttcattatttacagaaaacagaagaagaaaaatgaagaaaggatgtagtagtcaatgaagggaccttaaagaacagtgaaaaagataagtgggtgaacttttcaaagaaaaaaggaagtccatggattttactttttcaaagatgtagctgaagattttactttttcaaagatgtacatggtgtattgccagatgactttcagcgtgaattgcatctgaagatagaaatctggaaggagtgaaagattaagttgagatctgtaagagagtgtcagatagcagaaggttcttttttgcattttaatttttattatgacaataatatgcatattaatggcacaaaactgtggaaaatggaagcacaagtaatactataaaaatcatttctagtcacatcataagtatattattttggtgattctcaaacatcataaaatattttttaggccaggcgcagtggctcacgcctgtaatcccagcactttgagaggctgaggtggatggatcacgaggtcaggagatcgagaccatcctggctaacacagtgaaaccccatctctactaaaaatacaaaaaaaattagccgggtgtggtggcgggagcctgtagtcccagctacttgggaggctgaggcaggagaatgacatgaacctgggaggcagagtttgcagtgagccgagatagcaccactgcactccagcctggacaacagagtgagactccgtctctctctctctctctctctctctctctatatatatatatatatatatatatrtgtgtgtgtgtgtgtgtgtg

SEQ ID NO: 702746 - DNA, 612 bp, Homo sapiens
tcaccggttcagtgaatgtgtgctgagcctccatcgtgttgtggagctgaatgccactcaggatacacgggtaaacaacacgggtggagagtccgccttcatgagactttccttctaatgggaaagatgggcggtgagcagaggacacatgcatgagaagctcgatgctggcgaaagtagcccagagcaaggaggggaccaagccagcaggcagcrgtgggggtggagtaggaaggcccccttgaaaggaggtgaggggctccaggcagaaggagcaccacgcagacaggagcaaggggctgcctgccccattcagtgggggacgggagggggctgaaaagaaggcccaaaaggcacagaggccccccctgtgaggctggacaggccactctgaggccctggctttgaccctgagtgagacaggagctggaatgcagggaggccaacaaaggctagctcattagcccaggtgaaagctgtgcaggcctgggccagcgccagtgagaggagtgagtgtttgggtcctgggtgtatttcagagagagggccaagagatgttgctgatgggctggtgagggtgaggggaggtcaggccagccaggagcaatgtct

SEQ ID NO: 702747 - DNA, 1756 bp, Homo sapiens
tctaacatcacaccaatgcacaattcctgaaagcattttctagagaccctgcagatgcttaggtcacaggcattgcagaactacctactaccactaccttgcattcctgcagaagaagcccttgcctccaggcaaacccaattcagcatctacaaatcccaggatatggagggaagaagaatgtgcaagcgctagaatgggaagaacacytgacctggtttcagggatttgggattctcaagctgactgcatggccaacgtggatcacatgctcattccaggcaaactaagcagaagtgaggttatgggattgccccagtcatttgtgcatttgtgctcaggtatctcttttcagaacatgtgggtaaagtgtgactttaccataaccatggactgaagattactagtgttgtgatccaggttgcctgagaaattcatgtcactacacagcgaccagtaagcatatgttcttcccacctatgtggaagcgacctagaatccaaagagactgctctgatgcttgttctgtatgacggtgtggtatcatttgggcacaattagtgtcaatgtatcaatgctggctatagatatagacgacatttgtttgctgttatctagcagttacagcagagtatagaagaagaaatctcaatgctcatgcccatcatattggtccaaatttttctgaaaccttgcaggatgaaaacacaaggaaggagagcagagacagagcagatctcattcctgagtgtgtatgtagcagtgagtggatcatggaaggctttgtgtaataggtagaattttaactgatgactacaattgacccagcattattattatgattgtaccctctgtagattttgccagtcacttaaatgtttgtattgggcaaggattggtaaataggatctggactaatggaaatggcagaagagataatttacagtggctctgttaataaaagcacagagtttttttagggaatggtgaataattcacaccagagttttattccttgtgtcaccctgtgtatttggtcatgatggcaagatccctcttaaatagaatcacaagactggagtgctctgaataatgagcatcatctttcgtgaccttgaagtgatagagcttgatgttagttttgtgatattcataggagtgaactctataataatgtaaagtccagagagggccaggcaagtcaggccaacaggacatgccacaaagtcaatgccatgctctccttaccctcctcactgggatatgtccagccctccagggtcagaaggcatagattaaaaaattaaaaaattaaaataataataataataataataaaacacgtgggggttagaggagaagagagaagcaatggaatgcagccccttttcaggagcagcatttttacctgcaaaaggcccatattgggagtaggggagatagttaatctttgaattaaattcaacattttatttgtcacataaaaattcaaatctaaactctgcatagccttgatatggatgtccaaaaattcctaatcaaattctgtgtcactttgcaactcttttgtaatgtaatatttatagtgacttgaaatttaatattcctgtttcaacatgctgctacacatgtgacagaataatacataccaaactcagacattctgaagttgaagaaaattgtcattcccattccaggtgtgcaggcgcccttgccttcttatcaaagacatgtgtaatcattggtgagagtaaag

SEQ ID NO: 702748 - DNA, 1309 bp, Homo sapiens
ctgccatttctagaaggggaaatgggaggctgagggaatcagtaaggcacccaccaaggaaccatgaaggacgctggattcttgctcatgcccttagctgggtgctgagctgggcccaggttgcagtaaaacagggctcctgacccaaaggtcacaggcacagtaatggaggctgaacggaccgctgtggggactccacccttcaatttcaaaagctcttccgcacctccctcccaaacttaggtttaaatttgaaccgcctcatcccttggggaagaacccccttactctgcctcctcctcctcccatgcgtggaatgcaagagcacagagggtaggaataggagacctccttttctcaaatccaggagagcacagagctctgcacacccgcatgcccactcagcacccccaagtcccgggcggagaacggccagggtaccaaggcctgggacagggacgcggccgccgaggaagactttcccgcagcctccacaagccagccgcccccgtcgccacgggctccctcccacgcgtggaagccaagcagaagcagaggcggtggcagcgccgcgcctgcaggtcacgcgggcagcacgaggccctgcgcccagggcacgtgagggggcggggcctgcacccaggatcccctctcgcggctgcttacgtagcagcgcggccccgccccgcccgctccctccccgtgccgccccgccccgcccagcatcacctctgcccccgcaccgctgcgcaccgccctcgccccgagagctcccgcgcgggggcgaagcctcggagcccagggagcccgagctgggggaaragaagggcgcgggagggtggggcggcgaggagaaggaaggtggggaggaaccctgcttaggccggaggggcgggcgcctagggctgcgcgatgccccccccccccccggggaagccccctccccagtctctctagaggctgtcccagacgcgccgggtttttgttcccctagatttagagcgaggagaagccaggttgcgggatgtgggggggaggggggtggtgcggctggctgtgaggaccctcccgccatccacccacgcgcgcgtgttctcccggcactgacggtgtcctgcccgctcgactgctccggctgcgctcgtgactctgcttcgtgccgtcagaattccgcagcgtgtgctcgggggtggggcgggtggcacctggctgccccttgagcttgtccacccgcgggtctgccgggttgccaggcaacccacttacctgccccctcccccaccctgcccggcttccgagagccaggtcg

SEQ ID NO: 702749 - DNA, 602 bp, Homo sapiens
cccacccaactactgaggaagctgaggtgggaggattgcttgatcccaggctcaagctgcagtgagcttgcagtgagccatgattgtgcccctgctttccagtctgtctgggttacagactgaaaccctgtctaaaaaaaaagaaatgaaaaatcggtaaaatttcctaaaacttacattatatcttgataattatagcctttctaaatgttaaaaaaatttcaacaaatttagtttaaagatctaattggctttactggtgatctatgaatcaggcagcatcccatcaaagatgtagaaaagctgctttaataagcagagcaaagaagttgggctttataggcagaaaagggctgaagaagcagaaacaaggaacaaaaacacggattggtccttacaaagtaactttccttacagggttaaaaaagaggaacttcctctgttttaccagctggctcaggtaaaccaggccccttctgattgatwgctgtgaatttccccttttttttttttttttttttggaaaactggttcattttaaagttcattttgattacatggaacctagcacaagttactgcattctagtttgtccagtctgg

SEQ ID NO: 702750 - DNA, 600 bp, Homo sapiens
tgtgagcacaaagaggggaggacgacctagctctgttgggtgacagtggcagagactttgagaaaggaacaaggaagactayagagaagatgatatttgctgtatgtcttgaatatacacaaaagagcaagagtttcaaagttacccaggggaggcctgtatctaaaatctagctgtggcacttattagctatgtagctttagataaagttattttacctttcctaatgtcaatttcctcatctatacaacagatagaataaataatatgcaacttgaagggtattatgagatttcaatgacatgttcctttgaaagcatctcaatcagtgctcaaaaatgttagtttgctgtcattattgttgtagtctttgtcatccttatcattttgtcactgtaactggaggatgactgtgaactaaataggtagataaaatgaagggggctatgtttccagaagcatgtgcaaaggcacttaggcatagtggtgaattagatgtggattacatagggtcatgctttggagccatttatctggcttcggaaatgcttacttgcttgctagctacccaaaagacatgctgacctttgaggttttttg

SEQ ID NO: 702751 - DNA, 1177 bp, Homo sapiens
atgcttttctgagatttgttcttcttgataatcctttagcttttatcacatgacactttcttccctctgatacctcaagtcacttttaatacagtcagaaagaggctgggcacggtgactaggctgggagcagtgactcaaacctgtaatcccagcactttagaagaccaagggtgggcggatcacttgaggtcaagagtttgagaccagcctggccaacatggtgaaacccacctacaaaaagtagccgggcatgatggcatgggcctgtaatcccagatactcaggaggctgaggagtgagaatttcttgaacccgggaggtggaggttgcrgtgagctgagatcatgccactgtgctccagcctgggtgacagagtgagactctgtctcagcaaataaaaataagaaaaaaaaaatacagtaagaaagagtccttgtactctattggttcttccccaataatttttcacataactccttctttacacagagcaattgcatcagaatgagagtgtttttgtggtggtgagcagctgatttgtctttgtatccttggggcctgccacgtactagtatatgcccaacgtctgttaaattgttaaaatgaaagctgaagttagtttactcaatatccattgagagaaacaatcgttataaacattatacatggaggtatattttctattcctcattaattttcaattatctttccccctctgtactgagagaaataaagatctctgtaatatttaaaagtccacttatttaaagtgccggtagtatagttggttacagtgggtgctcggttggttacagtgtggtgctaataaagtgccagcaatgataattgcatcattaaatgtatttactgagatctaacctatctcatttttaaacatatgcattcaaacatcaggcattagaccatattatatgatcttccagttgtccccaacattgatataaagaaaaagggagttgaaaaggggtgactatacaataattaacttaaaaaaaattaaacactatactgaatattcattttattttcattataggctatatagtttgtgttttagattagtggactgtagaatctattttaaaacatataaagttgactttgaattaagggagcttccaaaacattttaaaatatacattcaacccttaaa

SEQ ID NO: 702752 - DNA, 1464 bp, Homo sapiens
tctaaaacttagagtgctagtcagaagaggaatcttacttttctcctttgtgtctaagcaacatggacaaatcagactaacctgagttagaaacaaccaatttaaagaatgcaaatataaagtgataattgggagagagaggtggttattaatttatcaaaattgtcatttggttgactacattgatcagatagccagtcaaataaatttcttcctttagatatttaaataaaagcattctcattttcmttggatataagccaaaaagaaaaagaagataattttttgagttaatatttagattgtttatgatattgatatataggccacacacactcttaaatatgaacaaagataaaagtatgccatcttattgtcaagaatatttctagctttgaacagcctgtaatttctagttttcctaaattatagaagtttatgaactatgagagaccttctttttaacttgtaacaattacctttgcattaaaaattgttagatgctttgtgtcccctttttatattaagtattttaaaaatcctaattcatgaaagacggaatagtacaaacagaatatttaaccaaaatatggaaaactgacaaaggaacatatatttacctattaatttgattaaattttatgcagtactggattacaaatattaatttttaaattagaagatgaaatataagaatgcattagtgaagttaaatgttgctttgtgaaggttttcttacagtttatcaggatctagggaaaatatagaaatgtatttactgggtcatgatgtgaaatatatttcttgctgagagtcacagtcaaagtttaagagtcaatgtaattgtgttacaatgtaacatactctgaagatgctggtttctaggcttgttgtacataaaattctataatgagatgggaaaataaccaaatcagcctcttatatcagacatttgtaaacagtgagacaacacctcatcagattttttattgaagtgttaatagcctttggcagaaaaaagatactatactaagcagaaaaatatgacagagttttgaagtgtataatttattttgttactcatacgctatcattcttttatgtaatgttttgacaaattagaaaaaataatttagaaaaattctgcagataatatgactcacatctttcatcaatttctccaagcatctgctacttaagagccatatggttaaacagaagtcacaggttcccgttgccatcacaagcattggaggaacttcaaatccatgaaaatgttatttaaatgccctacatagattagaaacctcagctcatgtcagaagaatatccagtgttgcatgatgtgctctatcatacttgaaaatttaactagtcgctgaaagttaattggaatttatctgcatccatttaaaagatacattaattagagtgatgaatgataaattataattcagatattga

SEQ ID NO: 702753 - DNA, 1464 bp, Homo sapiens
tctaaaacttagagtgctagtcagaagaggaatcttacttttctcctttgtgtctaagcaacatggacaaatcagactaacctgagttagaaacaaccaatttaaagaatgcaaatataaagtgataattgggagagagaggtggttattaatttatcaaaattgtcatttggttgactacattgatcagatagccagtcaaataaatttcttcctttagatatttaaataaaagcattctcattttccttggatataagccaaaaagaaaaagaagataattttttgarttaatatttagattgtttatgatattgatatataggccacacacactcttaaatatgaacaaagataaaagtatgccatcttattgtcaagaatatttctagctttgaacagcctgtaatttctagttttcctaaattatagaagtttatgaactatgagagaccttctttttaacttgtaacaattacctttgcattaaaaattgttagatgctttgtgtcccctttttatattaagtattttaaaaatcctaattcatgaaagacggaatagtacaaacagaatatttaaccaaaatatggaaaactgacaaaggaacatatatttacctattaatttgattaaattttatgcagtactggattacaaatattaatttttaaattagaagatgaaatataagaatgcattagtgaagttaaatgttgctttgtgaaggttttcttacagtttatcaggatctagggaaaatatagaaatgtatttactgggtcatgatgtgaaatatatttcttgctgagagtcacagtcaaagtttaagagtcaatgtaattgtgttacaatgtaacatactctgaagatgctggtttctaggcttgttgtacataaaattctataatgagatgggaaaataaccaaatcagcctcttatatcagacatttgtaaacagtgagacaacacctcatcagattttttattgaagtgttaatagcctttggcagaaaaaagatactatactaagcagaaaaatatgacagagttttgaagtgtataatttattttgttactcatacgctatcattcttttatgtaatgttttgacaaattagaaaaaataatttagaaaaattctgcagataatatgactcacatctttcatcaatttctccaagcatctgctacttaagagccatatggttaaacagaagtcacaggttcccgttgccatcacaagcattggaggaacttcaaatccatgaaaatgttatttaaatgccctacatagattagaaacctcagctcatgtcagaagaatatccagtgttgcatgatgtgctctatcatacttgaaaatttaactagtcgctgaaagttaattggaatttatctgcatccatttaaaagatacattaattagagtgatgaatgataaattataattcagatattga

SEQ ID NO: 702754 - DNA, 605 bp, Homo sapiens
tttttccttttcagtcagaatatatgctctataagggcagatgacacattacacattaattttgcatttcctggaatatgtagattggtactaggagtcaagcgaatgtcttaggaatacttacatagtagagttcagtctaactcagcttaataaggatttatattttctttgactttgaaaaaaaatactgtcatcacacaaaaagaattttgattttatatattcttacaaaattattaaaactaaaaaacacagcttaaggattttgctataactgtcttctttatcttatttttttttttgcgcctttatctggcattactttctgttatcttactgcattcttgcttttatggtggatttgttatagaagattaggatactgtcaagagggaagagggatggggttgtataccaagaaggagtaagagatatattacaaacaatctgtaaacagtgtcacttaaaaaaaagaaaaaaacrattagagacactagtaacacgctcacttacctataactatgaaaactatcaaaggaatctgttttgtgtgtgtgtatgtgtggaggggtctgtctacaaattgaacacataactttttg

SEQ ID NO: 702755 - DNA, 647 bp, Homo sapiens
gaaatccttatgggaaaggaggctatacctctattcttatagctaaggtgaaggttaaaatttcagtttatcattacaattattgtattatttttattttttacttttcaattttgttgatatgtaactaccactatgcattgcttaagaatggggacacattctgagaaatgcattgttagggcatttcatcattgtacaaacaccaaagcgtgaacctgcataaacctagatggtacagcctactctacacctaggctagatggtatagcctattgctcctaggckacagacctggacagcatgtgactgtacagaatatattgcaggcaactgtaacagaatagtatgtacttgtgtatctaaatatacctaggccaggtgtggtggctcatgcctgtaatcccaacactttgggattacggaggccgaggcaggtagatcacctaaggtcaggagttcgagaccagcctggacaacatggtgaaaccccatctctatttaaaaggtacaaaaagtagctgggtgtggtggcaggtgcccataatcccagctactcgggaggctgaggcaggagagtcactggaacccgggatgcgtaggttgcagtgagctgagattgtgtcattgcactccagcctgggtga

SEQ ID NO: 702756 - DNA, 647 bp, Homo sapiens
gaaatccttatgggaaaggaggctatacctctattcttatagctaaggtgaaggttaaaatttcagtttatcattacaattattgtattatttttattttttacttttcaattttgttgatatgtaactaccactatgcattgcttaagaatggggacacattctgagaaatgcattgttagggcatttcatcattgtacaaacaccaaagcgtgaacctgcataaacctagatggtacagcctactctacacctaggctagatggtatagcctattgctcctaggctacagacctggacagcatgtgactgtacagaatatattgcaggcaactgtaacagaatagtatgtacttgtgtatctaaatatacctaggccaggtgtggtggctcatgcctgtaatcccaacactttgggattacggaggccgaggcaggtagatcacctaaggtcaggagttcgagaccagcctggacaacatggtgaaaccccatctctatttaaaaggtacaaaaagtagctgggtgtggtggcrggtgcccataatcccagctactcgggaggctgaggcaggagagtcactggaacccgggatgcgtaggttgcagtgagctgagattgtgtcattgcactccagcctgggtga

SEQ ID NO: 702757 - DNA, 647 bp, Homo sapiens
gaaatccttatgggaaaggaggctatacctctattcttatagctaaggtgaaggttaaaatttcagtttatcattacaattattgtattatttttattttttacttttcaattttgttgatatgtaactaccactatgcattgcttaagaatggggacacattctgagaaatgcattgttagggcatttcatcattgtacaaacaccaaagcgtgaacctgcataaacctagatggtacagcctactctacacctaggctagatggtatagcctattgctcctaggctacagacctggacagcatgtgactgtacagaatatattgcaggcaactgtaacagaatagtatgtacttgtgtatctaaatatacctaggccaggtgtggtggctcatgcctgtaatcccaacactttgggattacggaggccgaggcaggtagatcacctaaggtcaggagttcgagaccagcctggacaacatggtgaaaccccatctctatttaaaaggtacaaaaagtagctgggtgtggtggcaggtgcccataatcccagctactcgggaggctgaggcaggagartcactggaacccgggatgcgtaggttgcagtgagctgagattgtgtcattgcactccagcctgggtga

SEQ ID NO: 702758 - DNA, 2479 bp, Homo sapiens
tccctgtctgtcattaaccagtatatgactgtacagttttgtgctgtctcatgctcctccactctccaaaatcagttcatctctttctcatatacagcctatttctttcttttcttcttctaacttgacccaacctacttaggaaaatgtatgggtttgtccccgttttctctttttcttcctttctcttttatctgtatgctaaacaacatactctgcttcatactcatccatgtccttattgtttctagagcccatactccagcctcatctcatgcaactttccactttgctcgctgaatttctgccacaccgtcttgcactttgcaggtttttcttgcctaaaatatgtgtgaacatttccaacaatcctctgttgtggttatctggacaatatgtccttcctagtgaattgtaagttccatgtagacaaaggcctcgtctgtttcactactattatttgccagcagccaacacagttactgatacacatttgatgttcagaaattatttattcaataactaattagaaatgtgaataccatcaaagttaagtgaaaaattaggaatagagatgtatctatccacaaaaaagtgaaacatgttaaaatgaaattataactagttcccaatgtcacactaactattaaagcctgtcaaaatgcccagaaattgtttgaggcatttctatataaatgttcttctacctcctccaaccctgatatttgaaatgaagacatgcaacacataaaatctatttccagttaattcwtgtttaatgtttaaggttaaagcagcattattttccttcattgggttaaatagccttttggaggctaaacagacaataaatcaacattgctcatcaaaaaaaaaatgcatttttgttgttcaaattcccagttttggcacacaaccacactaagtggatacctgccaaaataatctataagtatagaaaaataaataggttatgtgccattttccaacagcatggtacagtttttgacagccatttatatctttagattcttttttactatgaattcagagacagcattttggaagatttctaacctatctcctctttattgaatgtacacaacaaatgaatgtgagtatttggggaggattttctccattctcattgcatgagttttcagtgttacattaaaaactgtagttcctcaacccataagaactacaaccttcacaatcagtgaaactttgtaaatatcttctaaagcagcagtattggtttagtacactataaatgcttatcactgcctctagaatatttaatgttttctctcttcacaaagtaataagataatttttcttaacaaatattaccgattttaaagtatgaatcttagaatgtgagccctgaaaaagaccttgagaagtcttctagtccacatctttgtatccctataggtcgactacagcccaccctggataatgttcattgatcccatatttaaatacttcagcaggaagagggttctttttgtttttgtctgtggtaggtttcgacgtttaataacccataaagctcttaggaaatttttccttatatctaccctaaattaccaatggcacacggatttagatttgaatcttaagtaactagaataaattacctctgctatggaaatagacaccctctctgaatttgaaaaactgtagtctctgtgaaataaactgaaaatattacttctcagggatggagtacgtgattttcagtcaagtgtcccaactccacaaagtgcttgtgctatagtaagctaaacgactaaatggtcttggtgcagccctccaagacacttgtgagcagtgtaaacaccagagccaaaacagaatgcaagagatgaaccatgacaagaaatcagacaaaattatggtcaagagccatctgggtgatgggttatgcacacatataggcatcccacacacatctcagcaaacactatgtttaagaagatgaggacaagctgagccaaggctcctatgcctatcagtgcttcatgaactacaaggggacttcaccaacagagactcttttctaggattttattctgataataccactgtattatttgtgactacacaacttacttatctacaggtgaaatctttctttttactcatcctctaagttcattttgcctaatatttgaccttgacatctgatgacacgtgatggtggaaggtcaagggtttatgtgaacagtcagcatactctaggaatggaagaaggtgaaagttaaaaaataagtaagtagagttggcaagttattcaagttcttattagttgtgtcacttcaggtagattatttaagctttttaaagctaagttccttcaacagtaaaatagatgtaaccgtatctacatcatgagtttgtataaggattaagtgggtgccattattcatgagaaaagcttcgtactcttaactattgtttctgacagttaatg

SEQ ID NO: 702759 - DNA, 2479 bp, Homo sapiens
tccctgtctgtcattaaccagtatatgactgtacagttttgtgctgtctcatgctcctccactctccaaaatcagttcatctctttctcatatacagcctatttctttcttttcttcttctaacttgacccaacctacttaggaaaatgtatgggtttgtccccgttttctctttttcttcctttctcttttatctgtatgctaaacaacatactctgcttcatactcatccatgtccttattgtttctagagcccatactccagcctcatctcatgcaactttccactttgctcgctgaatttctgccacaccgtcttgcactttgcaggtttttcttgcctaaaatatgtgtgaacatttccaacaatcctctgttgtggttatctggacaatatgtccttcctagtgaattgtaagttccatgtagacaaaggcctcgtctgtttcactactattatttgccagcagccaacacagttactgatacacatttgatgttcagaaattatttattcaataactaattagaaatgtgaataccatcaaagttaagtgaaaaattaggaatagagatgtatctatccacaaaaaagtgaaacatgttaaaatgaaattataactagttcccaatgtcacactaactattaaagcctgtcaaaatgcccagaaattgtttgaggcatttctatataaatgttcttctacctcctccaaccctgatatttgaaatgaagacatgcaacacataaaatctatttccagttaattcatgtttaatgtttaaggttaaagcagcattattttccttcattgggttaaatagccttttggaggctaaacagacaataaatcaacattgctcatcaaaaaaaaaatgcatttttgttgttcaaattcccagttttggcacacaaccacactaagtggatacctgccaaaataatctataagtatagaaaaataaataggttatgtgccattttccaacagcatggtacagtttttgacagccatttatatctttagattcttttttactatgaattcagagacagcattttggaagatttctaacctatctcctctttattgaatgtacacaacaaatgaatgtgagtatttggggaggattttctccattctcattgcatgagttttcagtgttacattaaaaactgtagttcctcaacccataagaactacaaccttcacaatcagtgaaactttgtaaatatcttctaaagcagcagtattggtttagtacactataaatgcttatcactgcctctagaatatttaatgttttctctcttcacaaagtaataagataatttttcttaacaaatattaccgattttaaagtatgaatcttagaatgtgagccctgaaaaagaccttgagaagtcttctagtccacatctttgtatccctataggtcgactacagcccaccctggataatgttcattgatcccatatttaaatacttcagcaggaagagggttctttttrtttttgtctgtggtaggtttcgacgtttaataacccataaagctcttaggaaatttttccttatatctaccctaaattaccaatggcacacggatttagatttgaatcttaagtaactagaataaattacctctgctatggaaatagacaccctctctgaatttgaaaaactgtagtctctgtgaaataaactgaaaatattacttctcagggatggagtacgtgattttcagtcaagtgtcccaactccacaaagtgcttgtgctatagtaagctaaacgactaaatggtcttggtgcagccctccaagacacttgtgagcagtgtaaacaccagagccaaaacagaatgcaagagatgaaccatgacaagaaatcagacaaaattatggtcaagagccatctgggtgatgggttatgcacacatataggcatcccacacacatctcagcaaacactatgtttaagaagatgaggacaagctgagccaaggctcctatgcctatcagtgcttcatgaactacaaggggacttcaccaacagagactcttttctaggattttattctgataataccactgtattatttgtgactacacaacttacttatctacaggtgaaatctttctttttactcatcctctaagttcattttgcctaatatttgaccttgacatctgatgacacgtgatggtggaaggtcaagggtttatgtgaacagtcagcatactctaggaatggaagaaggtgaaagttaaaaaataagtaagtagagttggcaagttattcaagttcttattagttgtgtcacttcaggtagattatttaagctttttaaagctaagttccttcaacagtaaaatagatgtaaccgtatctacatcatgagtttgtataaggattaagtgggtgccattattcatgagaaaagcttcgtactcttaactattgtttctgacagttaatg

SEQ ID NO: 702760 - DNA, 2479 bp, Homo sapiens
tccctgtctgtcattaaccagtatatgactgtacagttttgtgctgtctcatgctcctccactctccaaaatcagttcatctctttctcatatacagcctatttctttcttttcttcttctaacttgacccaacctacttaggaaaatgtatgggtttgtccccgttttctctttttcttcctttctcttttatctgtatgctaaacaacatactctgcttcatactcatccatgtccttattgtttctagagcccatactccagcctcatctcatgcaactttccactttgctcgctgaatttctgccacaccgtcttgcactttgcaggtttttcttgcctaaaatatgtgtgaacatttccaacaatcctctgttgtggttatctggacaatatgtccttcctagtgaattgtaagttccatgtagacaaaggcctcgtctgtttcactactattatttgccagcagccaacacagttactgatacacatttgatgttcagaaattatttattcaataactaattagaaatgtgaataccatcaaagttaagtgaaaaattaggaatagagatgtatctatccacaaaaaagtgaaacatgttaaaatgaaattataactagttcccaatgtcacactaactattaaagcctgtcaaaatgcccagaaattgtttgaggcatttctatataaatgttcttctacctcctccaaccctgatatttgaaatgaagacatgcaacacataaaatctatttccagttaattcatgtttaatgtttaaggttaaagcagcattattttccttcattgggttaaatagccttttggaggctaaacagacaataaatcaacattgctcatcaaaaaaaaaatgcatttttgttgttcaaattcccagttttggcacacaaccacactaagtggatacctgccaaaataatctataagtatagaaaaataaataggttatgtgccattttccaacagcatggtacagtttttgacagccatttatatctttagattcttttttactatgaattcagagacagcattttggaagatttctaacctatctcctctttattgaatgtacacaacaaatgaatgtgagtatttggggaggattttctccattctcattgcatgagttttcagtgttacattaaaaactgtagttcctcaacccataagaactacaaccttcacaatcagtgaaactttgtaaatatcttctaaagcagcagtattggtttagtacactataaatgcttatcactgcctctagaatatttaatgttttctctcttcacaaagtaataagataatttttcttaacaaatattaccgattttaaagtatgaatcttagaatgtgagccctgaaaaagaccttgagaagtcttctagtccacatctttgtatccctataggtcgactacagcccaccctggataatgttcattgatcccatatttaaatacttcagcaggaagagggttctttttgtttttgtctgtggtaggtttcgacgtttaataacccataaagctcttaggaaatttttccttatatctaccctaaattaccaatggcacacggatttagatttgaatcttaagtaactagaataaattacctctgctatggaaatagacaccctctctgaatttgaaaaactgtagtctctgtgaaataaactgaaaatattacttctcagggatggagtacgtgattttcagtcaagtgtcccaactccacaaagtgcttgtgctatagtaagctaaacgactaaatggtcttggtgcagccctccaagacacttgtgagcagtgtaaacaccagagccaaaacagaatgcaagagatgaaccatgacaagaaatcagacaaaattatggtcaagagccatctgggtgatgggttatgcacacayataggcatcccacacacatctcagcaaacactatgtttaagaagatgaggacaagctgagccaaggctcctatgcctatcagtgcttcatgaactacaaggggacttcaccaacagagactcttttctaggattttattctgataataccactgtattatttgtgactacacaacttacttatctacaggtgaaatctttctttttactcatcctctaagttcattttgcctaatatttgaccttgacatctgatgacacgtgatggtggaaggtcaagggtttatgtgaacagtcagcatactctaggaatggaagaaggtgaaagttaaaaaataagtaagtagagttggcaagttattcaagttcttattagttgtgtcacttcaggtagattatttaagctttttaaagctaagttccttcaacagtaaaatagatgtaaccgtatctacatcatgagtttgtataaggattaagtgggtgccattattcatgagaaaagcttcgtactcttaactattgtttctgacagttaatg

SEQ ID NO: 702761 - DNA, 622 bp, Homo sapiens
tttgcaaacaataattctgataaagggttaatatccaacacatataagaaactcatacaagttgaaggccaaaaatttaataaccctattaaataatggacaaagaacctgagtagagatttctcaaaagaagacataagataggcwacagatatatgaaaaagtgctcaacatcacgaatcatcaggaaaatgtttatatggtacatactttaacaaattgtagtggttattgctattcttaatagttttccaatagcagatccaagctattattagttatcacatcacatcctttagaatgcctataatcaaaaagacaaaagataacaagtataagtgaggatatgggaaaaaaagggaacccttgtactctgttagtgggaatgtaaattggtacagatattatagaaaacatggaggttcctcaaaaaattaaaaataaaactaccatattattcagcaattccactacaaggtgtatatcaaaaggaaatgacatcaatatctgcacttccatgttcaaggcagtattaatacaacagccaagatagtaaaatacaagttcataaataaatgaatgtataaagaaaatgtaaatacaacgaaatagctttaaaaaa

SEQ ID NO: 702762 - DNA, 365 bp, Homo sapiens
tataccttttaaagactctgtctgacccctggggccagatcatactcttaaaaactgccggcctagtccatgagaaagaactcaaagaatactaattattctttgagttgataataattactgtcttaatatgaatcaaatcatgaaacatggtagtgattttcaaactatagttcttcatcagatcagatcctgcatcacaatcatctggaatcatttttaaaaggtagattcgtggtccttcagcctattgatttctgattcacttggttttaggggaggaatctatattttggtaagctcttactagcaattttatrtgcctactgtttataggaaattaaaatcatgaactcttatagtta

SEQ ID NO: 702763 - DNA, 936 bp, Homo sapiens
aattatgcttaagtataaaaacttcattcatgtttgtgaacctctgaagtcctagatccacagcaaayaaaccacgaagagagaggggagaagaaagagaaagcagaaaggacaagaaccagcagtcactcagagtgagtcccagcaccgtgaggagtcccgcacagagctgctgggcagggagacagcattgacttcagggagttaaggacaggaagcctctggggacccaaattcttcccagcacagctgagcatgtggctgcaacagcacagatatccaccaccagagtgccatgagcttcggcagccactgagcaccagccaaggcaagctctgcactggctttcagtcactctaacacagaacacccttgtagcaacattctttcagtcatttaaaacaagtctgcctcaaggactaatttaaatagctatctcctccaaagtgacctaccaacctacttttgaatttgtctcctacctgaccttccttcctgctgcacatccttctacctcaccttcttcacttcttcaagcatctactgagcctctcaacacatcttcctccagcactgctcccctttagagcagaatccttgaaagagcaacaatatttgctgttttcacttcctctcctctcattcattcttgaacttgctctgactgcacactaatattccacaaaagttgctctcaccaaggtgccctccaaggctctcctttctcatcccacctgacctatcagcagcacctgtcacagctgctcactcctcgcttcttcgcatgacatgcaggacagccctctctcctcctatcttccaggctcttcctggttctcgtcaacttctcgacctataatttctggggcgctccaggcctccgagtttggatctcaactctatctgtgcttttttctctcccagcgagagaatcta

SEQ ID NO: 702764 - DNA, 936 bp, Homo sapiens
aattatgcttaagtataaaaacttcattcatgtttgtgaacctctgaagtcctagatccacagcaaacaaaccacgaagagagaggggagaagaaagrgaaagcagaaaggacaagaaccagcagtcactcagagtgagtcccagcaccgtgaggagtcccgcacagagctgctgggcagggagacagcattgacttcagggagttaaggacaggaagcctctggggacccaaattcttcccagcacagctgagcatgtggctgcaacagcacagatatccaccaccagagtgccatgagcttcggcagccactgagcaccagccaaggcaagctctgcactggctttcagtcactctaacacagaacacccttgtagcaacattctttcagtcatttaaaacaagtctgcctcaaggactaatttaaatagctatctcctccaaagtgacctaccaacctacttttgaatttgtctcctacctgaccttccttcctgctgcacatccttctacctcaccttcttcacttcttcaagcatctactgagcctctcaacacatcttcctccagcactgctcccctttagagcagaatccttgaaagagcaacaatatttgctgttttcacttcctctcctctcattcattcttgaacttgctctgactgcacactaatattccacaaaagttgctctcaccaaggtgccctccaaggctctcctttctcatcccacctgacctatcagcagcacctgtcacagctgctcactcctcgcttcttcgcatgacatgcaggacagccctctctcctcctatcttccaggctcttcctggttctcgtcaacttctcgacctataatttctggggcgctccaggcctccgagtttggatctcaactctatctgtgcttttttctctcccagcgagagaatcta

SEQ ID NO: 702765 - DNA, 1034 bp, Homo sapiens
tggaatagaagaaagaggagacatgcttagttatttgttgttgctaacacatttatttccaaaaaaaggatttgagatgaccaggaatccctacctatcttatgtatattcatatacaactcatgttctatattttaacaaaggaccatgataatggcagcttcatagctccaagtaacaattcaagctgatcttgcctggtccctggagactctaccctgrtattggctatgtggccaaccatccctctgggtctctctctgaagaagggaatgactccctgggtgaatctggtaattcactgtgtatactcctccccccaaggggtgaaccacacctaagaaagttgcataacaacttgttgccattacagtctcagctcaggactcaagaagagtctttttactttcttcctatagcttctttcttccctgtagtggctactgcaagacttgaacactctcctagggtctcttgaccacctgtgaacattacaatctcagcaggtgattaaccactgaattggtaagaaaaatagaagatattataaatgaatttgctaagcattcttccacctctctgcactccaacctacaaacttactgccattttaaccaatctttctttgatttcagaaaaacaggtataactgctcccatcaaccctgaacttgatctcctctccctgcccccaaaaccttactctcctatgtagttgtttccttcctacccctggctcctgtattttagtctagaagaatgtctatcactttgatattaaaacagcaacaaaacaaaaacaaaaaactactagcctctctttaatgtaagttctttctagatactaccccaggtctcttcattttataaccaagcttctaataaaagagctgtctatatgtcctcaactcccactaacttctcacccctttgcaatctaccttctactctcaacacttgaaactgaaaaggttaacaataaccaaatccaatggaggcttttcattcgtttcctacttgatctctctgtgacct

SEQ ID NO: 702766 - DNA, 1034 bp, Homo sapiens
tggaatagaagaaagaggagacatgcttagttatttgttgttgctaacacatttatttccaaaaaaaggatttgagatgaccaggaatccctacctatcttatgtatattcatatacaactcatgttctatattttaacaaaggaccatgataatggcagcttcatagctccaagtaacaattcaagctgatcttgcctggtccctggagactctaccctgayattggctatgtggccaaccatccctctgggtctctctctgaagaagggaatgactccctgggtgaatctggtaattcactgtgtatactcctccccccaaggggtgaaccacacctaagaaagttgcataacaacttgttgccattacagtctcagctcaggactcaagaagagtctttttactttcttcctatagcttctttcttccctgtagtggctactgcaagacttgaacactctcctagggtctcttgaccacctgtgaacattacaatctcagcaggtgattaaccactgaattggtaagaaaaatagaagatattataaatgaatttgctaagcattcttccacctctctgcactccaacctacaaacttactgccattttaaccaatctttctttgatttcagaaaaacaggtataactgctcccatcaaccctgaacttgatctcctctccctgcccccaaaaccttactctcctatgtagttgtttccttcctacccctggctcctgtattttagtctagaagaatgtctatcactttgatattaaaacagcaacaaaacaaaaacaaaaaactactagcctctctttaatgtaagttctttctagatactaccccaggtctcttcattttataaccaagcttctaataaaagagctgtctatatgtcctcaactcccactaacttctcacccctttgcaatctaccttctactctcaacacttgaaactgaaaaggttaacaataaccaaatccaatggaggcttttcattcgtttcctacttgatctctctgtgacct

SEQ ID NO: 702767 - DNA, 1034 bp, Homo sapiens
tggaatagaagaaagaggagacatgcttagttatttgttgttgctaacacatttatttccaaaaaaaggatttgagatgaccaggaatccctacctatcttatgtatattcatatacaactcatgttctatattttaacaaaggaccatgataatggcagcttcatagctccaagtaacaattcaagctgatcttgcctggtccctggagactctaccctgatattggctatgtggccaaccatccctctgggtctctctctgaagaagggaatgactccctgggtgaatctggtaattcactgtgtatactcctccccccaaggggtgaaccacacctaagaaagttgcataacaacttgttgccattacagtctcagctcaggactcaagaagagtctttttactttcttcctatagcttctttcttccctgtagtggctactgcaagacttgaacactctcctagggtctcttgaccacctgtgaacatkacaatctcagcaggtgattaaccactgaattggtaagaaaaatagaagatattataaatgaatttgctaagcattcttccacctctctgcactccaacctacaaacttactgccattttaaccaatctttctttgatttcagaaaaacaggtataactgctcccatcaaccctgaacttgatctcctctccctgcccccaaaaccttactctcctatgtagttgtttccttcctacccctggctcctgtattttagtctagaagaatgtctatcactttgatattaaaacagcaacaaaacaaaaacaaaaaactactagcctctctttaatgtaagttctttctagatactaccccaggtctcttcattttataaccaagcttctaataaaagagctgtctatatgtcctcaactcccactaacttctcacccctttgcaatctaccttctactctcaacacttgaaactgaaaaggttaacaataaccaaatccaatggaggcttttcattcgtttcctacttgatctctctgtgacct

SEQ ID NO: 702768 - DNA, 3003 bp, Homo sapiens
tcaagggtcaaccgtatttgatattcaataataaattataggctgggtgcagaggctcatgcctgtaatcccagcattttgggaggccaaggtgggtgaatcacctgaggtttgaagtttaagactagtctggccaacatggcgaaaccctgtctctaccaaaaatacgaaaactagccagacgtggtggtaaaggcctgtaatcccaggtacttgggaggctgaggcaagagaattacttgaatcctggaggtgaaggttgcagtgagccaagatcgcaccactgcacaccagcctgggtcacagagcaagactccgtctcaaaataataataatgataataataaattatagtatattaaatccttgttcctctaaccaacattatctagatggcacaaagttttctgttattctcaaacttagctcacattagcactaataatatctttaattaatgatagtgtagaactgatacatttacatttgttgcaataaatgtattctatcattctatgggatcctatgtacatttgaattatgttgtgatgattttatttttaaaaagcaagagttctttaatttttatgtttattgatatatcatagatggacatattttgggggtacatgtgatatttcaatacatgcatacaatgtgcaatgatcaagtcagggtaattgggttacccatcacttcaaacatttttctttgtgttgggaacattacaattcttttagctattttgaaatatgcaataaattactagtaactataatttccccactgtactaccaaatactagaattaattccttctaactctatttttcttactttctatattaatttacatctacatttacaagctgtattgttagtataactttaatgtaaacatgtattttacctaagtgttagttgcatggatgtccagatactatgtgtctttaattacattaaatctaagaaaagtaactctctaaaaagtaagcatagtgactgtataatttccttcatttagttccttgaagaaacctgtgaaaccttaattaaatcctgctctctattgttagtttaaaaatgatcagaacaaaaaggatctggcaacttggaagactgcattgtaaaaccacttgagaggaagaatacacttcagtttatggcaaactggagaattcagaactcagaccaaattttgcattaaaaaaacaaaaaactaaaaagctaagccaaatagtattttaaatatgcctgaataattatggagtcagtatccagtgatcttatcccagagttgtctatccattcatgaagatgcagctaagaggctgtgaaattgagcaaatagttcaatagcctcataggtttacagggagaataaaatggagggtggtgcccatcacggtgaataatgataaatctcccatgctttatattaagacccttaaaaatataccctgtgagtaagtacattaactaggaggtgtctggctggcctccaccaaaactgaaacccaatgaatcccgtaaaatgcatcgtgattctagtttcctacttccactggcagcaaatgaactctgtttttctaaacatagagaaaattatcctagacttaaaattagtcatattttttgtatacaatgtctgacattcagttagaaattgctgggcacttaaaggataaaatgacattgccaagagaaataatagataataaaatagggtgatgaagrtcttccattctctgtaacaaacaagacaaggagacattaaaaatacagtgttgtaatgtatagaagctctgagaactacagaaacaaaataatcgatattaatagttatagaactttatcctcaaaaatgcaaagtatgtgctcattttaagaatatgtgtaatattacaattttttttgtatcctggctataaagcaaatctctgcaaaattaaaaggatttcaaacagaaagtatagctttactgcccacagtgcaattggctagccatcaataagcaaagacaataaggaaattaatatgatagaaaaacaggaaatcataggccaggtgaggtgcctcacatctgtaatcccagcactttgggagcctgggcaggtggatcacttgaggtcaggagttcaagaccagcctggccaacatggtgaaatcccatctttaccaaaaatagaaaaattaactgggcgtgttggcaggggcctgtagtcccagctactcaggaggtttaggcatgagaatagcttgaacctgggaggcggaggttgcaatgagccaaatcatgcactccagcctgggcaacaaacaagactcatatcaaataagaaagaaagaaagagaagaaagaaagaaagagagagagagaaagagagaaagaaatagagaaagagagagagagtaagaaagaaagaaaggaagaaggaaagacaggaaatcatatttttaatgctaggtatccaaatgaaatacagtactttaactaaatattaatgaagatttactattttttgtgatagaggcttagatgagtgactaatttgtaaacagatctctctgtctaatatctacctatgtttatatctacctatgtatcattatccacgtctatcaatttttttatcatctatctcacacctgaataatatgctggttgtagaagaggctgggcagatgtaaggaatacatttctctggtttttaaactgcatgtgggttgattccattttaaaaacctagactatggaataactttggagaggacattctctctatttttttaaaaaaagttgcaatagaagaagcactcttaaaaagtatatgaacccacaaaagacttcaaatagccaaagcaattttgagaaagacaaaaaagctggagaatcacacttcctgatttcaaatatattatagagctacagtaatcaaagctgtatgatactggcatatggatcaatgcaacagaataaacagcccagaaattaacctatgca

SEQ ID NO: 702769 - DNA, 990 bp, Homo sapiens
atgtgtgacatgaaaaaataggaagatacagcagacattcaactattatatagttcaagaaagagacaaggaatatttctaggtttcggaattgttcaaggtagagacatgggatattatttctaggcttgatcattgttcatcagataacaaattgaaatatcagtgaatctcagaattcactgatatttctgagaaagagagagaggagagagagaggagagagagagaaagaaagagagagaaagaaaagagagagagagagaaagaaaagggggggagagagagagagagagagagaccttcatccatgaagtgatttcagttcaaccaaccatcccataagtaattgtagatactcaagaacattgttgccaaaccagtctacagcttttcgttaaacagctactgggaaggaattctaacagcttccagagtagcctctccctcaatgagcagatcttactgttctatgcagcaacaggcctcctctaacacccccttgaaggagcaacagttcctggggaagcgatcatattattttatatataaatatggctgaaatatttgrcctccattttcccagactgaatatctctacctcctttggatatttcacataaaaaatgatttagattccttgtttagcccattcaacgttcccctgaattttttagtctatctaacccaaatattcaggggaacgttgaatgggcttaaccccttaatgaaggggttagagactaaaatatctaaccccttttaaagaaggttagatagactaaaatatttgtaatatttaagtaatatttaaatagttaaaaatatttaagtagaaccctgagctaaaggaaataatccaggaattatttaacccattacaagggaaagtcagtttatagccaccgttagataattttttgtaaggattataaatcatgcttccttctgtagctgtgctaatgatttttgtgcctaaatgcaaagtcc

SEQ ID NO: 702770 - DNA, 1335 bp, Homo sapiens
taccaaaataaagtcttttggctactaaacctacatcttattgagaattaggaaggatcaaaatatattcaatatcatatatagttgtatggtaagttacagacaaatgagttaatattgttcatgtctgcagtttaatttgaatttttcatgtagttacaattaaagagatcaaaatggactttgatagtatactagaactggacaagatgtgaaatgcaatggaggaaaaaattagaagctcctaaatcgagaggaattaaggagggcttatagtaaataggggaataaaatgagcttctgttagtgaaatgctttgcttcagcactgggaacatgccacgcacagctaaagacttcattggcataaagggactcaaaactgtcattaaactcagatggtctagtggcacaatatcaaatatgaattattattatacagtgttatcaaaaattaactgttctttgctatcttactgcaattttttccttaaaaaattattaatatgaggtgatacacgagtttttaaaaacttaaataaatggtaaaagaaaaaagcatgtatatacttccagataaagtattgtttacattttgttgaatctacttctatttctttcatatgtgcaaacaaatacatacacacagttgttgttgcttttatataattgaaattgcagatggtgttatatattttaatgagattcatataaaattatataaatacattttcattggatttatgggcataaataccacctaagtcaaggaaaaacatgcagggaattacacaaaccttatattttaattgaatttggggtgtaaataccacctacatgaaggaaacatattactaatttagaagtccacctcatcctgactcttcatggagttctctaccatctttccaaaagaaaccaccatgctgatatttaacaccaaagtgcagtctggtgttcagttggactggctttgaattttatgtagatgaaattgtatggagtggtgtctttgtctttmctttcctctgttcaacattatgttggtgacattaatttttgatgtagagggtagcaatagattactcattttcttggtttagagatttccttatatgaatagccacacttgattccacttttactggatatctgggtagtttccaatttttagcaattccatgtgagagattctacgaagattattaatataattacgtgtgtctgtgtgcatgcatccgtgtgtgtggacatatgaatagacaccttttggtttatgctgggtgaaggcgtctattcagctttggtggatatcctcagataattttcaaaagtg

SEQ ID NO: 702771 - DNA, 650 bp, Homo sapiens
taaagtgccctatggctgctgaaggttacctaaccattctttaaaaggagaatgaccctccatgggaatggccagcctgccaactgtgcaattgaagaagacccgatggatcaaccccatgtctcccttggggagaaagtgcataaaccaggggtctctttttttttttttcaacaaaccattgagctgttcttggagttcatctctggagaggttatacattattagaagtttgattattattatagtttgatcaatttatttgtcttagagatccaatttttactaattccctagttttttatttcagcatctgaatgtctttctccctagcacagtgcatacaatcagggccttgggtatttccagtgataactttccttggagaggatctaagaaaagcccagatttcggtagccatctccctccaaatatgtctctttctgctttcttagtgcccattatttccccttctcctttcttctgtcactgccatctccttcttggtcttcccattgttctttaactggcygtaatgtggaattgatatttacattttgatacggtttttttcttggcctgtgtacgggattgcctcatttcctgctctgaattttaaaattagatattaaagctgtcatatggtttcc

SEQ ID NO: 702772 - DNA, 1009 bp, Homo sapiens
cttgaatctatgctcccaggtagccatcttcaacctttatgcttgaataaacttcctttaaactagattcttaccttttttattattttaggttgacaactctcaaatttatatctctagcccattggacttccttcccgaacctcagggtctaaatttaattgtctatccagcctctccacttggatgtttaataaggatttcaaattcaacatataaaaaacaaaattcccgacttccgccttaaaaayggtttcttacaagttgctcaaaacgcctttgacctcacactccaaaactaacatatccacaaatcttataattctacttctaaaatacgcacagaattcattgttgttttcatcacctcgatttccaccactctggcccacaccactatcaccatggctggattattgtaataacttcctgataccacttttcaccaactaatacgagcattttcgtctggttccctcaggggtccttaagccccaggctgcggatagaaccaatccctggcctgttaggaaccaggaggcacagcaggaggtgagcagcaagcaagggagcattacctcctgagctccgcctccctcagatcagcggtggcatcagattctcataggagcggggaacctattgtgaactgcgcattggagggatctaagttgtgtgctccttatgagaatctaatgataaatgtaatgcctttgaatcatcctgaaaccatcatccacccccccaccacgaaaccggtccctgttgaccaaaaggttgggggccgctgctctatataatccctgggagactgacgactttgtctctttcacttagtgccatgaactccagggcaactttgtggacgctccataaacacttgctggaatgaacccataaatattttatactaccacatatacagtaatacatttaaggagctgcttgggtgtgtaaaaaattgcaggggacgtttacaaataaagaacctcctgaaacaaagcaatga

SEQ ID NO: 702773 - DNA, 1571 bp, Homo sapiens
tgcctaataaattttggtcagaccggttgtctgctctcaaaccttgtctcctgataagatgttatcaatgacaatgcttgcccgaaacttcattgcaattttaatttcaccccggtcctgtggtcctgtgatctcgccctgcctccatttgccttgttatatcttattaccttgtgaagcatgtgatctctgtgacctacaccctattcgtacactccctccccttttgaaaatcactaataaaaactttctggttttacggctcagggggcatcatggaacctgccgacatgtgatgtctcccccggacccccagctttaaaatttctctcttttgtgctctgtccctttatttctcaggctggccgacacttagggagaacagaaaagaacctacgtggaatattgggggtgaattttgcccgatatctggctgaatttcccctgataatgccactctctatgtccatgtgtacacattgtttagcacccacttatgaatgagaacatgtgatattcactttctgtgcctggcttgtttcacttaagataatcccctccagttgtatccatgttgctataaaagacattattttattcctttttatggctaaatagtattcaatggtgtatatataccacattttatttaaccattcatctgttgattccctatttttgctattgtaaatagcatttggaccacatttcaagtacttaattagtggccacatgcagcaagtgactatcacattggacaatgtagccccaacccactgtatgaccttgggtaagacttgcaaactgtcattgcttcaatatctccatctataaaatggggatggcaacaatacctcactaagagtgtaaagactgagttactgtgtgtaaagcacttcacgcctccccatcggtgcttcaccctggggctgcaatgagcacccaatcttagtgtcagatgacacagcacagcaagaccgaggcccttggttcaggaaagtccatgctgccacctcttcagggtcaggaaagtacagtttccacctcttacaaataggactgtttgtctgctcctcctgggtcaaagtaacttcgggttcaggtcctggatccagcaaagggtttgcttaacattgcaagaaagatgttgcctcatggtcaaaagtcaggcgtaggatgagacaggcagacacgcacacattcacacccacgttttgcaaagatggactgaccctgtcagaggatgtgtgggtgaaggtgcacagtgaggatagagacatatgggagtccagyagacatcaatcaaactggactcagtttgcacacacctggagctcaagagtctccagggggaaaacagagacacaaagtcagacagagagagagccagagaaatttcctgcaccgtgaagatagtcagaggcagggaagaaactccttagcactagttagagtgatcagaaaccaagaggacctgatcgctgtacctgccaggtctcagtttctgtctccttccaactgaccacctcttcctctgagactcaccagttctgcatctcttgctcctcctt

SEQ ID NO: 702774 - DNA, 1769 bp, Homo sapiens
ttttatgactctagttcctctaaaagtttctttactatagaatagctgtagtataactgtagtttattcttcataaaggttggccatgcagacagacagcataagagagaacaggggagaccccaataagcccactgttctctggcctacattgccacccttcatttctaggatacatctatttttcaacaaagttggaaaagtaaaaataaattatatccaacatatttatcgaacatctatttgaatgcttgttgttctttcaggtactatggtagattttttttttttcaaagatttgttttggtttctgctcttaaggagatatctattatttgatatttcattcaaaacaagaatcagaatgttaaaaccaagattgcttcatactcctactatacactctcttttacacacacacacacacacacacacacacacactgctaattgttaacacaatagttctcatcagattatgaaatataatcatgtttgacaaacacacgtttatgaataatttactataactatttcaggccctcaaagtaacactcttcttactgtgtttttgagagcactcagtctgctaattatgttgcatggaaaagtccccatcatatctcctattatggattttatggttcattttactgacatattttttcctctttattatcgaagacttagctgcttttctttctctaatactttactactaagacaggaaatcaagttgataatgtcctatggatcataacaacttcatttatttgcactagcaaaagatctgtggtaacagcaagggccaacagagcacatgtcagatgtgctgactggtcccaagacagcaggcaacatgaaacaaaaaagagaagttcaagacctcactgacgacaacaagctgcagcaacagcttcccagctgagtgacaccaagcccataatggaaacgttactcgtttaggtaggcacacatgaaatattaatttcctggattgtctgcatttgcatagtaatattaagttcatcttcttggcatgttatggtctcaattagcaattctattgtcatacctgagatttggggaaggaaggaaaagagtaggctgtagacaatttccctctggaaacagcaacactaatggagcttatcactcccatcattaatttaatcaaaaaccttaaggcagagggctaaagcaatctgttaagaaaacattttctaaaatgagaatgcttcccatttcaattagggtcttgctctttttttctctttgagacatgtttttttctctctatgctctcttccccacctcccatacccgccrctgattagatttgcaaccgggggctgtattttttttccaaagaatgttttcttgcaaactgacaattctgcaacaacacccgtcgcctcaaccttcttaactgacttgttttttaagacatctcaattagttcagacccactgtgcaaagataaagtccttgtatctcagtgagagaatgctctacagagaatggagtttgctttacggtgtgcatgttaatacgctattctctttaattagtttggcaaatatggctgccagtggataattctgctgcatttatatgcgtatttgcacacacatgtgtggttatatgtgtttcctcttccagatgcagaaaaaaaccaaacaaaccaaaacatgaatactatgaggaaggtcgctgggattaggcatagcacatataatacaaaaatattaatagcagtctacaatttca

SEQ ID NO: 702775 - DNA, 1769 bp, Homo sapiens
ttttatgactctagttcctctaaaagtttctttactatagaatagctgtagtataactgtagtttattcttcataaaggttggccatgcagacagacagcataagagagaacaggggagaccccaataagcccactgttctctggcctacattgccacccttcatttctaggatacatctatttttcaacaaagttggaaaagtaaaaataaattatatccaacatatttatcgaacatctatttgaatgcttgttgttctttcaggtactatggtagattttttttttttcaaagatttgttttggtttctgctcttaaggagatatctattatttgatatttcattcaaaacaagaatcagaatgttaaaaccaagattgcttcatactcctactatacactctcttttacacacacacacacacacacacacacacacactgctaattgttaacacaatagttctcatcagattatgaaatataatcatgtttgacaaacacacgtttatgaataatttactataactatttcaggccctcaaagtaacactcttcttactgtgtttttgagagcactcagtctgctaattatgttgcatggaaaagtccccatcatatctcctattatggattttatggttcattttactgacatattttttcctctttattatcgaagacttagctgcttttctttctctaatactttactactaagacaggaaatcaagttgataatgtcctatggatcataacaacttcatttatttgcactagcaaaagatctgtggtaacagcaagggccaacagagcacatgtcagatgtgctgactggtcccaagacagcaggcaacatgaaacaaaaaagagaagttcaagacctcactgacgacaacaagctgcagcaacagcttcccagctgagtgacaccaagcccataatggaaacgttactcgtttaggtaggcacacatgaaatattaatttcctggattgtctgcatttgcatagtaatattaagttcatcttcttggcatgttatggtctcaattagcaattctattgtcatacctgagatttggggaaggaaggaaaagagtaggctgtagacaatttccctctggaaacagcaacactaatggagcttatcactcccatcattaatttaatcaaaaaccttaaggcagagggctaaagcaatctgttaagaaaacattttctaaaatgagaatgcttcccatttcaattagggtcttgctctttttttctctttgagacatgtttttttctctctatgctctcttccccacctcccatacccgccgctgattagatttgcaaccgggggctgtattttttttccaaagaatgttttcttgcaaactgacaattctgcaacaacayccgtcgcctcaaccttcttaactgacttgttttttaagacatctcaattagttcagacccactgtgcaaagataaagtccttgtatctcagtgagagaatgctctacagagaatggagtttgctttacggtgtgcatgttaatacgctattctctttaattagtttggcaaatatggctgccagtggataattctgctgcatttatatgcgtatttgcacacacatgtgtggttatatgtgtttcctcttccagatgcagaaaaaaaccaaacaaaccaaaacatgaatactatgaggaaggtcgctgggattaggcatagcacatataatacaaaaatattaatagcagtctacaatttca

SEQ ID NO: 702776 - DNA, 743 bp, Homo sapiens
ataggagcgtgacccacttcatatggactcaacatctgagaatggctcaaattcttgaatttgcatcccccaagccttcacccggttcagaagttgcattcttccttgattatctccctgattaactaaacgtgactgtggaccaagtctgagcccggcatgaggaacacaaacatgaaggcatgggggyggtggaggtctctgcctggtgtgtccattcaccaagaagggtgactatttacaaagcacctactatgtgttgagtggctttgcaaactcaccacttccttatcctcatgacggtcctgtgagtttagataatcgtcacttttattttacaagtcaggagactggggcttggaagggttttgtggcttgatcagggtcctgcaatcagatagtggcaggggtgggatggggacccaggcctggctggggcataagtccttatcccttctgggtatgatcgctacccacatgtggaagactgccctggtctgagctggggtcaggatggggagggcctcttcatttgcctccttcatttgctacttagctttgctaccttcgggggttcaaggctgttttcctcccagtgggattagctctgttctgattttaacccaaatggaaatttgggctacaatcattaagggcccttcaagtccccaatgagaccaagccagaccggccaaggagtttgctctcctagcccagaacacccagtgtgccccaggcgagga

SEQ ID NO: 702777 - DNA, 743 bp, Homo sapiens
ataggagcgtgacccacttcatatggactcaacatctgagaatggctcaaattcttgaatttgcatcccccaagccttcacccggttcagaagttgcattcttccttgattatctccctgattaactaaacgtgactgtggaccaagtctgagcccggcatgaggaacacaaacatgaaggcatgggggtggtggaggtctctgcctggtgtgtccattcaccaagaagggtgactatttacaaagcacctactatgtgttgagtggctttgcaaactcaccacttccttatcctcatgacggtcctgtgagtttagataatcgtcacttttattttacaagtcaggagactggggcttggaagggttttgtggcttgatcagggtcctgcaatcagatagtggcaggggtgggatggggacccaggcctggctggggcataagtccttatcccttctgggtatgatcgctacccacatgtggaagactgccctggtctgagctggggtcaggatggggagggcctcttcatttgcctccttcatttgctacttagctttgctaccttcgggggttcaaggctgttttcctcccagtgggattagctctgttctgattttaacccaaatggaaatttgggctacaatcattaagggcccttcaagtccccaatgagaccaagccagaccggccaaggagtttgctctcctagcccagracacccagtgtgccccaggcgagga

SEQ ID NO: 702778 - DNA, 637 bp, Homo sapiens
gggtctctctgtgttgcccaggctggagtgtgggctcgctgcagcctaccagggatcttaagatcagaataattggcattcctcagacacatagggcataggactgcayttgaaaaagggggctttgttgctacatttgaaaagcacttagctggtgccttgctcctgaagcaggagccatagactcacagcatcggcatcacctgggaattggctagaaacacagagctcaggccctgccccagactcactgagtcagactctgcctgtgagcaagacccccacgtggccggtgtgtacatcactgttggagaacaccccagttcaaatcgtggccatggaggaacctgctgtgtggccttgggcaaaacgcttaagctctctgagccctggtttccccaaccacaatctagatctagagctatcatccccctcagctgagacaagagctatccccatggtggaccgtcgggtgatgttgaaccccagatcgaggctataccttggtaacaagaacaagaccctcctttcagtaagaaaccaagcggcagttgggggtagggagaggcagtaaaatgctggaggccgtgagccaggaagaggaggaggaaggaggggccgctgggtcactgggacc

SEQ ID NO: 702779 - DNA, 646 bp, Homo sapiens
atgaattttgcacaggttttgactttttttttagtctagacctatcttttgtttattcttaccaacattcccagagtgttttatatttgcaaagtgctttacgctggttttactagttattcccaatgataatacacacctgacctcattctattgtttaggtgaagttaataggcctcagaattcagtgagttgatggctccatctctggcttaattagacagtttaagctctaattggctggtggtaagtcaatcagttaaagagttgcacattcactccctgggaattgtgggaacgattggtccagggggcaccagacactgcaggagaaatcactcagagcagaacctcccrtcgtcccaaagggccatggcaggtgatgtccatcaagggagggtcaagtgcgcgggaggctcaaccttttctgtgtgtagagtctgaggaaaagcagatcaccctgtccccagtgctacagaaggaaaacatgttaaacatgttgctcaccaagatggagacagaagtgactgtgaactagaacaaaggctgccttggaaagggaggcaacggcaagtcagaatacccaggtgtgatgatgagactgctgtgggatcaagcatcctgggatgtgggcatcagagccagc

SEQ ID NO: 702780 - DNA, 1346 bp, Homo sapiens
aaaataaaagtttacatcagtaaaactaatggtttagtaaaattaatatttcaaatcagtttaaagtatataaaatttgcacagtaattccaatttgaatgtttcgtttcatttagttgaaagaaaggtttggtaatgacttatcagacatcacataatcttagttaccctagtgccccatgaggaaaggttaattttctatgtgaaggtgtatgtgcatgtgtgtgtgtctgtgtgtgtgtgtgagagagagagagagtgagatggtgggggtgggcagggtttgtcctagctaagaagggcctgacatttggaaatatctgttgttagaataaggtaagacctctgttgctcaggcatctatttgcaaccaccattcaacattggacctaagagtttcctgggaaaaaaagttgaactgtgtctacaaatgagtttcaagaatatatagccttatcttaagaaatgagaggactgagatggggagaggcagcatttaaatttcaaggggtagcctaggagagaagtcatcctaagggaagtagtttagccatggcataaataagacctgagcattgatgagcactgatgagcactgatgagcatccttagcaccacatataggccattacctaaaaccagcctggtggagaggtgtctatggaatgaaagatttgagtgtaattctgtggctcctcagagtcctgttgtgggactcttttttttatagatgcaatggaggagagaaaggctttcagcttttcatttgcaactaatttctaagtagttctggaaccacaagtttagatggctctgcagtgacagcataagccaccatattgcagcagacaaactttggctcagagctgagcattgagcaaaaatggcagcataggcaagtggcagcctggaatgaagcattgataagactgtggtagctcagcagagccaagcactgatcactagtgatgagaggtgagcccagctccaaaatgatttgaagatgcatgtagacatcctcagcagttcccagaaaccccagagttgtagagaagctgaaagtgcagcaaagatgatgggcagataagatcttgatgttaaaattcttgtaatagaattggcatccaaagtggaacccagaaatggaaactagaagatgctattgtcayttttcaggagctcagccaatcttacctgagctctagtttagcatatagttacattttaaattaatcacaccttttccattagaattaattgatttatttatgacaatgggactgacactgttaaagaactgatgcttggaatggatgtagacccttagaaatccaggcttgagcaaa

SEQ ID NO: 702781 - DNA, 980 bp, Homo sapiens
tattataataggttcacacatttttgtgtcttaatattacatcccacaggggattcttatatcctggcagtgacccttttaaaatacacctattcgtgtcacaagtccctctctacagcttgctattcttttaaaaactttgcaaataacaagccaacattttcaaagacatcccaatttgacacagaccttctgctcactgcaagttagagttaaattctgcaggtaggaaatttacagcctcacactgaataattcacatatgcaatctgtcaaactgctaattattccttcaaagaaaaacaatcagatatttgtatcataatattttacctcatttaggctaaactgccaaggtgtcagagtgattaggaacctacttctctggctgtcaaatgaggctggggaaatttacatatgtataaaggagggaaaatgtatgcattcctatatcaggaaattatgagttaattcaaccaatgtggagctcagggagttaagcattatctgctctttgctctttaggcacagtggatactgtgatgaaaacgtctctgtggtactcacagtttcatgcaggaaataagtatggcaataataataacagtgtaataaggagaaaaggagagagccatctgtcttagcccacaaggctttctacagtgataagccttgagctcatcactgtcaggccatggccaaatttggaagcttggaaatgacactccaagcacagaaaaaggcatatgcaaagacgtggaagtgagggagaactttatgttgttctgcagatgtcaaaaatgtcccacagggctggagccctgcatgtagttctgggagcagcaacagtggacagctgttaagagaccagatcacagaagtgcaggtaaagacctatgtttgttgttgttattgttttagtccatcaaatttctttccatatttaccacagaggaagtggmgacatgcaggttggagca

SEQ ID NO: 702782 - DNA, 616 bp, Homo sapiens
taagtaggaggctattggcaaccttcttattttgactttctacctaacaaaccaaaatataatttaggagtatcttttcataacaatatctgggcttcagccaatcacaaacagctgagcttcaagcaattacrggcagccaactgatcagactatgcccaaataagggaaatgcctcatcacaccacacccaaatatgggagatgtcaggctgtagcaaaccaggtgacttctccactttgcttctgtgttcaggctatagaagctcactgctcacactgctgggtggaactttctgaacctcttctgcttctgagtgttgcctgactcatgaatcctttgttcaaataaactcttaagtttaatttgtctaaagtttctattttaacactggcaaataatatatacttataagggtctcagcttcagtaggcttaagaaggaagatttcataaagctattaaagacatcagaccaggattagaaaagtcagtctctggggaaagataaaggatgtgtatcaagattagccttgggagtgagtcaaaggaaattacaaaaatttcactttgcctatctttgttaagagggtcaagatttttagaaggtttattca

SEQ ID NO: 702783 - DNA, 616 bp, Homo sapiens
taagtaggaggctattggcaaccttcttattttgactttctacctaacaaaccaaaatataatttaggagtatcttttcataacaatatctgggcttcagccaatcacaaacagctgagcttcaagcaattacgggcagccaactgatcagactatgcccaaataagggaaatgcctcatcacaccacacccaaatatggsagatgtcaggctgtagcaaaccaggtgacttctccactttgcttctgtgttcaggctatagaagctcactgctcacactgctgggtggaactttctgaacctcttctgcttctgagtgttgcctgactcatgaatcctttgttcaaataaactcttaagtttaatttgtctaaagtttctattttaacactggcaaataatatatacttataagggtctcagcttcagtaggcttaagaaggaagatttcataaagctattaaagacatcagaccaggattagaaaagtcagtctctggggaaagataaaggatgtgtatcaagattagccttgggagtgagtcaaaggaaattacaaaaatttcactttgcctatctttgttaagagggtcaagatttttagaaggtttattca

SEQ ID NO: 702784 - DNA, 647 bp, Homo sapiens
ttcatccttcctccagcccagacatgggcagtggctcctcagccagcagcctggacccttcttccctcccacactccatgggactggccccagtactgtggcttcaggggccactgcaggaaccccttcctctaccagcctgacargtttgcagctggttctgtgctcagggttcttgaagtgtgtgatgccccaaggtcctgggagttgcctcctaccttggctggccccacacccacagtcgtgctaaccctctgcaggaagaaatgctttctccaccatcacacctaagggggattgctctccactgctttctgttcttagcagaagacaatccgaagccagcatgacttttacatctttgttgaatacttgttttctttattctagaaattcaaacattcactagggtatgtctatgaattaggctctgttcattgattttaactgatacttggtggatcatttcaaatttgtgttcaattagaaactttaaagccaaaatttgtgttcattgtctttgatctgttctgatgtctgtttgaggaagtgcaactatcggaaggtgaaatttcctctttttctgtcaatttttcccattttatttttacattgttttatcatttccacaactttggaagaacatg

SEQ ID NO: 702785 - DNA, 647 bp, Homo sapiens
ttcatccttcctccagcccagacatgggcagtggctcctcagccagcagcctggacccttcttccctcccacactccatgggactggccccagtactgtggcttcaggggccactgcaggaaccccttcctctaccagcctgacaagtttgcagctggttctgtgctcagggttcttgaagtgtgtgatgccccaaggtcctgggagttgcctcctaccttggctggccccacacccacagtcgtgctaaccctctgcaggaagaaatgctttctccaccatcacacctaagggggattgctctccactgctttctgttcttagcagaagacamtccgaagccagcatgacttttacatctttgttgaatacttgttttctttattctagaaattcaaacattcactagggtatgtctatgaattaggctctgttcattgattttaactgatacttggtggatcatttcaaatttgtgttcaattagaaactttaaagccaaaatttgtgttcattgtctttgatctgttctgatgtctgtttgaggaagtgcaactatcggaaggtgaaatttcctctttttctgtcaatttttcccattttatttttacattgttttatcatttccacaactttggaagaacatg

SEQ ID NO: 702786 - DNA, 647 bp, Homo sapiens
ttcatccttcctccagcccagacatgggcagtggctcctcagccagcagcctggacccttcttccctcccacactccatgggactggccccagtactgtggcttcaggggccactgcaggaaccccttcctctaccagcctgacaagtttgcagctggttctgtgctcagggttcttgaagtgtgtgatgccccaaggtcctgggagttgcctcctaccttggctggccccacacccacagtcgtgctaaccctctgcaggaagaaatgctttctccaccatcacacctaagggggattgctctccactgctttctgttcttagcagaagacaatccgaagccagcatgacttttacatctttgttgaatacttgttttctttattctagaaattcaaacattcactagggtatgtctatgaattaggctctgttcattgattttaactgatacttggtggatcatttcaaatttgtgttcaaytagaaactttaaagccaaaatttgtgttcattgtctttgatctgttctgatgtctgtttgaggaagtgcaactatcggaaggtgaaatttcctctttttctgtcaatttttcccattttatttttacattgttttatcatttccacaactttggaagaacatg

SEQ ID NO: 702787 - DNA, 1960 bp, Homo sapiens
atcaatggtagctaaaaataacagtttatggaattttttaaagacaataattatatttcctattggaaatactgtatatatgtgtttaaggccatatttattcaacaacattgcaagggaaccacacaaggctatgttgtattattttgataatctaccagttattatattttataatttatttttatcagggttttcatgaagaataaaactaatacagaaaattaaactattatatagtatggatgaataaaaacatgcatagataagatttatacatgtatttcaaaatcattactatccacttatttgttgtgtctttattgccactaaaagggaactctggatacagaaggaggcattgattgtaaatctttaactgcaatttctaacattatatcagaagaacaaaactgaatgatctccatggggaatggcatcttaacagggctgagtctccaacagcctgattgtaatatgtgtggccagtgttactctttttcaggaattcaaaactataggtgtggctttttggtttaagatggtaatgtccccagcctatactacctctcttatagcccaattgtcttgtcctcatattcttcactatacagagctgtctgtatgagaaagaagctatcccaaacagaaaccccctactcatttactgacatgcaattcctggtaggagagagaaagctgccaatctaattctgcttgttcagaatctatttttaatcatctttacatttactgtgaatcttcattcattcattatatccactatggatacaaaagatgttttcagtaatttaaaggttagcctttagtttttctctgtgcaccgtctttggtggttctgctataccactataccacttgtgttttcgatttgctctaaacttgtcagaaaaatttggagtggatgggagtaaaaaaaatcacagattcaaatgttcagataaaagaaacccctcctacaaaattagtttaatcacataatattggtgtaacagaatttggaatatattgtgatgattacatttactaaaaagtgcatgatgccattatttccaaggagaaatcagatgatcatgctaattaagtgatagcaagtggcaaaggatgcctgtcacaggcctctctgatctgcagagagagatgtgtggttcccagcctaaacactcaggagtagtaacaattggcttaagcactattcagtcccaaggtgaatcccaaatctcaaataggggattcactttaatttaacacttccttatcacatcaaagaggtgaaaaaggcatctttatgaattggcttgcaaggaccgaaataacaaaaacaaaaaaaatcaaaaacattttggattttatcccagtacctaaattctctttaagaactcttggggacacttggaaatgactatagaaaaatttatatattttaagattcaagctataaatccatgtaacaaaaataattaaaagcttagttcttttaatctcttgaaagttataaasttccaattatattattaaaaagaaagtacagaactacctaaaaatacctgttcattggacctaactaatgtattggctctgtccgataaaataaattatcattacctcagccagatttacacctcttaaaaaattatttgctaatattttttctgtgtcattaatcccattttacctataaccaaaaataatagagcctacctttctcacagcaggctttggagaatgttgactactttagtaagaatgacactgagtctacacccatagtccactggtcagatctcaagaatttcatacggccatctcatcatttccctgtgttcactcgttatcatcttaataacataagacatcaaatggtttggagctaggcatcttgtcttttggatgatcatgctacgtgttatttgagtgggatgttgtaatttaacagtga

SEQ ID NO: 702788 - DNA, 1960 bp, Homo sapiens
atcaatggtagctaaaaataacagtttatggaattttttaaagacaataattatatttcctattggaaatactgtatatatgtgtttaaggccatatttattcaacaacattgcaagggaaccacacaaggctatgttgtattattttgataatctaccagttattatattttataatttatttttatcagggttttcatgaagaataaaactaatacagaaaattaaactattatatagtatggatgaataaaaacatgcatagataagatttatacatgtatttcaaaatcattactatccacttatttgttgtgtctttattgccactaaaagggaactctggatacagaaggaggcattgattgtaaatctttaactgcaatttctaacattatatcagaagaacaaaactgaatgatctccatggggaatggcatcttaacagggctgagtctccaacagcctgattgtaatatgtgtggccagtgttactctttttcaggaattcaaaactataggtgtggctttttggtttaagatggtaatgtccccagcctatactacctctcttatagcccaattgtcttgtcctcatattcttcactatacagagctgtctgtatgagaaagaagctatcccaaacagaaaccccctactcatttactgacatgcaattcctggtaggagagagaaagctgccaatctaattctgcttgttcagaatctatttttaatcatctttacatttactgtgaatcttcattcattcattatatccactatggatacaaaagatgttttcagtaatttaaaggttagcctttagtttttctctgtgcaccgtctttggtggttctgctataccactataccacttgtgttttcgatttgctctaaacttgtcagaaaaatttggagtggatgggagtaaaaaaaatcacagattcaaatgttcagataaaagaaacccctcctacaaaattagtttaatcacataatattggtgtaacagaatttggaatatattgtgatgattacatttactaaaaagtgcatgatgccattatttccaaggagaaatcagatgatcatgctaattaagtgatagcaagtggcaaaggatgcctgtcacaggcctctctgatctgcagagagagatgtgtggttcccagcctaaacactcaggagtagtaacaattggcttaagcactattcagtcccaaggtgaatcccaaatctcaaataggggattcactttaatttaacacttccttatcacatcaaagaggtgaaaaaggcatctttatgaattggcttgcaaggaccgaaataacaaaaacaaaaaaaatcaaaaacattttggattttatcccagtacctaaattctctttaagaactcttggggacacttggaaatgactatagaaaaatttatatattttaagattcaagctataaatccatgtaacaaaaataattaaaagcttagttcttttaatctcttgaaagttataaacttccaattatattattaaaaagaaagtayagaactacctaaaaatacctgttcattggacctaactaatgtattggctctgtccgataaaataaattatcattacctcagccagatttacacctcttaaaaaattatttgctaatattttttctgtgtcattaatcccattttacctataaccaaaaataatagagcctacctttctcacagcaggctttggagaatgttgactactttagtaagaatgacactgagtctacacccatagtccactggtcagatctcaagaatttcatacggccatctcatcatttccctgtgttcactcgttatcatcttaataacataagacatcaaatggtttggagctaggcatcttgtcttttggatgatcatgctacgtgttatttgagtgggatgttgtaatttaacagtga

SEQ ID NO: 702789 - DNA, 646 bp, Homo sapiens
atatctggaaaatcccagataatgataaagcaaactcaaacaataaagttattcatcgaggtagcaggaaatgaaattaacatgcaaaaataaatagctttatattttcaaataataaccaattagaatacataatgaaaggaaaatgttcaaagcctatacaaagataactataaagcactcccaagagacagagttgacctgaacaaattccatattcttggttgatagctagttagtaagatgatagttctacctaatttaatttataattttaatacagtcttaataaaaatatcaagtttttttaatgaagttaaacaagttgttaataaagttcatatggaaaaatgaatatgcaagaatcactaggaaaataatgaaaagacagagctgagtggggactagcattaccagaaactaaaacatattacaaagcctctatatcaaaacagtgaggtactggcaagtgaatagacagatcaatggaatagtatagaaaatccagaatagatccagatacacatagaaatttaatatacgatcaagatagtattgcaaatcactgggcaaagattgacatacattggaaagggaggagccaagatggcygaacaggaacagctccagtctacagctcccagcg

SEQ ID NO: 702790 - DNA, 658 bp, Homo sapiens
aagtagtacatacttacaagtacttacatgaagtacttacaaagtcagcactatatgctatttcttgatatatacagacttttgagcaaactcttgatttttcagtgccttatattctaaatactcctgccttcctggaagtatattgaataatgattctaaatatattgacttgcatgacttgcattgtgatgctraacaagtccaattgcgttttgaatgtttatgtgcccatttccgtaagcggggatgcaagtttcttcagcttcctcaccatgtatgaagattattaaaattggggcaaggtttaccaaatcagcgatcgcgtgatctattcagttatttctttgtcttctgataatgatcttgttgattcccttttttattttccagttatatcatggagatgtaaaatataaggagacctagtgtattctaatttcacaattttaattgtaaatacataattagatttttattagaaagaatagttatgtattcaatttctttcagataagattttgtaaatatactataaatagtttttattttatttttatgcatagtagaaaaatgtgatccgttttgactcttgtctttgtaatcctagaactcattggcaaacatatttgagtttaaccgtccaaaaatttgcaag

SEQ ID NO: 702791 - DNA, 658 bp, Homo sapiens
aagtagtacatacttacaagtacttacatgaagtacttacaaagtcagcactatatgctatttcttgatatatacagacttttgagcaaactcttgatttttcagtgccttatattctaaatactcctgccttcctggaagtatattgaataatgattctaaatatattgacttgcatgacttgcattgtgatgctgaacaagtccaattgygttttgaatgtttatgtgcccatttccgtaagcggggatgcaagtttcttcagcttcctcaccatgtatgaagattattaaaattggggcaaggtttaccaaatcagcgatcgcgtgatctattcagttatttctttgtcttctgataatgatcttgttgattcccttttttattttccagttatatcatggagatgtaaaatataaggagacctagtgtattctaatttcacaattttaattgtaaatacataattagatttttattagaaagaatagttatgtattcaatttctttcagataagattttgtaaatatactataaatagtttttattttatttttatgcatagtagaaaaatgtgatccgttttgactcttgtctttgtaatcctagaactcattggcaaacatatttgagtttaaccgtccaaaaatttgcaag

SEQ ID NO: 702792 - DNA, 623 bp, Homo sapiens
ccgggaggtgttccgcgcaggctctgctgctttctgacgtgtgaccgtgtgcacaggatttgtcccaagtcccacctgcctcttctggaaagtggagcgatgaggtgagcaggcacagaggtcacaaggagaattcagggatccagagacccccagagcttgccctgtgcccatgctgcagtgggcactctcctggcatggccacgtctgtcacstgtgatgctcacagcctgctcactactagaaggctttaattttctgaagcagtgatatttaatttatttgaaatttcaaatgtcattaaaagacacgtgctatttttaggctaggaatttaaaatgcttccaaaatgcctcatccccatcgctcttattgcaagcatgtattagctgttctcacgcctgctgagaatgccctgtgactgaagcaggggctgcttctgggggacagtgcagccaccatgtgggtcaatataaggaaatcaggatgatacaagtgatgtgggtttgcaccatcatcctggctgctctgtgtgcttacgtgtgtataacattgacacgaggaaatagatgcctgtagcagatggggatttagctagaaagcaggaggcagagcacgatgag

SEQ ID NO: 702793 - DNA, 623 bp, Homo sapiens
ccgggaggtgttccgcgcaggctctgctgctttctgacgtgtgaccgtgtgcacaggatttgtcccaagtcccacctgcctcttctggaaagtggagcgatgaggtgagcaggcacagaggtcacaaggagaattcagggatccagagacccccagagcttgccctgtgcccatgctgcagtgggcactctcctggcatggccacgtctgtcaccygtgatgctcacagcctgctcactactagaaggctttaattttctgaagcagtgatatttaatttatttgaaatttcaaatgtcattaaaagacacgtgctatttttaggctaggaatttaaaatgcttccaaaatgcctcatccccatcgctcttattgcaagcatgtattagctgttctcacgcctgctgagaatgccctgtgactgaagcaggggctgcttctgggggacagtgcagccaccatgtgggtcaatataaggaaatcaggatgatacaagtgatgtgggtttgcaccatcatcctggctgctctgtgtgcttacgtgtgtataacattgacacgaggaaatagatgcctgtagcagatggggatttagctagaaagcaggaggcagagcacgatgag

SEQ ID NO: 702794 - DNA, 623 bp, Homo sapiens
ccgggaggtgttccgcgcaggctctgctgctttctgacgtgtgaccgtgtgcacaggatttgtcccaagtcccacctgcctcttctggaaagtggagcgatgaggtgagcaggcacagaggtcacaaggagaattcagggatccagagacccccagagcttgccctgtgcccatgctgcagtgggcactctcctggcatggccacgtctgtcacctgtgatgctcacagcctgctcactactagaaggctttaattttctgaagcagtgatatttaatttatttgaaatttcaaatgtcattaaargacacgtgctatttttaggctaggaatttaaaatgcttccaaaatgcctcatccccatcgctcttattgcaagcatgtattagctgttctcacgcctgctgagaatgccctgtgactgaagcaggggctgcttctgggggacagtgcagccaccatgtgggtcaatataaggaaatcaggatgatacaagtgatgtgggtttgcaccatcatcctggctgctctgtgtgcttacgtgtgtataacattgacacgaggaaatagatgcctgtagcagatggggatttagctagaaagcaggaggcagagcacgatgag

SEQ ID NO: 702795 - DNA, 623 bp, Homo sapiens
ccgggaggtgttccgcgcaggctctgctgctttctgacgtgtgaccgtgtgcacaggatttgtcccaagtcccacctgcctcttctggaaagtggagcgatgaggtgagcaggcacagaggtcacaaggagaattcagggatccagagacccccagagcttgccctgtgcccatgctgcagtgggcactctcctggcatggccacgtctgtcacctgtgatgctcacagcctgctcactactagaaggctttaattttctgaagcagtgatatttaatttatttgaaatttcaaatgtcattaaaagacacgtgctatttttaggctaggaatttaaaatgcttccaaaatgcctcayccccatcgctcttattgcaagcatgtattagctgttctcacgcctgctgagaatgccctgtgactgaagcaggggctgcttctgggggacagtgcagccaccatgtgggtcaatataaggaaatcaggatgatacaagtgatgtgggtttgcaccatcatcctggctgctctgtgtgcttacgtgtgtataacattgacacgaggaaatagatgcctgtagcagatggggatttagctagaaagcaggaggcagagcacgatgag

SEQ ID NO: 702796 - DNA, 623 bp, Homo sapiens
ccgggaggtgttccgcgcaggctctgctgctttctgacgtgtgaccgtgtgcacaggatttgtcccaagtcccacctgcctcttctggaaagtggagcgatgaggtgagcaggcacagaggtcacaaggagaattcagggatccagagacccccagagcttgccctgtgcccatgctgcagtgggcactctcctggcatggccacgtctgtcacctgtgatgctcacagcctgctcactactagaaggctttaattttctgaagcagtgatatttaatttatttgaaatttcaaatgtcattaaaagacacgtgctatttttaggctaggaatttaaaatgcttccaaaatgcctcatccccatcgctcttattgcaagcatgtattagctgttctcacgcctgctgagaatgccctgtgactgaagcaggggctscttctgggggacagtgcagccaccatgtgggtcaatataaggaaatcaggatgatacaagtgatgtgggtttgcaccatcatcctggctgctctgtgtgcttacgtgtgtataacattgacacgaggaaatagatgcctgtagcagatggggatttagctagaaagcaggaggcagagcacgatgag

SEQ ID NO: 702797 - DNA, 2592 bp, Homo sapiens
  misc_feature 700, 701, 702, 703, 704, 705, 706, 707, 708, 709, 710, 711,712, 713, 714, 715, 716, 717, 718, 719, 720, 721, 722, 723,724, 725, 726, 727, 728, 729, 730, 731, 732, 733, 734, 735,736, 737, 738, 739, 740, 741, 742, 743, 744, 745, 746: n = A,T,C or G
  misc_feature 747, 748, 749, 750, 751, 752, 753, 754, 755, 756, 757, 758,759, 760, 761, 762, 763, 764, 765, 766, 767, 768, 769, 770,771, 772, 773, 774, 775, 776, 777, 778, 779, 780, 781, 782,783, 784, 785, 786, 787, 788, 789, 790, 791, 792, 793: n = A,T,C or G
  misc_feature 794, 795, 796, 797, 798, 799: n = A,T,C or G
tcccatagaaagtaaagactggagaagagaggccttttggatgctggaggatcttggggagtcctagggtcagcattttgggggtgcccctcccgtgaccagaaatggagaagaattaagaatgaggagtgaatttgccctgggaccaagctgagcttagaatttggttttcttttaaaaaatttgtattaccctatgttttagaattgttctctaaattcactttctgataaaagagacaggtcttgactaattgaggtatctgattaaacaaacatttggcttgattaaaaactaagcaaagaagaattcaagaaagatagatcagaaatgacataaggagaaacaactactctataaaggtagattggtcaaatatgtaaaagagggttgagatgaagggatatttatatcttgaacacacactgagaaaataatttttgagcatttattaaagaccaaatactttaggctttgttttattggggaaagtaaactgtttgcttgttcaatgactttctgggagaattagaaaatttaatcacaaatgaactgctgcaaatcaaatgtagtaaaagccattgtgcagtaatcaaggacagaacataaatggttcctttccttgaacaaggggtgtattcaaaagagggaccctgatttctaaagatcaatgaaaaataaagagtttgaagctagtgtnnnnnnnnnnnnnnnnnnnnnnnnnnnnnnnnnnnnnnnnnnnnnnnnnnnnnnnnnnnnnnnnnnnnnnnnnnnnnnnnnnnnnnnnnnnnnnnnnnnngatatgatctgtgcaacttactctcacacagtgcaggaaagtaataataatatgtatggacatacagagagtgacaaagcaaatgttaacagttggtaaaagtggaagaagagtatacagtagttttttgttctcttccagctttcagtagcagttcagtagctttcagtagctgttctcttccagcttaacttctatttgcctacccaccctctcctcaatgcagcacataccacgcctggtccctctgagccaccatatggtttccatttgttaatcatctgacaggtcagcagcctgagaccaagataaaatgtggcaacagggaaagatgaatggtctgttcgctggtgttttcttgaagattgttttcatattgtagacagttgtgggggtgcatggaaagatttcccccaccaaactcagcacatgagccccacacatacttaaaatttttgtattgttttgttttgttttttgagacagtcacccaggctggagtgcagtggtgtgatctcggttcactgcaacctctgcctttttatttttttaagatggaatctcactctgtcgctcaggctagagtgtagtgatgcaatctcagctcactgcaacctccgcctcctgggttcaaacaattcttctgcctcagcctcccaagtagctgggattacaggcacccgccaccatgcctggctaatttttgtatttttagtagagacagggtttcgccatgttggccaggctggtcttgaactcctgacctcaggtgatccacctgcctcagactcccaaattgctgggattataggcatgagccactgagcccggccatatgaaaacttttctaaacgtacatactgtgctcccacactggggttttggcttctgtaggtcagggagggtgccctgggtctgtacaatattttcaaaagttcttcgggggaggattgtttctgtattccacgcctcagtttactagcactccctgccaggtgcccgtctttgtcggtttcatcctcccctcttatgatgcacagtgctcccgcaatgctcccttgcaactcctgagctcttatccactctctcatcctctgagaaggatggctcacaggtgagatgcaggggtgggccctccaagatgacccttcacagccctccctccccaagaatgtcacagctccagaagcaggtttgcacccacagtgacacgccatggctttgcatttcccccagcactaaggagctgcttcatggagcacctctgattgacaaatctaaaatagagaatgaaagaaagtgtcaacctggaggagtttaataacgctgtaattaaaagaaggaagaaggggccacatcccagtgaggaagcagctcctttaaactattgaagaatatattgttctgggggtgccaacagcagaagaaattttaataacaaaaataaattgacaaaaaaaaaggcaggagaggtattagttggaacaaaaccaagtatcttaaaactgctcattttaaactgagtgttttatggtaggataaggaagctccaatattttcaaacacaatttatgtttagaagttcgagtctcctctttcattctgaggaataaaatacccagtttcctttaaaagtacaaaatggctaattagaatgattataaatctaacmgttatatccacataaaaacttgagcataacagttcatagcagcctcattcataccagctgaatagtgaaaaccagccaggaagtgtccagcaactgatggatggatgaacagtgtgacagg

SEQ ID NO: 702798 - DNA, 2775 bp, Homo sapiens
cagcccgtgtgcactgctgactggtgttttgtttttaatcagtgtcctcccacgtaatctttgtcttccgtgtctttagtgaatgtctgtcaagtctgcagttttggtctcttccattctatccagcggacgttctgaagctaagttcagttttcccagttccaccctatcttattatcttatctactatggtggctatttattgctttaaggattcttgtttcactgtagtgaaatccttttggattactgtcctatcattcgtcatgttaattgtatttctaagcttttgttcaattggaaagatactaaatgtgtctctatgtcaccataaaactcatcgataaaaatatagatcaggaagkgttagaaacttcgcgctgctaaaccagaagcaggtcgggcgcggtggctcacgcctgtcatccccgcacttccggaggccgaggcgggcggatcatgaggtcaggagatcgagaccatcctggctaacacggtgaaaccccgtctctactcaaaatacaaaaaattagccgggcgcggtggcgggcgcctgtagtcccagctactcgggaggctgaggcaggaggatggtgtgaacccgggaggcagagcttgcagggagccgagatcgcgcccctgcactccagcctgggcgacagagcgagactccgtctcaaataaacaaacaaacaaacaaacaaaaacaagaagcattgccaatgtattaatgtcttcatgttgcatgggaaacaaatctttctggaacatttgtgtgcattgaatatggcgccagctttaggaacgtgttcattcattcattcaataatatttgctgagaacattttattcaccaggttctgcactggaagataaggatacaacggtaagtgaaagactcagttgcatggaacttgaagattactgatacagacagacaagtgttaaaagtatatgtaacatattctttgtagcttacggaatgtatcgcatcctttaatcccaatccaaatcctttgaaataaattgttttctctgttttataggtaagtaaactgagactcacagaaacaaaatttcccagaatagatgtcacagctggtcagcaatagagttgatctgtagggaccgatatgaatgggaaagccattgtggtctgctatggtggtcattcaaaaaatggctttgatgtatcggttaagctacatatgaattacctctttgctattattaatccacagtttattcatcttttccacaagggcatcaagggtggtgtccaaatgccttacttgagtcattgatctagcattgatctagcattgatccattgatgatgatcttcagtccagtaaacttaacaaaaagaggacagagttaatttggcaaaaattgttcatatagagcatattctaggctccttttcccttttttgctttctgacatactttcttataatcctacttagacgttttgtcataagaaatgtgaactttaacgtagagcaaatttttatgcatatctcactttcacagtttatcaaaatatgttggtaatctcaggttttctagaagaaataaattttgatgagatttgaagggataacctcatgtttcactcaatgaaatttattcaaaatctactatgtgccctgaatgaaaatattaatttagcactttgtgtgtagcataaagaaagacactacttttttttttctttttctttttttgagtgcagtggcacaatcttggctgactgcaacctccgactcccaggttcaagcaattctcctgcctcagcctcctgagcagctgggattacaggtgcccatcaccaagcctggctatttttttgttttgttttgtatttttagtagagacagtgtttctccatgttagccaggctggtctcaaactcctgacctcgggtgatccacccacttccacctcccaaagtgctgggattacagacgtgaaccaccgtgccccactgaaagacactaatatttattttacgttcattatgttagctaccactaaggagctcacagctcagagagggacaaagacatacaaaaagaattccagcgagtgtgacaagtgcagaaagaaactgtacaaagagggttgggctagagaggaggaaataactcttcttgggcagctgaggaatggatttagccattgaagggagtgtgtatgtgcgtgtgtgcgtgtgtgtgtggtatttcaggcatgatgacacaccataggaaatatatttgttgctaattgatttttttttcttctccaaaaggagggatctacactcttctcagtcatttgctggtcgtgcgtggggtttctgggattgtatgggctgtccatagtcgaaaaaagcaggtgggcacccagaggtcaaacagggctcccagcctggttaggcatggggggtaaccctactgaaagaggccacctgctagaccagcaaaggagcaaatgggagcaacatagaatagtaatgctacctgttacatctgagtcttttaaaagcagcttccacattattgcatttgaccttaatctcattgctgtgatacatcatctctacttttaggcaaggaaatgttggatctaaaggactgactgacctgggtgaagtcctggaacaaacaggcagcaggactaggattcaaacaaaggccatatgattcccaagccagtgatttccactctgaataagagaagggaaagagcaccagacacaacaaactgcagagcaaaataggtaataaaa

SEQ ID NO: 702799 - DNA, 2775 bp, Homo sapiens
cagcccgtgtgcactgctgactggtgttttgtttttaatcagtgtcctcccacgtaatctttgtcttccgtgtctttagtgaatgtctgtcaagtctgcagttttggtctcttccattctatccagcggacgttctgaagctaagttcagttttcccagttccaccctatcttattatcttatctactatggtggctatttattgctttaaggattcttgtttcactgtagtgaaatccttttggattactgtcctatcattcgtcatgttaattgtatttctaagcttttgttcaattggaaagatactaaatgtgtctctatgtcaccataaaactcatcgataaaaatatagatcaggaagtgttagaaacttcgcgctgctaaacmagaagcaggtcgggcgcggtggctcacgcctgtcatccccgcacttccggaggccgaggcgggcggatcatgaggtcaggagatcgagaccatcctggctaacacggtgaaaccccgtctctactcaaaatacaaaaaattagccgggcgcggtggcgggcgcctgtagtcccagctactcgggaggctgaggcaggaggatggtgtgaacccgggaggcagagcttgcagggagccgagatcgcgcccctgcactccagcctgggcgacagagcgagactccgtctcaaataaacaaacaaacaaacaaacaaaaacaagaagcattgccaatgtattaatgtcttcatgttgcatgggaaacaaatctttctggaacatttgtgtgcattgaatatggcgccagctttaggaacgtgttcattcattcattcaataatatttgctgagaacattttattcaccaggttctgcactggaagataaggatacaacggtaagtgaaagactcagttgcatggaacttgaagattactgatacagacagacaagtgttaaaagtatatgtaacatattctttgtagcttacggaatgtatcgcatcctttaatcccaatccaaatcctttgaaataaattgttttctctgttttataggtaagtaaactgagactcacagaaacaaaatttcccagaatagatgtcacagctggtcagcaatagagttgatctgtagggaccgatatgaatgggaaagccattgtggtctgctatggtggtcattcaaaaaatggctttgatgtatcggttaagctacatatgaattacctctttgctattattaatccacagtttattcatcttttccacaagggcatcaagggtggtgtccaaatgccttacttgagtcattgatctagcattgatctagcattgatccattgatgatgatcttcagtccagtaaacttaacaaaaagaggacagagttaatttggcaaaaattgttcatatagagcatattctaggctccttttcccttttttgctttctgacatactttcttataatcctacttagacgttttgtcataagaaatgtgaactttaacgtagagcaaatttttatgcatatctcactttcacagtttatcaaaatatgttggtaatctcaggttttctagaagaaataaattttgatgagatttgaagggataacctcatgtttcactcaatgaaatttattcaaaatctactatgtgccctgaatgaaaatattaatttagcactttgtgtgtagcataaagaaagacactacttttttttttctttttctttttttgagtgcagtggcacaatcttggctgactgcaacctccgactcccaggttcaagcaattctcctgcctcagcctcctgagcagctgggattacaggtgcccatcaccaagcctggctatttttttgttttgttttgtatttttagtagagacagtgtttctccatgttagccaggctggtctcaaactcctgacctcgggtgatccacccacttccacctcccaaagtgctgggattacagacgtgaaccaccgtgccccactgaaagacactaatatttattttacgttcattatgttagctaccactaaggagctcacagctcagagagggacaaagacatacaaaaagaattccagcgagtgtgacaagtgcagaaagaaactgtacaaagagggttgggctagagaggaggaaataactcttcttgggcagctgaggaatggatttagccattgaagggagtgtgtatgtgcgtgtgtgcgtgtgtgtgtggtatttcaggcatgatgacacaccataggaaatatatttgttgctaattgatttttttttcttctccaaaaggagggatctacactcttctcagtcatttgctggtcgtgcgtggggtttctgggattgtatgggctgtccatagtcgaaaaaagcaggtgggcacccagaggtcaaacagggctcccagcctggttaggcatggggggtaaccctactgaaagaggccacctgctagaccagcaaaggagcaaatgggagcaacatagaatagtaatgctacctgttacatctgagtcttttaaaagcagcttccacattattgcatttgaccttaatctcattgctgtgatacatcatctctacttttaggcaaggaaatgttggatctaaaggactgactgacctgggtgaagtcctggaacaaacaggcagcaggactaggattcaaacaaaggccatatgattcccaagccagtgatttccactctgaataagagaagggaaagagcaccagacacaacaaactgcagagcaaaataggtaataaaa

SEQ ID NO: 702800 - DNA, 2775 bp, Homo sapiens
cagcccgtgtgcactgctgactggtgttttgtttttaatcagtgtcctcccacgtaatctttgtcttccgtgtctttagtgaatgtctgtcaagtctgcagttttggtctcttccattctatccagcggacgttctgaagctaagttcagttttcccagttccaccctatcttattatcttatctactatggtggctatttattgctttaaggattcttgtttcactgtagtgaaatccttttggattactgtcctatcattcgtcatgttaattgtatttctaagcttttgttcaattggaaagatactaaatgtgtctctatgtcaccataaaactcatcgataaaaatatagatcaggaagtgttagaaacttcgcgctgctaaaccagaagcaggtcgggcgcggtggctcacgcctgtcatccccgcacttccggaggccgaggcgggcggatcaygaggtcaggagatcgagaccatcctggctaacacggtgaaaccccgtctctactcaaaatacaaaaaattagccgggcgcggtggcgggcgcctgtagtcccagctactcgggaggctgaggcaggaggatggtgtgaacccgggaggcagagcttgcagggagccgagatcgcgcccctgcactccagcctgggcgacagagcgagactccgtctcaaataaacaaacaaacaaacaaacaaaaacaagaagcattgccaatgtattaatgtcttcatgttgcatgggaaacaaatctttctggaacatttgtgtgcattgaatatggcgccagctttaggaacgtgttcattcattcattcaataatatttgctgagaacattttattcaccaggttctgcactggaagataaggatacaacggtaagtgaaagactcagttgcatggaacttgaagattactgatacagacagacaagtgttaaaagtatatgtaacatattctttgtagcttacggaatgtatcgcatcctttaatcccaatccaaatcctttgaaataaattgttttctctgttttataggtaagtaaactgagactcacagaaacaaaatttcccagaatagatgtcacagctggtcagcaatagagttgatctgtagggaccgatatgaatgggaaagccattgtggtctgctatggtggtcattcaaaaaatggctttgatgtatcggttaagctacatatgaattacctctttgctattattaatccacagtttattcatcttttccacaagggcatcaagggtggtgtccaaatgccttacttgagtcattgatctagcattgatctagcattgatccattgatgatgatcttcagtccagtaaacttaacaaaaagaggacagagttaatttggcaaaaattgttcatatagagcatattctaggctccttttcccttttttgctttctgacatactttcttataatcctacttagacgttttgtcataagaaatgtgaactttaacgtagagcaaatttttatgcatatctcactttcacagtttatcaaaatatgttggtaatctcaggttttctagaagaaataaattttgatgagatttgaagggataacctcatgtttcactcaatgaaatttattcaaaatctactatgtgccctgaatgaaaatattaatttagcactttgtgtgtagcataaagaaagacactacttttttttttctttttctttttttgagtgcagtggcacaatcttggctgactgcaacctccgactcccaggttcaagcaattctcctgcctcagcctcctgagcagctgggattacaggtgcccatcaccaagcctggctatttttttgttttgttttgtatttttagtagagacagtgtttctccatgttagccaggctggtctcaaactcctgacctcgggtgatccacccacttccacctcccaaagtgctgggattacagacgtgaaccaccgtgccccactgaaagacactaatatttattttacgttcattatgttagctaccactaaggagctcacagctcagagagggacaaagacatacaaaaagaattccagcgagtgtgacaagtgcagaaagaaactgtacaaagagggttgggctagagaggaggaaataactcttcttgggcagctgaggaatggatttagccattgaagggagtgtgtatgtgcgtgtgtgcgtgtgtgtgtggtatttcaggcatgatgacacaccataggaaatatatttgttgctaattgatttttttttcttctccaaaaggagggatctacactcttctcagtcatttgctggtcgtgcgtggggtttctgggattgtatgggctgtccatagtcgaaaaaagcaggtgggcacccagaggtcaaacagggctcccagcctggttaggcatggggggtaaccctactgaaagaggccacctgctagaccagcaaaggagcaaatgggagcaacatagaatagtaatgctacctgttacatctgagtcttttaaaagcagcttccacattattgcatttgaccttaatctcattgctgtgatacatcatctctacttttaggcaaggaaatgttggatctaaaggactgactgacctgggtgaagtcctggaacaaacaggcagcaggactaggattcaaacaaaggccatatgattcccaagccagtgatttccactctgaataagagaagggaaagagcaccagacacaacaaactgcagagcaaaataggtaataaaa

SEQ ID NO: 702801 - DNA, 2775 bp, Homo sapiens
cagcccgtgtgcactgctgactggtgttttgtttttaatcagtgtcctcccacgtaatctttgtcttccgtgtctttagtgaatgtctgtcaagtctgcagttttggtctcttccattctatccagcggacgttctgaagctaagttcagttttcccagttccaccctatcttattatcttatctactatggtggctatttattgctttaaggattcttgtttcactgtagtgaaatccttttggattactgtcctatcattcgtcatgttaattgtatttctaagcttttgttcaattggaaagatactaaatgtgtctctatgtcaccataaaactcatcgataaaaatatagatcaggaagtgttagaaacttcgcgctgctaaaccagaagcaggtcgggcgcggtggctcacgcctgtcatccccgcacttccggaggccgaggcgggcggatcatgaggtcaggagatcgagaccatccyggctaacacggtgaaaccccgtctctactcaaaatacaaaaaattagccgggcgcggtggcgggcgcctgtagtcccagctactcgggaggctgaggcaggaggatggtgtgaacccgggaggcagagcttgcagggagccgagatcgcgcccctgcactccagcctgggcgacagagcgagactccgtctcaaataaacaaacaaacaaacaaacaaaaacaagaagcattgccaatgtattaatgtcttcatgttgcatgggaaacaaatctttctggaacatttgtgtgcattgaatatggcgccagctttaggaacgtgttcattcattcattcaataatatttgctgagaacattttattcaccaggttctgcactggaagataaggatacaacggtaagtgaaagactcagttgcatggaacttgaagattactgatacagacagacaagtgttaaaagtatatgtaacatattctttgtagcttacggaatgtatcgcatcctttaatcccaatccaaatcctttgaaataaattgttttctctgttttataggtaagtaaactgagactcacagaaacaaaatttcccagaatagatgtcacagctggtcagcaatagagttgatctgtagggaccgatatgaatgggaaagccattgtggtctgctatggtggtcattcaaaaaatggctttgatgtatcggttaagctacatatgaattacctctttgctattattaatccacagtttattcatcttttccacaagggcatcaagggtggtgtccaaatgccttacttgagtcattgatctagcattgatctagcattgatccattgatgatgatcttcagtccagtaaacttaacaaaaagaggacagagttaatttggcaaaaattgttcatatagagcatattctaggctccttttcccttttttgctttctgacatactttcttataatcctacttagacgttttgtcataagaaatgtgaactttaacgtagagcaaatttttatgcatatctcactttcacagtttatcaaaatatgttggtaatctcaggttttctagaagaaataaattttgatgagatttgaagggataacctcatgtttcactcaatgaaatttattcaaaatctactatgtgccctgaatgaaaatattaatttagcactttgtgtgtagcataaagaaagacactacttttttttttctttttctttttttgagtgcagtggcacaatcttggctgactgcaacctccgactcccaggttcaagcaattctcctgcctcagcctcctgagcagctgggattacaggtgcccatcaccaagcctggctatttttttgttttgttttgtatttttagtagagacagtgtttctccatgttagccaggctggtctcaaactcctgacctcgggtgatccacccacttccacctcccaaagtgctgggattacagacgtgaaccaccgtgccccactgaaagacactaatatttattttacgttcattatgttagctaccactaaggagctcacagctcagagagggacaaagacatacaaaaagaattccagcgagtgtgacaagtgcagaaagaaactgtacaaagagggttgggctagagaggaggaaataactcttcttgggcagctgaggaatggatttagccattgaagggagtgtgtatgtgcgtgtgtgcgtgtgtgtgtggtatttcaggcatgatgacacaccataggaaatatatttgttgctaattgatttttttttcttctccaaaaggagggatctacactcttctcagtcatttgctggtcgtgcgtggggtttctgggattgtatgggctgtccatagtcgaaaaaagcaggtgggcacccagaggtcaaacagggctcccagcctggttaggcatggggggtaaccctactgaaagaggccacctgctagaccagcaaaggagcaaatgggagcaacatagaatagtaatgctacctgttacatctgagtcttttaaaagcagcttccacattattgcatttgaccttaatctcattgctgtgatacatcatctctacttttaggcaaggaaatgttggatctaaaggactgactgacctgggtgaagtcctggaacaaacaggcagcaggactaggattcaaacaaaggccatatgattcccaagccagtgatttccactctgaataagagaagggaaagagcaccagacacaacaaactgcagagcaaaataggtaataaaa

SEQ ID NO: 702802 - DNA, 1380 bp, Homo sapiens
attctcaatcctctcatttatacactaagaaacaaggacgtgaagggggctctgtggaaagtactatggaggggcagggactcagggtaggaggtgaaaaaatgagcagtaaaattttctgtaatagctcttcaatcacagatctttccctgttccttggagggcagttggtcagtaggaaagccctcagtcatcctcagaattggtttttgtttttgttttttggtggsggggggaacagagtttcactcttgttgcccaggctggagtgcagtggcacgatcttggctcactgcaaccttggattcctgggttcaagtgattctcctgcctcagtctcccgagtagctgggattacaggcacccaccaccacgccctactaatttttgtattttcagtagagacagagtttcaccatgttggccaggctggtctcgaactcctgacctcaggtgatccactcgcctcagcctcccaaagtgctgggattacaggtgtgagccaccgcgcatggccgtcctcagagttttagtcccttccttgtttagaaactggaagtagggatctcttgggactctttcttgctcagtgtctgtgatcactgtgcagccatcagtaagtgctggtttttatcacaactttccaaaggaaccagcttgagaagagggtgtattgtgtccacttatggagagtgggatgggttctaggcaagactgagagtgatagaagatttaatagggaatgacaacaccttcccaaggtcaatgactcccaacgtggtgccatgcagatgcactgtgcccagaggcagacagaatgagttcccccgattctaagtaactgcgaccctgccgtagacgctcacatctcagaacccatttctaaggtctctaacagaggttattcatgtccgatatttggagcaaataaggagatcataaacagaggtacttcaaggagcatgcagagtttcaggtttggatgtcatttacacacttgaagaaaaagacaaaatcactagggtggcattgagtaaagggagcatagactcttactagctacaacaggagtctctgtcatgcagcttggtgccatggataagatattttccatgcaagagagaagataatagagaagaaatgaacatatgaataatgagccaagaggaatagatatagaaaagaagaagggataaggaggagtgacaacaatgaaaaaaagagatttctgtggaaggcagtggtgggaggctcaagaggctgaagtgtgaagacaatgaaaaaaagagacttctgtggaaggcagtggtgggaggctcaagaggctgaagtgtgaagacaatgaaaaaaagagacttctgtggaaggcagtggtgggag

SEQ ID NO: 702803 - DNA, 866 bp, Homo sapiens
tttttgaaaagataaagccagcaaacttttagctggagtgatgaagaaaatagagagaagacttcaataaataaaatcagaaatgaaagaggaaatgatacaagtgtgatgacacagaaaggaaagggatcatgagactactataagtaattatggataacttagaagatatggataaatccctagcatcataggacctaccaagactgaatcataaaaaagtagaaaatcagaaatgawctataactaataaggggatttaatcaaccatccaaaacctcccaaccaagaaaactgtagaactaaatggcttcatttttttcttccaacaaattaaagaagaaagaagacttccaaactcattttatgaggccagcaactatcctgatattcaagtaagaaaaagacaatagaggaaaaaaaattgcagggcagtatttctgatgaactcagatgcaaaatttatcaaaaaaacactagaaaacctaattgaatagcacatcaaaataatcacacctcatgatcaaatggcatttatccatgaatgcaaggatagttcatcatacaaaaatgaaataatatgatttatcatattgacaggattatgaataaaatggtcatgagtttttaaatgaccatatttatgaaagggcaaacatgatcatttcaataggtacagaaaaggcatttgacaaaacttaacactttttcataataaaaactgtcagcaaactaggtataaaaggacattaactcaacaaaataaaggccataaatgaaaagcccacaactaacattatactaattggtgaaaaactgaaaggtttttttttattatccaaaataaggcaaagatgcccattatc

SEQ ID NO: 702804 - DNA, 866 bp, Homo sapiens
tttttgaaaagataaagccagcaaacttttagctggagtgatgaagaaaatagagagaagacttcaataaataaaatcagaaatgaaagaggaaatgatacaagtgtgatgacacagaaaggaaagggatcatgagactactataagtaattatggataacttagaagatatggataaatccctagcatcataggacctaccaagactgaatcataaaaaagtagaaaatcagaaatgatctataactaataaggggatttaatcaaccatccaaaacctcccaaccaagaaaactgtagaactaaatggcttcatttttttcttccaacaaattaaagaagaaagaagacttccaaactcattttatgaggccagcaactatcctgatattcaagtaagaaaaagacaatagagraaaaaaaattgcagggcagtatttctgatgaactcagatgcaaaatttatcaaaaaaacactagaaaacctaattgaatagcacatcaaaataatcacacctcatgatcaaatggcatttatccatgaatgcaaggatagttcatcatacaaaaatgaaataatatgatttatcatattgacaggattatgaataaaatggtcatgagtttttaaatgaccatatttatgaaagggcaaacatgatcatttcaataggtacagaaaaggcatttgacaaaacttaacactttttcataataaaaactgtcagcaaactaggtataaaaggacattaactcaacaaaataaaggccataaatgaaaagcccacaactaacattatactaattggtgaaaaactgaaaggtttttttttattatccaaaataaggcaaagatgcccattatc

SEQ ID NO: 702805 - DNA, 866 bp, Homo sapiens
tttttgaaaagataaagccagcaaacttttagctggagtgatgaagaaaatagagagaagacttcaataaataaaatcagaaatgaaagaggaaatgatacaagtgtgatgacacagaaaggaaagggatcatgagactactataagtaattatggataacttagaagatatggataaatccctagcatcataggacctaccaagactgaatcataaaaaagtagaaaatcagaaatgatctataactaataaggggatttaatcaaccatccaaaacctcccaaccaagaaaactgtagaactaaatggcttcatttttttcttccaacaaattaaagaagaaagaagacttccaaactcattttatgaggccagcaactatcctgatattcaagtaagaaaaagacaatagaggaaaaaaaattgcagggcagtatttctgatgaactcagatgcaaaatttatcaaaaaaacactagaaaacctaattgaatagcacatcaaaataatcacacctcatgatcaaatggcatttatccatgaatgcaaggatagttcatcatacaaaaatgaaataatatgatttatcatattgacaggattatgaataaaatggtcatgagtttttaaatgaccatatttatgaaagggcaaacatgatcatttcaataggtacagaaaaggcatttgacaaaacttaacactttttcataataaaaactgtcagcaaactaggtataaaaggacattaactcaacaaaataaaggccataaatgaaaagcccacaactaacattatactaattggtgaaaaactgaaaggtttttytttattatccaaaataaggcaaagatgcccattatc

SEQ ID NO: 702806 - DNA, 2799 bp, Homo sapiens
  misc_feature 785, 2049, 2050, 2051, 2052, 2053, 2054, 2055, 2056, 2057,2058, 2059, 2060, 2061, 2062, 2063, 2064, 2065, 2066, 2067,2068, 2069, 2070, 2071, 2072, 2073, 2074, 2075, 2076, 2077,2078, 2079, 2080, 2081, 2082, 2083, 2084, 2085, 2086: n = A,T,C or G
  misc_feature 2087, 2088, 2089, 2090, 2091, 2092, 2093, 2094, 2095, 2096,2097, 2098, 2099, 2100, 2101, 2102, 2103, 2104, 2105, 2106,2107, 2108, 2109, 2110, 2111, 2112, 2113, 2114, 2115, 2116,2117, 2118, 2119, 2120, 2121, 2122, 2123, 2124, 2125: n = A,T,C or G
  misc_feature 2126, 2127, 2128, 2129, 2130, 2131, 2132, 2133, 2134, 2135,2136, 2137, 2138, 2139, 2140, 2141, 2142, 2143, 2144, 2145,2146, 2147, 2148: n = A,T,C or G
agaggcagagggacgcccagtgcactggaaggtggggtcagttggccatctcctggggtgcgttgctcagaggctaggggaggggcagagcctggctgggtctctagggtgagtgccattcccagtgcccagggacagggtgggggcagccccagggcttggctttggctgtgcatccagggcttcactgcgccacctcctgggaaaacgctaaactgcacccagaacctcctgggtccggccagtatccagcccctgccccgcaagggtggcgcagggaccacctagagggctgccctcccagctctaaactcgggagttactaactgaggccaccctctcaagggggctccgtcatcagccccgtgttcccaaggaggggactgacccggggtgacgcagaatgcacccttggggttgagccaggcagtggggcccagtttgcccctgcagaatgaccgtgaggctgagggaccagtcccagcaaagcacctacaacagtgcctggcacacagtcggcgctcaataaatgactaattgtgagcatggacaccacgcccctcaggctcagccagctcagcccagccagggagagtgtgttaggctgcataacagccccaaaagacgtccacatctaatccccggagtctatgaaaatgtcaccttctatggcagaagggactttgcagacatgagttggaatcttgagatggggagagtactcctggactgtccagggtggcgaggggcactctaatggggtcacagggtccttgcaagggagncaggagtgggtggtgggagatgtgagaacaggagcaagtgggggctcatgcctgtaatcccagcactttgggaagcttgaggactgctttgggagggaggactgcttgaagcctggattttgagaccagcctgcacaacagagtgagaccccatctctacaaaaatacaaacatkaagcaggaatggtgtcgcatgtctgtaatcccagctacttgggaggctaaagtgggaggatcccttgagcccagggaggtcaaggttgcagtgagccgtgatcacgccactgcactccagcctgggccacagagtgagatcctgtctcaaaaaaaaggcagcagcaagaggtcagaatgatgtaggagatgaaacggcccctagaagtgggaaaagatgagggaacagtttctcccctagggcctccaggaggagccagtcctgcccacacctcgaatttagcctcgtgagatccgagtcagggctctgacctccagaactgtaagggaacaagcttttggtttaagccaccaagtccacggtgacttcttacagcaacacagaaataatatgactaggaagagtgctgtttccagacacagcacccgactcacagcagctgcttgggcaggaccccctccatgtgctcaactcagggagcccgcagccctcccagagccgtccatgccctagggagggggacccatcactctcgggtgaccttgaagtgcccttgaccccaatctaatcagtctgggaagccccctagagaaaacagggtggtctacagttgctggaattttattttaaacttcatcatcatttcaaatggaattttagtttagtttagttttttagtgacagggtctcactctgtcactcaggctggagtacagtgatgcaagcatggctcactgcagcctcgaactcctgggctcaagcgatcctccagcctcagcctcctgagtagctgggactacaggtgtgcaccaccacgcccagctaattttaaaattttttgtagagatgtggtctcattatcttgcccaggttgatctacaactcctgggctcaagcgatcctcctgcctcagcctcccaaagagctgggattacaggcaggagccaccgtgcctggtcagaattgtatcttttagagaaggcatttagggctgatctaatcagttgtgaaacaggcggcaggagagccaaggctctcctccgatgctccagtgaccttcagaactctcccagcacaaagagttctgcnnnnnnnnnnnnnnnnnnnnnnnnnnnnnnnnnnnnnnnnnnnnnnnnnnnnnnnnnnnnnnnnnnnnnnnnnnnnnnnnnnnnnnnnnnnnnnnnnnnntgagccaggacaagtgactgggtgatgaggttgtggttagatggggaatccccagggaaaatcataggtgtcctgaatcctacaaggtaaagaagtgttctttgggaatagatcatgaaggaaaaaaaagagagagaaatgttccacgatgttgagggtaatctctgaaccatggaatggccctcattgactgggaaaaggagctcaggctctgaggccccccagccaggtcctggggagaggagggactggccagcaatgggggccaggcagcatctgaggcattctgatagagcagaacctcattaagaagctgctaggggccggggcagtggctcatgcctgttatcccagcactttgggaggccaaggcgggtggatcacttgaggtcaggagatcgagaccatcctggccaacatggtgaaaccccgtctctactaaaaatacaaaaattagctgggtgtggtggcaggcacctgtaatcccagccactcgggaggctgaagcaggagaatcacttgaacccgggcgggggaggttgcggtgagccgagattgcaccactgcactccagcctgggtgacagagcgagactctgtctccaaaaaaaaaaaaaaaaaaaaagtggctgctagggtcataccaggggct

SEQ ID NO: 702807 - DNA, 2799 bp, Homo sapiens
  misc_feature 785, 2049, 2050, 2051, 2052, 2053, 2054, 2055, 2056, 2057,2058, 2059, 2060, 2061, 2062, 2063, 2064, 2065, 2066, 2067,2068, 2069, 2070, 2071, 2072, 2073, 2074, 2075, 2076, 2077,2078, 2079, 2080, 2081, 2082, 2083, 2084, 2085, 2086: n = A,T,C or G
  misc_feature 2087, 2088, 2089, 2090, 2091, 2092, 2093, 2094, 2095, 2096,2097, 2098, 2099, 2100, 2101, 2102, 2103, 2104, 2105, 2106,2107, 2108, 2109, 2110, 2111, 2112, 2113, 2114, 2115, 2116,2117, 2118, 2119, 2120, 2121, 2122, 2123, 2124, 2125: n = A,T,C or G
  misc_feature 2126, 2127, 2128, 2129, 2130, 2131, 2132, 2133, 2134, 2135,2136, 2137, 2138, 2139, 2140, 2141, 2142, 2143, 2144, 2145,2146, 2147, 2148: n = A,T,C or G
agaggcagagggacgcccagtgcactggaaggtggggtcagttggccatctcctggggtgcgttgctcagaggctaggggaggggcagagcctggctgggtctctagggtgagtgccattcccagtgcccagggacagggtgggggcagccccagggcttggctttggctgtgcatccagggcttcactgcgccacctcctgggaaaacgctaaactgcacccagaacctcctgggtccggccagtatccagcccctgccccgcaagggtggcgcagggaccacctagagggctgccctcccagctctaaactcgggagttactaactgaggccaccctctcaagggggctccgtcatcagccccgtgttcccaaggaggggactgacccggggtgacgcagaatgcacccttggggttgagccaggcagtggggcccagtttgcccctgcagaatgaccgtgaggctgagggaccagtcccagcaaagcacctacaacagtgcctggcacacagtcggcgctcaataaatgactaattgtgagcatggacaccacgcccctcaggctcagccagctcagcccagccagggagagtgtgttaggctgcataacagccccaaaagacgtccacatctaatccccggagtctatgaaaatgtcaccttctatggcagaagggactttgcagacatgagttggaatcttgagatggggagagtactcctggactgtccagggtggcgaggggcactctaatggggtcacagggtccttgcaagggagncaggagtgggtggtgggagatgtgagaacaggagcaagtgggggctcatgcctgtaatcccagcactttgggaagcttgaggactgctttgggagggaggactgcttgaagcctggattttgagaccagcctgcacaacagagtgagaccccatctctacaaaaatacaaacattaagcaggaatggtgtcgcatgtctgtaatcccagctacttgggaggctaaagtgggaggatcscttgagcccagggaggtcaaggttgcagtgagccgtgatcacgccactgcactccagcctgggccacagagtgagatcctgtctcaaaaaaaaggcagcagcaagaggtcagaatgatgtaggagatgaaacggcccctagaagtgggaaaagatgagggaacagtttctcccctagggcctccaggaggagccagtcctgcccacacctcgaatttagcctcgtgagatccgagtcagggctctgacctccagaactgtaagggaacaagcttttggtttaagccaccaagtccacggtgacttcttacagcaacacagaaataatatgactaggaagagtgctgtttccagacacagcacccgactcacagcagctgcttgggcaggaccccctccatgtgctcaactcagggagcccgcagccctcccagagccgtccatgccctagggagggggacccatcactctcgggtgaccttgaagtgcccttgaccccaatctaatcagtctgggaagccccctagagaaaacagggtggtctacagttgctggaattttattttaaacttcatcatcatttcaaatggaattttagtttagtttagttttttagtgacagggtctcactctgtcactcaggctggagtacagtgatgcaagcatggctcactgcagcctcgaactcctgggctcaagcgatcctccagcctcagcctcctgagtagctgggactacaggtgtgcaccaccacgcccagctaattttaaaattttttgtagagatgtggtctcattatcttgcccaggttgatctacaactcctgggctcaagcgatcctcctgcctcagcctcccaaagagctgggattacaggcaggagccaccgtgcctggtcagaattgtatcttttagagaaggcatttagggctgatctaatcagttgtgaaacaggcggcaggagagccaaggctctcctccgatgctccagtgaccttcagaactctcccagcacaaagagttctgcnnnnnnnnnnnnnnnnnnnnnnnnnnnnnnnnnnnnnnnnnnnnnnnnnnnnnnnnnnnnnnnnnnnnnnnnnnnnnnnnnnnnnnnnnnnnnnnnnnnntgagccaggacaagtgactgggtgatgaggttgtggttagatggggaatccccagggaaaatcataggtgtcctgaatcctacaaggtaaagaagtgttctttgggaatagatcatgaaggaaaaaaaagagagagaaatgttccacgatgttgagggtaatctctgaaccatggaatggccctcattgactgggaaaaggagctcaggctctgaggccccccagccaggtcctggggagaggagggactggccagcaatgggggccaggcagcatctgaggcattctgatagagcagaacctcattaagaagctgctaggggccggggcagtggctcatgcctgttatcccagcactttgggaggccaaggcgggtggatcacttgaggtcaggagatcgagaccatcctggccaacatggtgaaaccccgtctctactaaaaatacaaaaattagctgggtgtggtggcaggcacctgtaatcccagccactcgggaggctgaagcaggagaatcacttgaacccgggcgggggaggttgcggtgagccgagattgcaccactgcactccagcctgggtgacagagcgagactctgtctccaaaaaaaaaaaaaaaaaaaaagtggctgctagggtcataccaggggct

SEQ ID NO: 702808 - DNA, 1429 bp, Homo sapiens
gggaggctgggggcttcctggtgagaggccagaccttctggaagcagcttgctggggccacaggatgcaatggcagggtgtcagttaaccagcctggctggacacgtggggacragccacatgggaacccgccagccatgcctctagccctgcctggccctgggcatgtgcaaggctgcccctgagctggcctggccgcctgcagcctccgccctcttccttctctcccagcccgccaggatcttgctcacatactttaaaacaatctaaaagtaattattacaaacaggctgcttgggaacacctgctcccgccgtccctcggaatcgctaatgttcctgcgcccagcactgacaggcgcgagggctcctcacgccccgagtcgccagatgctctgcgccatggcacccccctcaccaccccctctgcgtggcatggcgagggccgctggagcctgtgtttccagcgctgcccgcgcagctgtcacttacagcgatcagtggaaaaatcatcaccccacgaagtcatacatatggaacatcatatttgcagaatatttattttaacatgtgtcagggcctcttcgggttgcaggcagagctctgcctcccatgccaggcagctggagcagggcaggcagagggccagggtggagagcaagctccgagcaggctgggctggactggactgggctgggggccccgggccactcacccaggactccggtcggccctccctgggcgccctggggcggggggttgtcccagcagccacttgcatccctggctgtccctgcattgtcccagctgcctgttctgtaccatctcagttaggggccagccacgatagaagctgcttgaggcatttcaacagagaggatttgactcttggcactgctgagcaggtgctggaggacccagaaggcaggaggggatgcacgggtgatgtgaggtggtgacagcaggaagcagccccacccccagggccaagggaaagggtggagttgctggacccagaggcttggtggaggatggatctgggactgaccttggaggcaggtgtgctgccgggctggagctgcgagtgtcaggggaagggaagtcgcccgtgatgctcatgagacaaaacccatcttgtggtggcaaaaaggggctggtctcctcctagcgggatttggagcggagccacaccgatgcacgctttggcggagactgagccgcagggaagaggcgcagtaaaggatgttgtcacccaaacatggccaccccacccaccctccaaggcaagcctgccctgcccacccagaaagtcatgcagccccgcttacccatcgcactgagcagtcttatctcctgaccacttaccactaggaagaagcaattttgttcccattttacaggagactgaggctgagagacgaagtaacttt

SEQ ID NO: 702809 - DNA, 1429 bp, Homo sapiens
gggaggctgggggcttcctggtgagaggccagaccttctggaagcagcttgctggggccacaggatgcaatggcagggtgtcagttaaccagcctggctggacacgtggggacaagccayatgggaacccgccagccatgcctctagccctgcctggccctgggcatgtgcaaggctgcccctgagctggcctggccgcctgcagcctccgccctcttccttctctcccagcccgccaggatcttgctcacatactttaaaacaatctaaaagtaattattacaaacaggctgcttgggaacacctgctcccgccgtccctcggaatcgctaatgttcctgcgcccagcactgacaggcgcgagggctcctcacgccccgagtcgccagatgctctgcgccatggcacccccctcaccaccccctctgcgtggcatggcgagggccgctggagcctgtgtttccagcgctgcccgcgcagctgtcacttacagcgatcagtggaaaaatcatcaccccacgaagtcatacatatggaacatcatatttgcagaatatttattttaacatgtgtcagggcctcttcgggttgcaggcagagctctgcctcccatgccaggcagctggagcagggcaggcagagggccagggtggagagcaagctccgagcaggctgggctggactggactgggctgggggccccgggccactcacccaggactccggtcggccctccctgggcgccctggggcggggggttgtcccagcagccacttgcatccctggctgtccctgcattgtcccagctgcctgttctgtaccatctcagttaggggccagccacgatagaagctgcttgaggcatttcaacagagaggatttgactcttggcactgctgagcaggtgctggaggacccagaaggcaggaggggatgcacgggtgatgtgaggtggtgacagcaggaagcagccccacccccagggccaagggaaagggtggagttgctggacccagaggcttggtggaggatggatctgggactgaccttggaggcaggtgtgctgccgggctggagctgcgagtgtcaggggaagggaagtcgcccgtgatgctcatgagacaaaacccatcttgtggtggcaaaaaggggctggtctcctcctagcgggatttggagcggagccacaccgatgcacgctttggcggagactgagccgcagggaagaggcgcagtaaaggatgttgtcacccaaacatggccaccccacccaccctccaaggcaagcctgccctgcccacccagaaagtcatgcagccccgcttacccatcgcactgagcagtcttatctcctgaccacttaccactaggaagaagcaattttgttcccattttacaggagactgaggctgagagacgaagtaacttt

SEQ ID NO: 702810 - DNA, 1429 bp, Homo sapiens
gggaggctgggggcttcctggtgagaggccagaccttctggaagcagcttgctggggccacaggatgcaatggcagggtgtcagttaaccagcctggctggacacgtggggacaagccacatgggaacccgccagccatgcctctagccctgcctggccctgggcatgtgcaaggctgcccctgagctggcctggccgcctgcagcctccgccctcttccttctctcccagcccgccaggatcttgctcacatactttaaaacaatctaaaagtaattattacaaacaggctgcttgggaacacctgctcccgccgtccctcggaatcgctaatgttcctgcgcccagcactgacaggcgcragggctcctcacgccccgagtcgccagatgctctgcgccatggcacccccctcaccaccccctctgcgtggcatggcgagggccgctggagcctgtgtttccagcgctgcccgcgcagctgtcacttacagcgatcagtggaaaaatcatcaccccacgaagtcatacatatggaacatcatatttgcagaatatttattttaacatgtgtcagggcctcttcgggttgcaggcagagctctgcctcccatgccaggcagctggagcagggcaggcagagggccagggtggagagcaagctccgagcaggctgggctggactggactgggctgggggccccgggccactcacccaggactccggtcggccctccctgggcgccctggggcggggggttgtcccagcagccacttgcatccctggctgtccctgcattgtcccagctgcctgttctgtaccatctcagttaggggccagccacgatagaagctgcttgaggcatttcaacagagaggatttgactcttggcactgctgagcaggtgctggaggacccagaaggcaggaggggatgcacgggtgatgtgaggtggtgacagcaggaagcagccccacccccagggccaagggaaagggtggagttgctggacccagaggcttggtggaggatggatctgggactgaccttggaggcaggtgtgctgccgggctggagctgcgagtgtcaggggaagggaagtcgcccgtgatgctcatgagacaaaacccatcttgtggtggcaaaaaggggctggtctcctcctagcgggatttggagcggagccacaccgatgcacgctttggcggagactgagccgcagggaagaggcgcagtaaaggatgttgtcacccaaacatggccaccccacccaccctccaaggcaagcctgccctgcccacccagaaagtcatgcagccccgcttacccatcgcactgagcagtcttatctcctgaccacttaccactaggaagaagcaattttgttcccattttacaggagactgaggctgagagacgaagtaacttt

SEQ ID NO: 702811 - DNA, 1429 bp, Homo sapiens
gggaggctgggggcttcctggtgagaggccagaccttctggaagcagcttgctggggccacaggatgcaatggcagggtgtcagttaaccagcctggctggacacgtggggacaagccacatgggaacccgccagccatgcctctagccctgcctggccctgggcatgtgcaaggctgcccctgagctggcctggccgcctgcagcctccgccctcttccttctctcccagcccgccaggatcttgctcacatactttaaaacaatctaaaagtaattattacaaacaggctgcttgggaacacctgctcccgccgtccctcggaatcgctaatgttcctgcgcccagcactgacaggcgcgagggctcctcacgccccgagtcgccagatgctcygcgccatggcacccccctcaccaccccctctgcgtggcatggcgagggccgctggagcctgtgtttccagcgctgcccgcgcagctgtcacttacagcgatcagtggaaaaatcatcaccccacgaagtcatacatatggaacatcatatttgcagaatatttattttaacatgtgtcagggcctcttcgggttgcaggcagagctctgcctcccatgccaggcagctggagcagggcaggcagagggccagggtggagagcaagctccgagcaggctgggctggactggactgggctgggggccccgggccactcacccaggactccggtcggccctccctgggcgccctggggcggggggttgtcccagcagccacttgcatccctggctgtccctgcattgtcccagctgcctgttctgtaccatctcagttaggggccagccacgatagaagctgcttgaggcatttcaacagagaggatttgactcttggcactgctgagcaggtgctggaggacccagaaggcaggaggggatgcacgggtgatgtgaggtggtgacagcaggaagcagccccacccccagggccaagggaaagggtggagttgctggacccagaggcttggtggaggatggatctgggactgaccttggaggcaggtgtgctgccgggctggagctgcgagtgtcaggggaagggaagtcgcccgtgatgctcatgagacaaaacccatcttgtggtggcaaaaaggggctggtctcctcctagcgggatttggagcggagccacaccgatgcacgctttggcggagactgagccgcagggaagaggcgcagtaaaggatgttgtcacccaaacatggccaccccacccaccctccaaggcaagcctgccctgcccacccagaaagtcatgcagccccgcttacccatcgcactgagcagtcttatctcctgaccacttaccactaggaagaagcaattttgttcccattttacaggagactgaggctgagagacgaagtaacttt

SEQ ID NO: 702812 - DNA, 1271 bp, Homo sapiens
cacacacacacacttccagaaaagatttgagacaattttcaataaaaacatgtaataactaagtgactaaaagatagaagaatagccatgtaatgaagaagaaagctagttatgcmcaaaaatctatgctagtaatttttcttcaattcaatataaaatttagctctgaatattttgcaatttaagataaaaagagcaacctggtaatctaaaaatgtaggtgccgtaccttcataataataaatataatgtaccagagagttaatactgaaatatttgaaggaatttattgttttaattattcatttgatctctgaatgaaataatgagaaaaataacgaacaaagagaaaatacctgttgtttaagtgacctgatcatttgctaacataaacactgaaaaccacttaatttcatgactgattctagcaataaatattctttaaaatgaatattttaacttatttggccctaattactcatgttcttgcatttttctcaattttcagcaatcttataatctattgtggagcttagtcatatgtttagggtcattgaattttataccacagatccactcacagataagtccaattattttacccacagaagagttgttgataactgatttttaaattttgtacatttacataaagatacaaagtgagttacaacaaacaaaccggtgaatgcaagctggtgatttctatgacttttgctgatgatgctggagaatacactattgttgttcgcaataagcatggagaaacttctgcatctgcttccttgcttgaagaaggtaagtgcaactccagtttctatgtgcatgataagaactgaaatacaaggagatagcagtgctgtccgtttgctgaaaaacctgttgccacttactggttctgatactttgccccagtgtctttgcctcagttgtatggaaaatgttttagaccacatggcctcaaaaactatactgtcattaaacttctgaggttctagcaatagtttctttttgttgtatttgtttctaggcatatcatgcctctgaaaatgcagagattctaaatccggttgccttccaggcccaggcaggtaacagtgagctcaatgaaaacagtagcaaactggagagtaggtgccctgcctcaaagagacagtagctgtgttgttgccaggcatgcaccaggctgttaccaggctcagtgttgctagagctcctgatatcttaaagaaaacctggaagtcaggattttcaatgtttataacttgaaa

SEQ ID NO: 702813 - DNA, 1271 bp, Homo sapiens
cacacacacacacttccagaaaagatttgagacaattttcaataaaaacatgtaataactaagtgactaaaagatagaagaatagccatgtaatgaagaagaaagctagttatgcacaaaaatctatgctagtaatttttcttcaattcaatataaaatttagctctgaatattttgcaatttaagataaaaagagcaacctggtaatctaaaaatgtaggtgccgtaccttcataataataaatataatgtaccagagagttaatactgaaatatttgaaggaatttattgttttaattattcatttgatytctgaatgaaataatgagaaaaataacgaacaaagagaaaatacctgttgtttaagtgacctgatcatttgctaacataaacactgaaaaccacttaatttcatgactgattctagcaataaatattctttaaaatgaatattttaacttatttggccctaattactcatgttcttgcatttttctcaattttcagcaatcttataatctattgtggagcttagtcatatgtttagggtcattgaattttataccacagatccactcacagataagtccaattattttacccacagaagagttgttgataactgatttttaaattttgtacatttacataaagatacaaagtgagttacaacaaacaaaccggtgaatgcaagctggtgatttctatgacttttgctgatgatgctggagaatacactattgttgttcgcaataagcatggagaaacttctgcatctgcttccttgcttgaagaaggtaagtgcaactccagtttctatgtgcatgataagaactgaaatacaaggagatagcagtgctgtccgtttgctgaaaaacctgttgccacttactggttctgatactttgccccagtgtctttgcctcagttgtatggaaaatgttttagaccacatggcctcaaaaactatactgtcattaaacttctgaggttctagcaatagtttctttttgttgtatttgtttctaggcatatcatgcctctgaaaatgcagagattctaaatccggttgccttccaggcccaggcaggtaacagtgagctcaatgaaaacagtagcaaactggagagtaggtgccctgcctcaaagagacagtagctgtgttgttgccaggcatgcaccaggctgttaccaggctcagtgttgctagagctcctgatatcttaaagaaaacctggaagtcaggattttcaatgtttataacttgaaa

SEQ ID NO: 702814 - DNA, 1271 bp, Homo sapiens
cacacacacacacttccagaaaagatttgagacaattttcaataaaaacatgtaataactaagtgactaaaagatagaagaatagccatgtaatgaagaagaaagctagttatgcacaaaaatctatgctagtaatttttcttcaattcaatataaaatttagctctgaatattttgcaatttaagataaaaagagcaacctggtaatctaaaaatgtaggtgccgtaccttcataataataaatataatgtaccagagagttaatactgaaatatttgaaggaatttattgttttaattattcatttgatctctgaatgaaataatgagaaaaataacgaacaaagagaaaatacctgttgtttaagtgacctgatcatttgctaacataaacactgaaaaccacttaatttcatgactgattctagcaataaatattctttaaaatgaatattttaacttatttggccctaattactcatgttcttgcatttttctcaattttcagcaatcttataatctattgtggagcttagtcatatgtttagggtcattgaattttataccacagatccactcacagataagtccaattattttacccacagaagagttgttgataactgatttttaaattttgtacatttacataaagatacaaagtgagttacaacaaacaaaccggtgaatgcaagctggtgatttctatgacttttgctgatgatgctggagaatacactattgttgttcgcaataagcatggagaaacttctgcatctgcttccttgcttgaagaaggtaagtgcaactccagtttctatgtgcatgataagaactgaaatacaaggagatagcagtgctgtccgtttgctgaaaaacctgttgccacttactggttctgatactttgccccagtgtctttgcctcagttgtatggaaaatgttttagaccacatggcctcaaaaactatactgtcattaaacttctgaggttctagcaatagtttctttttgttgtatttgtttctaggcatatcatgcctctgaaaatgcagagattctaaatccrgttgccttccaggcccaggcaggtaacagtgagctcaatgaaaacagtagcaaactggagagtaggtgccctgcctcaaagagacagtagctgtgttgttgccaggcatgcaccaggctgttaccaggctcagtgttgctagagctcctgatatcttaaagaaaacctggaagtcaggattttcaatgtttataacttgaaa

SEQ ID NO: 702815 - DNA, 565 bp, Homo sapiens
attctgatttatcaacaataaagtagaaggctgttccttaactaattaacaaggggggaaaaacatcatttcttgggagtcacagaggattctgttaaatgggaaacatgcctaacacatttaaaatatctgatttaccaaactttggtccttatactttaagagaaartctttgttacgcatagcaaaacacctctacatatcctcaggagacatctagtgacataaaactcactcaccaaagttgaaatattttattatcctgagaaataagagttacccttgtccaaagtgtctcactcttaaattttagtgcattgcattcagctgaatttctcttggacataagagaccaatcattttgcttatgaaaatcctccttcttgtaggatgtgctagaggcacagagagactaacagctttttggctctttttcctatacatattgaaactgaaaacatttcaatttgaatttcagttcatatagatgtgcacaggttttcaaggtccaaatgtgtaatatcttccatgtaaaaatctttctattcattatggtttcaaatga

SEQ ID NO: 702816 - DNA, 2363 bp, Homo sapiens
ttttaaagattaaatggctaagttatttaaactgcctgatacggtaactagtatgtagttttcactcaataagcagtagttgttttcaatgttacagccaagttatggtaagacttctgagctgaagaaaaaatgttgcataattatgttttaaactctatcttcaaactgtttatactctttttgattcagtgcaactcgcttgtaaattcaagatactctgtctagaattgaaattaaattttggctgtcacaataattctgtttcatgagtgtacaaagatttaataatacgtttgtaatattttattagctgcaaatggaaaatactacatacctgtctgtggcttttcatagtatttttttaagtcactaagctaaatgttttcattgacaattatataggatgacaataagagaggattagggttgaactgttgaagaagaatgttccctaagcaaactgtaaagtctcttcagttgaaataaatgtttcaaaataatgtttgyataatgtcagtattaatattaattcaatgatgtattattgtttataggccctgaaaaatgtgggtggtgtggacttttagaagccgatttgagtttcaatttttaaaatttaagcattaagcctaagatctcaagaaatgtgaaatgcacattagctaagaattgtccaattttataaattgattcataaaagtttattatgacttttgtccaaagtccaaaataaataactctaagcttaacattggtaacatttcagctttagttactgtatagttattttcatttaagagtgtatcagtaatttatcactctctaatgcctgactctattacggaacttactactgttgtgaaggggaaaaaaaatccctcttaagtgcattgtgtccaaagaacatttagattttaagaataaaataaatcttcaaaatcataaaaacaggtggtgaaaatgacaatactacaattttttgaatatttacctcttattgagcactcactatgagtcagatattaagtacatgagcatttatgttaatatttccatacttggtgaacaaccatggaagataaaaattattttccccatttatcagataagaaaacaagacaggaagtttggttacttgcccacagctacaaagttttcaaatgacaaggcagagagtatttttgacctaaagtctattctctctttacattcttctttaatagattacggcaaagctctggaacctctcatctgcatttccactctacccgcatacctgtcacaagctgtatcttctggctcatctctgagagaggaggggaaaatgagaagagagagagctgggttgctccagttcatttattcaactgtgctagcatatggaatgtgatctttcctgtcatcccacaatactgtctaagtcttaagtccagaactgagggtagaagacacctcatatgttctacattccaacttcctaccagcatttggcataatccctgtcaccaccaaattgcagagagtattgatatcataatctttaaaaatccatccctttattcaactgtcctgtgtgccagaccttcttttgatggagtgtcatggaggccctaaagggaatgactgagggctggggaaggggaaagcataatcctagcagtagatttgaagttgggctttattttagatttgggtaaggggaagttattgaaaggtttcagagcaggacataactggcatcaacctatgtaaaatcttggggtgagactgcagttggagagtcaggctgtaggtgatgcagaactgatgactatggggtggtggtggtgatagtaaggatttgaattttagtgaaagtaggttctgagccaggggaagtggtggcactttgtcatttgaaactggattggaggaagaagggcagagctcacgtcacttgtatggagagaaaggaggaaaagatcagtaggtgagagaaggggtgatgagttattgcttcattcttggggaagaggaccaaggaagcacccctgccccttggacccagttttgagtccaggctgaagccagagagaaacaaagagaaaaaggaggagcaacaaatggaagcaaaggtcatggggtgagggcactgccaggtcttataagaagactcagagaaatcgtcatctacggtttcaaggagcaaatgtctgtgaaaagagtgctataaccccaccttctactggggaggtagtgggagattttccttccagaaggcaagtgaaagaaactctgagaaaatccttaaaggtgcctgcaggaatgggcattattttctggcaagatccaccctgggctgtagagaccacaagttcaca

SEQ ID NO: 702817 - DNA, 571 bp, Homo sapiens
acgctccgcgctcgaatatcttccccggagggctcgggaccagcgcgagcaccttccctggaagcccacatccatcacccagcgatctcctctccatcgagagcagggcttgctgagagtggcggaggaccttgaaggctcccggttctgtatctccgtggccgagacgytttctgctcgaggcccaggggagtccgggagcgaaagcctcttttgatgaatgagcatttgggcagtatctgcccatcagcccccactgccgaaggaggagacactgcacatgctcggccagggctgattgtgttaaagcgcgaattttagctgctggcaggtctctgctcatcctcacaacgcgctttcagcgggttccacactgccagggctattacgaagagggaggctcacgttattgggcggtggtgtctccatgcaggagggaggatgtccccagaggaagctaaaggtagatgggggcagggaagggaaccaatagaaacagagcacctgcttgggcccgtgttagccattttacgtagttatcatttccttctgctcccgtgtctaaatagca

SEQ ID NO: 702818 - DNA, 620 bp, Homo sapiens
gaaaacagctgtctacagaggagccgtggggaactggagagagcctgcccaggaaagcactccctctgtgaccctttgcagacccagtgctttcagagcttctcatttttcacaggaagctggaaaaccagatagtgtgaaatattgccagctgtgtcactttaaaaccacagtgcaagacaaaaaccaaaaatgactgtgggcccgtttcagggcgtcagattgaaacctctcctttagaggattcaccttgccctgcagctttctttcctctgcaccgttagagactatgagaaggaatccaagccagtttctggtgagcacttaagagaatgcttttgggttaaacttaaaagtcaataaaccattaagtgactaggtacattctggctatttacttcatgaaataatttgtttgcatgtgttttggccacatattacccacaacacaaagatcatctgtgtttattrcaagttagaattgattagtattttgaagtaaatgtagaattttgcagtctcatatggtagtggacttgccatccttatctcatgcacgccaggctctggcatagcattatcacttgctgaaaataagtattttatcttgttttaccgta

SEQ ID NO: 702819 - DNA, 1580 bp, Homo sapiens
tggttcagtaggtccagggtagagccttggtgtttctaacaagttcttcaggtgattgtcatgcatactaatggttgagacccacttacatatggctttccttatggtaaggcttacacagccagcatagagtagcccttctcattagatgcttaatcttgaaaatactaataaacacattaaactagatgccatacacagaacaaagcccacaaaagtctatcctcttttttwaaaaaaaagaaaaaagtctttatcttctgtgtcagtggcatgggactaacacgtacagaaatgaaaaatatgccttctgcttttctacttttctttagcactgggaatttgctccaaatagtgtgcactatcttctgagcctgtggcagcggctggcagcctctgtgccgtatgtcaaagccacagcaggccccacatgctgggaaacttacactcctgaggtcaccaaagcctacatcacatcccggctggaatctgcgcacatcatactgaggtaaggaaacttagcctcattcattcccgcaccagtggcctgttggcacacttcctagagatcagacaccccattggcaaagaggtactcgaagcgtgtctcattggagccactactgttcatggttcttcttccttgtcagcagagtagcatgagagcataaagcctgatagaatagtcttgtctcttgaacatttatattctattcatattcccccttttcactgtccatagcaatatctttgaatagagtatatccatataatgtttgtccttgccgctgtttttctttcaatgtgagaaacatttataagatatagatgataagaattatgtgtaacttataggtgcttaatgtgaactcctaaagaaataagtggataaagattacacaatctagttatcaattctaattccagagctagaacacataagaattctaagccactgatcactgattgctttacattcatacatggtttctgtctacattgacttaactgaaccaaaatcccgtagctaaagaaatgtcaagccctttcaaaaattacctatattaaatgaagttatagccctgtttaggtagctttcttgttttcactggctgtttgtcaagagaatttacttggagtctaagggtctggggcctttttaagttggattcttaatttgcttagccccaagtgcattgaatagtcatgagttatagtcttaactgttgatgacttgaatcagttcaaaatctgagtattcatgaagttcaccagcaagccttcttctgtcacctccatagcttccactcctgaggattcggctggcttcagtgaggcattgttggggagtggttacatgtttgtaggctctggggccggatagccagttagtagctctgtactcttgggcaagttgctccatttctgtatttgtaaaattcaaataataataggcctgcctcataaggttcttacaaggattaaattaatatgacctggcacagtgtgtagcacatggtaagcacacagctagttttagtgctgctgctcctgctgctgctgctgctgccattatcata

SEQ ID NO: 702820 - DNA, 1580 bp, Homo sapiens
tggttcagtaggtccagggtagagccttggtgtttctaacaagttcttcaggtgattgtcatgcatactaatggttgagacccacttacatatggctttccttatggtaaggcttacacagccagcatagagtagcccttctcattagatgcttaatcttgaaaatactaataaacacattaaactagatgccatacacagaacaaagcccacaaaagtctatcctctttttttaaaaaaaagaaaaaagtctttatcttctgtgtcagtggcatgggactaacacgtacagaaatgaaaaatatgccttctgcttttctacttttctttagcactgggaatttgctccaaatagtgtgcactatcttctgagcctgtggcagcggctggcagcctctgtgccgtatgtcaaagccacagcaggccccacatgctgggaaacttacactcctgaggtcaccaaagcctacatcacatcccggctggaatctgcgcacatcatactgaggtaaggaaacttagcctcattcattcccgcaccagtggcctgttggcacacttcctagagatcagacaccccattggcaaagaggtactcgaagcgtgtctcattggagccactactgttcatggttcttcttccttgtcagcagagtagcatgagagcataaagcctgatagaatagtcttgtctcttgaacatttatattctattcatrttcccccttttcactgtccatagcaatatctttgaatagagtatatccatataatgtttgtccttgccgctgtttttctttcaatgtgagaaacatttataagatatagatgataagaattatgtgtaacttataggtgcttaatgtgaactcctaaagaaataagtggataaagattacacaatctagttatcaattctaattccagagctagaacacataagaattctaagccactgatcactgattgctttacattcatacatggtttctgtctacattgacttaactgaaccaaaatcccgtagctaaagaaatgtcaagccctttcaaaaattacctatattaaatgaagttatagccctgtttaggtagctttcttgttttcactggctgtttgtcaagagaatttacttggagtctaagggtctggggcctttttaagttggattcttaatttgcttagccccaagtgcattgaatagtcatgagttatagtcttaactgttgatgacttgaatcagttcaaaatctgagtattcatgaagttcaccagcaagccttcttctgtcacctccatagcttccactcctgaggattcggctggcttcagtgaggcattgttggggagtggttacatgtttgtaggctctggggccggatagccagttagtagctctgtactcttgggcaagttgctccatttctgtatttgtaaaattcaaataataataggcctgcctcataaggttcttacaaggattaaattaatatgacctggcacagtgtgtagcacatggtaagcacacagctagttttagtgctgctgctcctgctgctgctgctgctgccattatcata

SEQ ID NO: 702821 - DNA, 602 bp, Homo sapiens
tgtactgcaatgagtaaataagtaaataatctagatttcaaaaagcaatatttctcaaactttatctcctaaaagattataaaaatacttattatgataacacatcctgaatttccgattcggtacatcacaggttaaagcctaagaaaatgcaatttctgcctttttgataagctgactggggtaattcttatttatacagtcttcagactagactctgataaacatttttatgtggttaatttgaaaagaaaaagtgtgatttctataaaatgatagaaaataatttrgtgtgattaaaaaatgtcccagaggtttaatagcttctgatctgagatctgccactgaatcttgctaaaaattacctaggtaacctcccttgctctcagtttcttcattgttaaaatatgcacatttaatcacacaatcttaatgtttccatcacattctaaaattctatgtggataacaaaattgtaagtgttactacggaaaattcctttttactactcttagaaccactcaagctctgacaaatatgtgaattctttccaattttgaattggtgcagctttttaaataatttctttaatgggagagatg

SEQ ID NO: 702822 - DNA, 602 bp, Homo sapiens
tgtactgcaatgagtaaataagtaaataatctagatttcaaaaagcaatatttctcaaactttatctcctaaaagattataaaaatacttattatgataacacatcctgaatttccgattcggtacatcacaggttaaagcctaagaaaatgcaatttctgcctttttgataagctgactggggtaattcttatttatacagtcttcagactagactctgataaacatttttatgtggttaatttgaaaagaaaaagtgtgatttctataaaatgatagaaaataatttagtgtgattaaaaaatgtcccagaggtttaatagcttctgatctgagatctgccactgaatcttgctaaaaattacctaggtaacctcccttgctctcagtttcttcattgttaaaatatgcacatttaatcacacaatcttaatgtttccatcacattctaaaattctaygtggataacaaaattgtaagtgttactacggaaaattcctttttactactcttagaaccactcaagctctgacaaatatgtgaattctttccaattttgaattggtgcagctttttaaataatttctttaatgggagagatg

SEQ ID NO: 702823 - DNA, 577 bp, Homo sapiens
tactccctgctttcaattctgtgtacgtgtatatatatatttatttggggtatgtgcagagaattgctaaatcatgtggtaattttctaacattttgaagaacaccaaactttcccccagcagctgtaccattttacattccgccagtaatacaccaacacttgatattttccttcttttttttttatcataaccatcctaaaaggcaagaagtggaggtaaaatgtgtacctttaaaacttttttttttccaccataacttgtgtcttacattacccacaggattcttgtgggaaagcaccctaaatatggtcttctttaaagtcacacaatttaaccccaaaagattgttaatctgaaagagattgtaatctaactggtcctagaaaaatgataaacaataatttatgttacctaaatggataatgcaatcactggggcrctaattttatcaaatcatctgccatgtgatttagtgtctgtgtgtgtgtgtgcaattatttttaagcgtttgttgtgtggaaaatccaactttataatgtgttatctatagtttattaggcttctaaatttgttt

SEQ ID NO: 702824 - DNA, 620 bp, Homo sapiens
agcctggccaacatggtgaaacccctctctactaaaaatacaaaaaattagccgggcatggtggtgtgtgcctgtaattccagctactcgggaggctgaggcaggagaatcacttgaacccaggagtcggaagttgcagtgagccgagatcatgccactacactccagtctgggtggtagagtgagactctgtctcaaaaaaaaaaaaaaaaaaaawgtgtttttttttttttaatttcaagcataagtgcctgcttaaggatctgaactccccttttacaagctgaatgaggacactgacacagacggaggaactagaattgtgttagagcctgaaaggtatatgtgtacacagttataagacaataataatctttataagctaatataaatattagcttatgcagtaaaaaaatagaaaagacaccagatgaactctttcccagattaaatgctaacaaaaagctaacaaaccggaagtcaataaatgcatcattttacacaaattctaaaatgagtcataaaaaagttttaagacattgtaggagtataaaggtagaaatagtttggggactatctacaaaaacatagaaattagctggtttgaaatataaaagctg

SEQ ID NO: 702825 - DNA, 620 bp, Homo sapiens
agcctggccaacatggtgaaacccctctctactaaaaatacaaaaaattagccgggcatggtggtgtgtgcctgtaattccagctactcgggaggctgaggcaggagaatcacttgaacccaggagtcggaagttgcagtgagccgagatcatgccactacactccagtctgggtggtagagtgagactctgtctcaaaaaaaaaaaaaaaaaaaaagtktttttttttttttaatttcaagcataagtgcctgcttaaggatctgaactccccttttacaagctgaatgaggacactgacacagacggaggaactagaattgtgttagagcctgaaaggtatatgtgtacacagttataagacaataataatctttataagctaatataaatattagcttatgcagtaaaaaaatagaaaagacaccagatgaactctttcccagattaaatgctaacaaaaagctaacaaaccggaagtcaataaatgcatcattttacacaaattctaaaatgagtcataaaaaagttttaagacattgtaggagtataaaggtagaaatagtttggggactatctacaaaaacatagaaattagctggtttgaaatataaaagctg

SEQ ID NO: 702826 - DNA, 1147 bp, Homo sapiens
tgagaaaacagattcaaagaacttctgggaagtgaagattgttatactattgatagttattcctggactctcttgttttcacacagtgtcttttgcatccctccttcccacatactgtgagggatacctattgagttgcctgccctgattccctctctgcaggaggtagcagccatgatggttaatgccaccctgccacctggtcacaggagaaggcctctgacccaagccagaccaagtgatctcactcccagaaatggtataatggaaagatttagggactgagtggtcagtggcttaggctcattatacaacccagtgattttcactccggggcagctctgctccccagaggacatttggcagaatatggattcattcttggtggtcagactgaggagggggtactactggtatctagtgagtggataccagggatgtagctaaacatcctcctatgcacaggacaaacctccacaacaaataactctctggcctaaaatgtcagyagtgtcaatgttgtaaaaccctggcttaggtgactgctggaggtagaggggctgaggaggaggcagcttccatctagctccagccaattgttaccacaggcggggtggcaggaggaatgaggcctcaaggttgcctggtctgatttttctagagaagctggaaatctggatttccatgagtaaccttttgatttttaagcaccagctcaatttttaataaacgtatgggccaaataaatacatctccaggcctcatggagcctgggggccaccagcttacagcttctgatggggagaggagacccaaagtctcctttacttgagctttttgaagctatctggcttctccccttccttggatgttgtgaggcaacagaccatgatttttttaagtaagttctctgtgttgcctaaacaatagcttccattacatgtgcccccaaaagccttaactagtacacaactcctacctgtttctctcccactcacttctttggctacatgttttgacctgattgccatccccatccacgtaaaacattttaatctcagaactggaaggggtcttacgaaaggtctactagttagggtgggcgggggagagtattaggaaaaatagctaatgcatgctgggctta

SEQ ID NO: 702827 - DNA, 1147 bp, Homo sapiens
tgagaaaacagattcaaagaacttctgggaagtgaagattgttatactattgatagttattcctggactctcttgttttcacacagtgtcttttgcatccctccttcccacatactgtgagggatacctattgagttgcctgccctgattccctctctgcaggaggtagcagccatgatggttaatgccaccctgccacctggtcacaggagaaggcctctgacccaagccagaccaagtgatctcactcccagaaatggtataatggaaagatttagggactgagtggtcagtggcttaggctcattatacaacccagtgattttcactccggggcagctctgctccccagaggacatttggcagaatatggattcattcttggtggtcagactgaggagggggtactactggtatctagtgagtggataccagggatgtagctaaacatcctcctatgcacaggacaaacctccacaacaaataactctctggcctaaaatgtcagcagtgtcaatgttgtaaaaccctggcttargtgactgctggaggtagaggggctgaggaggaggcagcttccatctagctccagccaattgttaccacaggcggggtggcaggaggaatgaggcctcaaggttgcctggtctgatttttctagagaagctggaaatctggatttccatgagtaaccttttgatttttaagcaccagctcaatttttaataaacgtatgggccaaataaatacatctccaggcctcatggagcctgggggccaccagcttacagcttctgatggggagaggagacccaaagtctcctttacttgagctttttgaagctatctggcttctccccttccttggatgttgtgaggcaacagaccatgatttttttaagtaagttctctgtgttgcctaaacaatagcttccattacatgtgcccccaaaagccttaactagtacacaactcctacctgtttctctcccactcacttctttggctacatgttttgacctgattgccatccccatccacgtaaaacattttaatctcagaactggaaggggtcttacgaaaggtctactagttagggtgggcgggggagagtattaggaaaaatagctaatgcatgctgggctta

SEQ ID NO: 702828 - DNA, 1147 bp, Homo sapiens
tgagaaaacagattcaaagaacttctgggaagtgaagattgttatactattgatagttattcctggactctcttgttttcacacagtgtcttttgcatccctccttcccacatactgtgagggatacctattgagttgcctgccctgattccctctctgcaggaggtagcagccatgatggttaatgccaccctgccacctggtcacaggagaaggcctctgacccaagccagaccaagtgatctcactcccagaaatggtataatggaaagatttagggactgagtggtcagtggcttaggctcattatacaacccagtgattttcactccggggcagctctgctccccagaggacatttggcagaatatggattcattcttggtggtcagactgaggagggggtactactggtatctagtgagtggataccagggatgtagctaaacatcctcctatgcacaggacaaacctccacaacaaataactctctggcctaaaatgtcagcagtgtcaatgttgtaaaaccctggcttaggtgactgctggaggtagaggggctgaggaggaggcagcttccatctagctccagccaattgttaccacaggcggggtggcaggaggaatgaggcctcaaggttgcctggtctgatttttctagagaagctggaaatctggatttccatgagtaaccttttgatttttaagcaccagctcaatttttaataaacgtatgggccaaataaatayatctccaggcctcatggagcctgggggccaccagcttacagcttctgatggggagaggagacccaaagtctcctttacttgagctttttgaagctatctggcttctccccttccttggatgttgtgaggcaacagaccatgatttttttaagtaagttctctgtgttgcctaaacaatagcttccattacatgtgcccccaaaagccttaactagtacacaactcctacctgtttctctcccactcacttctttggctacatgttttgacctgattgccatccccatccacgtaaaacattttaatctcagaactggaaggggtcttacgaaaggtctactagttagggtgggcgggggagagtattaggaaaaatagctaatgcatgctgggctta

SEQ ID NO: 702829 - DNA, 605 bp, Homo sapiens
gaccgrgtttctccatggtggtcagtcaggctggtctcgaactccgggactcaggtgatctgccagccttggcctcccgaagtgctgggattgcaggcgtgagccaccgcgcctggccgagattcttaagtaaatgaacttttctttaggcacatgaattggaactatggaacaaagagattattgatacaattattcaagaagcacatttgcatatttagaacagaaaggttgcacagctcttacatactcaaacatagttttagagttagatcatgatcttaactttcttcatggttaccttttggggaggaaaaccaccctttttcatattaaagtaaaatgtgtacgtaataaagtgtgactggcatccaaatcaagaaacagacccttcccagtaccatgggaatctgcctgcctttctagttactttcctgacttctaataaccgattagttttgagtatgtttgagtaaaagaatagatgtgagtatatattatgtattttaagtttgaaagttttcaaaagatgcttttcaaaatctttcttaagaaaaatatagtgtcttagaaaatgtgccaaaatgtattgaatttcagagctg

SEQ ID NO: 702830 - DNA, 605 bp, Homo sapiens
gaccgggtttctccatggtggtcagtcaggctggtctcgaactccgggactcaggtgatctgccagccttggcctcccgaagtgctgggattgcaggcgtgagccaccrcgcctggccgagattcttaagtaaatgaacttttctttaggcacatgaattggaactatggaacaaagagattattgatacaattattcaagaagcacatttgcatatttagaacagaaaggttgcacagctcttacatactcaaacatagttttagagttagatcatgatcttaactttcttcatggttaccttttggggaggaaaaccaccctttttcatattaaagtaaaatgtgtacgtaataaagtgtgactggcatccaaatcaagaaacagacccttcccagtaccatgggaatctgcctgcctttctagttactttcctgacttctaataaccgattagttttgagtatgtttgagtaaaagaatagatgtgagtatatattatgtattttaagtttgaaagttttcaaaagatgcttttcaaaatctttcttaagaaaaatatagtgtcttagaaaatgtgccaaaatgtattgaatttcagagctg

SEQ ID NO: 702831 - DNA, 605 bp, Homo sapiens
gaccgggtttctccatggtggtcagtcaggctggtctcgaactccgggactcaggtgatctgccagccttggcctcccgaagtgctgggattgcaggcgtgagccaccgcgcctggccgagattcttaagtaaatgaacttttctttaggcacatgaattggaactatggaacaaagagattattgatacaattattcaagaagcacatttgcatatttagaacagaaaggttgcacagctcttayatactcaaacatagttttagagttagatcatgatcttaactttcttcatggttaccttttggggaggaaaaccaccctttttcatattaaagtaaaatgtgtacgtaataaagtgtgactggcatccaaatcaagaaacagacccttcccagtaccatgggaatctgcctgcctttctagttactttcctgacttctaataaccgattagttttgagtatgtttgagtaaaagaatagatgtgagtatatattatgtattttaagtttgaaagttttcaaaagatgcttttcaaaatctttcttaagaaaaatatagtgtcttagaaaatgtgccaaaatgtattgaatttcagagctg

SEQ ID NO: 702832 - DNA, 772 bp, Homo sapiens
ttctaggagcttgtggttttagctttcacatccaggtctatgaggtacctcaaattcatctttctatgtggtgtgaagtarggggtcaaggttcattttttggttccatttggaaatccacttgctccagtaaaagctctccccactgaactgcacaggtggctgtgtgtttctggactctccattctgtcccagtggtctgtccttgcattggctccacactgtctctattgtagtgtcatatgggaagtctcagggcagcctctgattggctctgcctgcctcacagtcagcccctccaccaatcgctggcaggggttggggtgccctgattggccacccgcttgggccacatgcctgccccacttatccagcaatgattggttccccacccagatcactgtttccccaaagaactgaggttggacaattccaccctccctcaccacatctcagatgagccagctgaggcccagagacatggtgatgtgggagtccccagaagagttggatgtaaccaggatggctgtgccctgaacccaccctgacctccctgggtccttccccaggggatccttgagaacatccagaggaacaagctgctctttattgagacccaggatggtgccgaaaccagtgtcgccctggagaagtaccaggaggtgggtgtgcgaggccagcgtggagaggggtgggggaggtggctctgaggagtgacctaacttgcgtctcggtctccccacctcaggcctgcgagaatggccgcggggcc

SEQ ID NO: 702833 - DNA, 1028 bp, Homo sapiens
  misc_feature 247, 248, 249, 250, 251, 252, 253, 254, 255, 256, 257, 258,259, 260, 261, 262, 263, 264, 265, 266, 267, 268, 269, 270,271, 272, 273, 274, 275, 276, 277, 278, 279, 280, 281, 282,283, 284, 285, 286, 287, 288, 289, 290, 291, 292, 293: n = A,T,C or G
  misc_feature 294, 295, 296, 297, 298, 299, 300, 301, 302, 303, 304, 305,306, 307, 308, 309, 310, 311, 312, 313, 314, 315, 316, 317,318, 319, 320, 321, 322, 323, 324, 325, 326, 327, 328, 329,330, 331, 332, 333, 334, 335, 336, 337, 338, 339, 340: n = A,T,C or G
  misc_feature 341, 342, 343, 344, 345, 346: n = A,T,C or G
cattttatcacatagaaaattgcttatgacagctgggcatggtggctcatgcctgtaatcccagcactttgggaggctgaggcgggtggatcacgaggtcacgagatcacgaccagcctgatcaacatggtgaaaccctgtctctactaaaaatagaggagttagctgggtgtggtggcacgcacttgtaatcccagctactcgggaggctgaggcagaagaattgcttgaacctgggaagcggagnnnnnnnnnnnnnnnnnnnnnnnnnnnnnnnnnnnnnnnnnnnnnnnnnnnnnnnnnnnnnnnnnnnnnnnnnnnnnnnnnnnnnnnnnnnnnnnnnnnnaaaaaaagggaattggttatgactttatgttttgaaaaaaatattaaaaagtatagctgtaatttattctcaattatgtaacaacatgcataaaaagtagatcaaaaaggaatctatcaccagggtaatatttgttgcttctaagatgtggcataatcagttatctttatccccaaacccccatttatttttcctattctgaactttcaatccttccacaatgagcacatatctttttaataatcagaaacataaacttttaaacttttttaaaaagccacaggctgggtacagtagctcacatctgtaatctcagcactttgggaggccaaggtgggaggatcacttgagcccaggagttcatgtctagcctgggcaacactttttccacaayaaaaaattagccaagcatggtggcacatatgtatggtttcagctactcatgaggctgaggtgggaggactgcttgagcccaggaggccgaggtgaggttgcagtgagctgtgatcacaccactgcactccagcttggcaacagcagaaccctatctctctctctctgtctctctctctctctttaagccatagcaacaaagacttatgctgaactaagttctagttcttttaggaaataaaggtcattatttagtccacgacaggatttatttattcagatcattgtc

SEQ ID NO: 702834 - DNA, 2650 bp, Homo sapiens
tgcaatgttaaagaaattagacaatgactgttatgttcctaaagtagtctcctgggaatgtttcaaatctattctaatgacatttctttagttcagtaaatttttgagtctacctttgtgactcccaaatgcttactggttgttctttaaaattccatctaccatcagtagcaaagattagcccaccagtgatattcagaaggatggattactgcatctctaaaaggaatcatacaaaggttttgagaaagtagagattgttggaagaacatatagcatccagaggtgggtactttgaaaaggataatattcacttcaatgaataagggctgactattaaaaaattagattcacttgtgttctttgtgtttttctgtaccttctaaataataaacatatattattttttataatcaaaggaagcacaataagagttattttggaaagccgatcacattaccacactgttatatcacatagataatacttcaaaaatgtgttcctttttttaatggatgaagatagatgtagttaacactatcagagtcacagcgctaaaaatattgtgaagattcacataccaaattaagaccgattcatctccatgaacagtgctaggaaagtggcagctgatccctcatatggtgtcattctgaatgcatttactccaagtttcagaaatcacccatttcacctatagtttaaggaactggtttcacagggttcaaggtggggccgggggcaggtgtggggcagggatggaagtgggaacacgaagaagtctcaaatatcaaagccaatgaaactacacacaaaatagctcctcatagtctgtatcacaaagacgctttgctctcgtctgagacacataacaactgattgtagagcaaaaaatcctccaagcaggtcagtgacagagtgtgtaggtgtgtagctacctgtggccatcggccttcggaactcagctgtatgcttaagaagcacaccatgctgtggaggtctccgaagctcaaagaagagttctttgggcgctgtctcagcatctcttactaccacctgaagtcctgcagcaaggagaaggaagcgtggtgagagagaaagcgtatgttaaagacgatagactatatattaaaaccgcaggccaggctaggagtcatgctgtgggtaatctgattgttatcagaaagcactgcttcattccaatcaggcacaaaagagtaaaaacagataatacagtcaattcctacactgcaagtasgtgcttccaaaagttcatgtaaggtagttctgaatttagaacaccttttttcttccatacaaatgacagcatgcacagaggaagcccacaggtaggtcaaccctgactagctgggttagattttcttccagaaaatcctcctataaattgtttggcatttcattgttttgtcccttcttatttttctaaagctacaaagagccaagtgagcaatgatcacaaaggtgaggtgcagggttaaagtgacaggcatccttgtacacatggcttatttgtaagtttggtaaaaattaattttaggccaaaccccatatgtagaaactggataaggatctctagaacacacctaacaaaaatcacaatacctactgtttattagtaaaatgttcttgataaaagaatacatttctaaagattaaattcactaattagtacatataattatatacaaaataactgggtcaactctagttcttcacaacttctgaagcttcttgtgacctgacatttctcctgctactcttcactttctaaatagaaacaagagccgccattgaaatcctgctcccctctatgttcttctcgccgctctattactttatattttagtgatggcatcaaagcaaactcccggaaaatcagttctgtgttgtgttccaccactgaacactggcctctgaaggcttcatttccttctctctgtgcggcttctgtttgcatagaaatgggcaggaggaaggatacaggtgagaatgcaggcaacttctggaagaagagtttgcttttttggcaaccatcaagaggtttgaagaggggcagcaatatgatcccatttccaaagccatgtttctatcaggctcccagttcttacctacagaagtgctgcctcctgggctgaccgccagccgtggagctgtgacctggaacactggcagttgctgatcactgggaagtaagtgaatggtgaggaccatctccggacttgtgtgttctccatctgaaactaaaaaggataaatgcacacacacacagagacacacacacacacacagagacacgcacacacacacacgaatcaacttgtagtctggtcctcttcaggcagtttccacaaatatgtagctagaaacttttttgcactactttaacctttgaagagatgcttacaaatgaagaaagtaagcaagcaagatactgtgagctattcttttttctatggataagaaaaaagataaagaaccataataacaaaatcattctaagaggctactttcacaacaaaggtgatcttgataaatgttagtggaaaggaaggtaacacaaaatctgcacccatagatgctactggtaaaggcttttgattatggaaatatttcttgattcaattcattc

SEQ ID NO: 702835 - DNA, 2650 bp, Homo sapiens
tgcaatgttaaagaaattagacaatgactgttatgttcctaaagtagtctcctgggaatgtttcaaatctattctaatgacatttctttagttcagtaaatttttgagtctacctttgtgactcccaaatgcttactggttgttctttaaaattccatctaccatcagtagcaaagattagcccaccagtgatattcagaaggatggattactgcatctctaaaaggaatcatacaaaggttttgagaaagtagagattgttggaagaacatatagcatccagaggtgggtactttgaaaaggataatattcacttcaatgaataagggctgactattaaaaaattagattcacttgtgttctttgtgtttttctgtaccttctaaataataaacatatattattttttataatcaaaggaagcacaataagagttattttggaaagccgatcacattaccacactgttatatcacatagataatacttcaaaaatgtgttcctttttttaatggatgaagatagatgtagttaacactatcagagtcacagcgctaaaaatattgtgaagattcacataccaaattaagaccgattcatctccatgaacagtgctaggaaagtggcagctgatccctcatatggtgtcattctgaatgcatttactccaagtttcagaaatcacccatttcacctatagtttaaggaactggtttcacagggttcaaggtggggccgggggcaggtgtggggcagggatggaagtgggaacacgaagaagtctcaaatatcaaagccaatgaaactacacacaaaatagctcctcatagtctgtatcacaaagacgctttgctctcgtctgagacacataacaactgattgtagagcaaaaaatcctccaagcaggtcagtgacagagtgtgtaggtgtgtagctacctgtggccatcggccttcggaactcagctgtatgcttaagaagcacaccatgctgtggaggtctccgaagctcaaagaagagttctttgggcgctgtctcagcatctcttactaccacctgaagtcctgcagcaaggagaaggaagcgtggtgagagagaaagcgtatgttaaagacgatagactatatattaaaaccgcaggccaggctaggagtcatgctgtgggtaatctgattgttatcagaaagcactgcttcattccaatcaggcacaaaagagtaaaaacagataatacagtcaattcctacactgcaagtaggtkcttccaaaagttcatgtaaggtagttctgaatttagaacaccttttttcttccatacaaatgacagcatgcacagaggaagcccacaggtaggtcaaccctgactagctgggttagattttcttccagaaaatcctcctataaattgtttggcatttcattgttttgtcccttcttatttttctaaagctacaaagagccaagtgagcaatgatcacaaaggtgaggtgcagggttaaagtgacaggcatccttgtacacatggcttatttgtaagtttggtaaaaattaattttaggccaaaccccatatgtagaaactggataaggatctctagaacacacctaacaaaaatcacaatacctactgtttattagtaaaatgttcttgataaaagaatacatttctaaagattaaattcactaattagtacatataattatatacaaaataactgggtcaactctagttcttcacaacttctgaagcttcttgtgacctgacatttctcctgctactcttcactttctaaatagaaacaagagccgccattgaaatcctgctcccctctatgttcttctcgccgctctattactttatattttagtgatggcatcaaagcaaactcccggaaaatcagttctgtgttgtgttccaccactgaacactggcctctgaaggcttcatttccttctctctgtgcggcttctgtttgcatagaaatgggcaggaggaaggatacaggtgagaatgcaggcaacttctggaagaagagtttgcttttttggcaaccatcaagaggtttgaagaggggcagcaatatgatcccatttccaaagccatgtttctatcaggctcccagttcttacctacagaagtgctgcctcctgggctgaccgccagccgtggagctgtgacctggaacactggcagttgctgatcactgggaagtaagtgaatggtgaggaccatctccggacttgtgtgttctccatctgaaactaaaaaggataaatgcacacacacacagagacacacacacacacacagagacacgcacacacacacacgaatcaacttgtagtctggtcctcttcaggcagtttccacaaatatgtagctagaaacttttttgcactactttaacctttgaagagatgcttacaaatgaagaaagtaagcaagcaagatactgtgagctattcttttttctatggataagaaaaaagataaagaaccataataacaaaatcattctaagaggctactttcacaacaaaggtgatcttgataaatgttagtggaaaggaaggtaacacaaaatctgcacccatagatgctactggtaaaggcttttgattatggaaatatttcttgattcaattcattc

SEQ ID NO: 702836 - DNA, 2650 bp, Homo sapiens
tgcaatgttaaagaaattagacaatgactgttatgttcctaaagtagtctcctgggaatgtttcaaatctattctaatgacatttctttagttcagtaaatttttgagtctacctttgtgactcccaaatgcttactggttgttctttaaaattccatctaccatcagtagcaaagattagcccaccagtgatattcagaaggatggattactgcatctctaaaaggaatcatacaaaggttttgagaaagtagagattgttggaagaacatatagcatccagaggtgggtactttgaaaaggataatattcacttcaatgaataagggctgactattaaaaaattagattcacttgtgttctttgtgtttttctgtaccttctaaataataaacatatattattttttataatcaaaggaagcacaataagagttattttggaaagccgatcacattaccacactgttatatcacatagataatacttcaaaaatgtgttcctttttttaatggatgaagatagatgtagttaacactatcagagtcacagcgctaaaaatattgtgaagattcacataccaaattaagaccgattcatctccatgaacagtgctaggaaagtggcagctgatccctcatatggtgtcattctgaatgcatttactccaagtttcagaaatcacccatttcacctatagtttaaggaactggtttcacagggttcaaggtggggccgggggcaggtgtggggcagggatggaagtgggaacacgaagaagtctcaaatatcaaagccaatgaaactacacacaaaatagctcctcatagtctgtatcacaaagacgctttgctctcgtctgagacacataacaactgattgtagagcaaaaaatcctccaagcaggtcagtgacagagtgtgtaggtgtgtagctacctgtggccatcggccttcggaactcagctgtatgcttaagaagcacaccatgctgtggaggtctccgaagctcaaagaagagttctttgggcgctgtctcagcatctcttactaccacctgaagtcctgcagcaaggagaaggaagcgtggtgagagagaaagcgtatgttaaagacgatagactatatattaaaaccgcaggccaggctaggagtcatgctgtgggtaatctgattgttatcagaaagcactgcttcattccaatcaggcacaaaagagtaaaaacagataatacagtcaattcctacactgcaagtaggtgcttccaaaagttcatgtaaggtagttctgaatttagaacaccttttttcttccatacaaatgacagcatgcacagaggaagcccacaggtaggtcaaccctgactagctgggttagattttcttccagaaaatcctcctataaattgtttggcatttcattgttttgtcccttcttatttttctaaagctacaaagagccaagtgagcaatgatcacaaaggtgaggtgcagggttaaagtgacaggcatccttgtacacatggcttatttgtaagtttggtaaaaattaattttaggccaaaccccatatgtagaaactggataaggatctctagaacacacctaacaaaaatcacaatacctactgtttattagtaaaatgttcttgataaaagaatacatttctaaagattaaattcactaattagtacatataattatatacaaaataactgggtcaactctagttcttcacaacttctgaagcttcttgtgacctgacatttctcctgctactcttcactttctaaatagaaacaagagccgccattgaaatcctgctcccctctatgttcttctcgccgctctattactttatattttagtgatggcatcaaagcaaactcccggaaaatcagttctgtgttgtgttccaccactgaacactggcctctgaaggcttcatttccttctctctgtgcggcttctgtttgcatagaaatgggcaggaggaaggatacaggtgagaatgcaggcaacttctggaagaagagtttgcttttttggcaaccatcaagaggtttgaagaggggcagcaatatgatcccatttccaaagccatgtttctatcaggctcccagttcttacctacagaagtgctgcctcctgggctgaccgccagccgtggagctgtgacctggaacactggcagttgctgatcactgggaagtaagtgaatggtgaggaccatctccggacttgtgtgttctccatctgaaactaaaaaggataaatgcacacacacacagagacacacacacacacacagagacacgcacacacacacacgaatcaacttgtagtctggtcctcttcaggcagtttccacaaatatgtagctagaaacttttttrcactactttaacctttgaagagatgcttacaaatgaagaaagtaagcaagcaagatactgtgagctattcttttttctatggataagaaaaaagataaagaaccataataacaaaatcattctaagaggctactttcacaacaaaggtgatcttgataaatgttagtggaaaggaaggtaacacaaaatctgcacccatagatgctactggtaaaggcttttgattatggaaatatttcttgattcaattcattc

SEQ ID NO: 702837 - DNA, 1181 bp, Homo sapiens
actgccaccaagtaacacaatttttatttatattcttcacgctgtgtctctttagggaacctccataaaggcagatgtttttgtctgttttattctctgtctgtccccatcacagcgtaggctctcaggagctatgtcatgaatgatgaagaatgttagcatttgctcttctcaactaacaggaaaggtgggaacactggtgagttgagttgttgttccttatttttttttgagacagggtcttactgtgttgcccagacttctagaggctcaagtgatcctcctgctttggcttcccaaagtgctggcattataggcttgagttgtctctcccagcctagttgttattcctgacttaaaacttactattggctgggcgcggtagctcacacctgtaatgccagcactttgggaggccgaggcaggcagatcacttgaggcaaggagtttgggaccagccagcccaacacagtgaaactccgtctctactaaaaatagaaaaaactagccaggtgtggtggtgcgcacctgtaatcccagctacttgggtgactgaggcatgagaattgcttaaaactgggaagcrgaggttgctgtaagccaagatcgtgccactgtactcctgcctgggtaacaaagtgagactctgtctaaaaaaacaaataaaacttattattaaccccatttatcatacagatggactaagagaggctcaggaaactcaagtgatttacctaaggccacagagctattaactggtgccagtgggacatgaacacatttttgttgttgccttccagtctgaagttcttttgcattgtcttttatccaattatttatgatgatagatcaagaagaatttatataggctgtacagagcctcatacggcatgaatactataaagggtgacttctaatgtgtttcccttctcagtggtctcacatctttattatgggatataaatatagcagtgatccgtcccccaaacatatctgggaaaagattaatcgcagaaagtatgacttcatggtgaaggaagcagcccatgacccagagattatctggtctccatctgattctaatgctacccagagtgtgctgaagaggcccttgtttgttttgggtttctgctaagacatgtcacctccgcatttgagaaaagagtgacagctcatttgtc

SEQ ID NO: 702838 - DNA, 1181 bp, Homo sapiens
actgccaccaagtaacacaatttttatttatattcttcacgctgtgtctctttagggaacctccataaaggcagatgtttttgtctgttttattctctgtctgtccccatcacagcgtaggctctcaggagctatgtcatgaatgatgaagaatgttagcatttgctcttctcaactaacaggaaaggtgggaacactggtgagttgagttgttgttccttatttttttttgagacagggtcttactgtgttgcccagacttctagaggctcaagtgatcctcctgctttggcttcccaaagtgctggcattataggcttgagttgtctctcccagcctagttgttattcctgacttaaaacttactattggctgggcgcggtagctcacacctgtaatgccagcactttgggaggccgaggcaggcagatcacttgaggcaaggagtttgggaccagccagcccaacacagtgaaactccgtctctactaaaaatagaaaaaactagccaggtgtggtggtgcgcacctgtaatcccagctacttgggtgactgaggcatgagaattgcttaaaactgggaagcggaggttgctgtaagccaagatcgtgccactgtactcctgcctgggtaacaaagtgagactctgtctaaaaaaacaaataaaacttattattaaccccatttatcatacagatggactaagagaggctcaggaaactcaagtgatttacctaaggccacagagctattaactggtgccagtgggacatgaacacatttttgttgttgccttccagtctgaagttcttttkcattgtcttttatccaattatttatgatgatagatcaagaagaatttatataggctgtacagagcctcatacggcatgaatactataaagggtgacttctaatgtgtttcccttctcagtggtctcacatctttattatgggatataaatatagcagtgatccgtcccccaaacatatctgggaaaagattaatcgcagaaagtatgacttcatggtgaaggaagcagcccatgacccagagattatctggtctccatctgattctaatgctacccagagtgtgctgaagaggcccttgtttgttttgggtttctgctaagacatgtcacctccgcatttgagaaaagagtgacagctcatttgtc

SEQ ID NO: 702839 - DNA, 594 bp, Homo sapiens
acatgcaggttcctgaaccccaccctagatcctctgaatcagcatctttggaggctaaaatctgaaatatgtcttgctaacaagctcactgggtgagaaaagtaatacaacagttaaaacatatagactttgattcaaatcctgatccttctgctggtaatatataatccaaatagcttaataagaatgctattttttattgagtgtttattatgtgccaagcactgtgctaaaccagaccatgcatttgcccagttaatcaactactttatgtgggaggttatatttttaatacccatgttttagatggaaaactaaggttcagggtggttaagcacactgctcaagactgtacaacatgaagtaagtaaagctgggatttgaactgacctgtttgctgcagcacacttcacaattatactggagtctaagagctgactgcaggttctaccggtgctggatgatcaacacccagtagttttctttgccctcacagggaggagatcagagggatgrcatggcagggaccttcactccctggggcttggttttagtagcagatcagagtccctgaagacgtagcctgagggtgaa

SEQ ID NO: 702840 - DNA, 1536 bp, Homo sapiens
caacattgaaaaggcaggcaaaaataataacaatttgctgatggtacgattttctaccttgaaaaattcaaactctgctggggaaacatgagcggctctagtaagaaagtttggtaaaataactggatagaagaactaggtaaaaattaattgttttcccatttagttactatttttaatttcaagatgttatttaaaaaaagatctcgctcataatagcagcaacaagctgaaaaagtctaggaaatatacttaacaagaagtgttgcaagtgctataaggagaaatctttaacacttcattccaggaggggggaaagaatatgtgaataaatagagacacattcagtttctagaaaggaagtcccaattgtaaagatgtcaattctccctaacagaattaatacatataacgtaattccagggaaaatagcagtgggagcatgaagtttatttggaagagtccttgcttaagaatagcgaagacaatttgggacaagaataataatgaaatagtgataaagagatcttacctaacttgctaaccaaaacataggatgaaatgacagtcattaaaactgtgtgggttttgcatgagaattcctgctcttaggactcaatggattattcgtagacattcagtgatgcgaccttcctgtggggcatggtggagcctcagctcggtagagtgtaaaccctgttttgcaggggtctggttcaattcttacctccccggctcctagcagtgagacctcaagtaacctatgtaacttctctaggttctgttcagcgaaatggatattataacagtactggagttgatgagggaattaaacgagccggagtataagtggcacttagcatggtgcctgtggtaaactctcaacagatgattattttattcactaaaaacaataataaataagtaaattgttaattggcttatgggccaaggaaaagccagttgcattttttcagttattggttgataaaatcttggcacaatttcccaatttgagtccttgctgggcaagctctgagcagatgggaggtggaacatctgcgtattgaacttggattcatttcctctgccctcagctcaccttccaggtggttctgtgggttcactgtggttgttctttctgatcgyggttcagaagaccagcctcctggccatcctcacaggccagacttgctgaagccaggattagacaagcaagagctgtccaaactttatcctgtaggggaagggccgctgttctgcactgtattttttccatgggtccttccatgcctacgatgcactccctatcccacagggctgagttcagtacagagtggggagttcccttccactcccctccccacctaccctaagccttctggcacgcactgggctcccagctgggagagaacaatattttcccaaacacaatctgtatgtgatctggggtaaagctccctggggtgaccttgggacagtttgcaaggaaataagcagagagcacagtgaaatgctcagtgtcctgtgagcaca

SEQ ID NO: 702841 - DNA, 668 bp, Homo sapiens
tggcagagttgatattctacactatacttagtttatcacaaggctgctcagagccttaccaaatctcaggacacccatgcttaacttctttctgtgttacactatggaaagacccaccttcctttaatgtgaacattctgggacatataccttcctagtatggtggttctcaaccttggctgcacacaggggtcacctagggagctgtaaaaatcaccagtgacagccaggcatggtggctcacacctgtaatcccagcactttgggaggcagaggtgggcggatcacgagatcaggagattgggaccatcctggctaacatggtaaaactccatctctactaaaaatacaaaaaaattagccrggtgtggtggcacgcacctgtagtcccagctgcttgggaggctgaggcaagagaatcgcttgaacctgggaggaagaggttgcagtgagccgagatcgtgccactgcactccagtctgggagacagagcgagactccgtctcaaaaagaaaaaagaaaaaaagaaaagaaaaaaaaatcatcagttcgtgggccccactcctagagattctgatttatttgggctgggtgtggcctaaataattccagtgtatggctaagtgtgaaaacctctgccagctcaagtaaggagagcagctgccctg

SEQ ID NO: 702842 - DNA, 1109 bp, Homo sapiens
tgggcatatttaatgtctttatggaactgtttttcacttctgatgagctgctgttccttggagatgaaaatattttctgacattcactcaagtacaaggccaactttagaacacagaaagaaatgggctttgctatgaccaatcacaggtataggccggggcatttgagacaagggcccctgaggttagcaaggctcaaggtcacctggagcaatgttcagttttcagggatgtagcagaacagactggtgagagtactggcctgggaaccaggaggtctggctttcagttcctgcctgcctctaacctgttatgtaattatagaggagtcccttctctggatatgtttccctacccatactatgtataaattaggttatttaaaatttgatggtctttgcagctttatgattcaatgagtttttgaaataaaacatttagacaaagaaacacaatgcactttacccaaatcagaaatttgtgtggcaagcctgattcatgtaaaccacagtatactatttgaccaaagtgttagtgttatgtgtcaaaggaggttattaaaaatatggcatctggtaggatggaacttgatcaaaatatatttawgtgaaaagttttataggacaaaaatcatttcctactaggaaatgtgtcccattccagtgctctaagccttgcagagattaaggcctctgatcgtgcagacagaaggaagggtcagacaagacagcagagccaagaacaatgagggctacttctgggatgtggagatgctgttctgggaagctgccatcatttccagtgcgtccacttcctttcctctgcatttaaaactctctctgcctgactaccaattaggtgcaaataaaaaccaggttagtcttatagcaacatgctggcaaaaaccaatgaaaaaacaaaataggcattttcaagatttgctgttcaactcacgtgtaaaaatattaaatgagatttgagagactcattttctgggggaagaatgctatctttgcaaaagaggccccctataatgctctgaaactatccatcagccttcaaggcaagggagaaatagatttctcttggaagctactttaagaaaaact

SEQ ID NO: 702843 - DNA, 1244 bp, Homo sapiens
gagattttggagtaagtatttcaactatatgataggctttaagttattgattatttgcttccttcataaatatattggaacagagtgcttttatagcttaatgaataatagccagagtaatgctggaaatcagggaaaaaatactaggaatacatattctcttaatggactgtaataattgagattgcctctatctgtaatattttatgcagttctacttatcagctcacaagtaccgaatcatataagaagaattcaagtgggaaattgcatttatcaaggagttggaacttttttcttatgaaaatattttgaaaaaattaaattttcaggtagtaaaggatgaagatgtaatctacaacagatgcaggaaaatagaaatttataaaaggtgtgaatggaggtaaatatgtacttactcaccctaacctaaaatattaagactaaaagtatttggaaaaagtaggctgggcatggtggctcatgcctgtagtcccagcactttgggaggctgaggtgggaggattgcttgaggccaggagttcgataccagcctgggcaacaaagtgaaacccccccatctgtacaaaaaattaaaaaaaaaatagccaggtatggtgcacrtgcccgcagtctctgttacatgggagtctgagggaggaagattgcttgagtccaggaggtcgaggctacactgagccacgtttgtaccactgcactccagcctgggcaacagagtgagactctagaaaaaaaaaaaaaggaaaaactaacttgagggctaaataaaagattacatatgcatataaactccctcaaaagatggatgttcaggctgcagtgcataaggtccaaaaggagtcaatgaaatacgaaaagaaacacctgagtcagactaattaaatgactcagacacattctgagtcagactaattaagtgattcatctcccagtgtcttgtctttgagtagcaccaattgatttttagtagaagagcatgttatactctctgattgtacctagtggtttctattcattttttaaaaatacatgttccacgttatttcaaaaaggatttaagggattgataccatttaatggatgatcctcagtaagaaaaaggacaggtagttggggtgtatcctttaaatgttagggttttattttactatcaactctacagatactattgttacaaacttttttagaacatgttactttaaattaatggaaattacatttca

SEQ ID NO: 702844 - DNA, 1244 bp, Homo sapiens
gagattttggagtaagtatttcaactatatgataggctttaagttattgattatttgcttccttcataaatatattggaacagagtgcttttatagcttaatgaataatagccagagtaatgctggaaatcagggaaaaaatactaggaatacatattctcttaatggactgtaataattgagattgcctctatctgtaatattttatgcagttctacttatcagctcacaagtaccgaatcatataagaagaattcaagtgggaaattgcatttatcaaggagttggaacttttttcttatgaaaatattttgaaaaaattaaattttcaggtagtaaaggatgaagatgtaatctacaacagatgcaggaaaatagaaatttataaaaggtgtgaatggaggtaaatatgtacttactcaccctaacctaaaatattaagactaaaagtatttggaaaaagtaggctgggcatggtggctcatgcctgtagtcccagcactttgggaggctgaggtgggaggattgcttgaggccaggagttcgataccagcctgggcaacaaagtgaaacccccccatctgtacaaaaaattaaaaaaaaaatagccaggtatggtgcacatgcccgcagtctctgttacatgggagtctgagggaggaagattgcttgagtccaggaggtcgaggctacactgagccacgtttgtaccactgcactccagcctgggcaacagagtgagactctagaaaaaaaaaaaaaggaaaaactaacttgagggctaaataaaagattacatatgcatataaactccctcaaaagatggatgttcaggctgcagtgcataaggtccaaaaggagtcaatgaaatacgaaaagaaacacctgagtcagactaattaaatgactcagacacattctgagtcagactaattaagtgattcatctcccagtgtcttgtctttgagtagcaccaattgatttttagtagaagagcatgttatactctctgattgtacctagtgstttctattcattttttaaaaatacatgttccacgttatttcaaaaaggatttaagggattgataccatttaatggatgatcctcagtaagaaaaaggacaggtagttggggtgtatcctttaaatgttagggttttattttactatcaactctacagatactattgttacaaacttttttagaacatgttactttaaattaatggaaattacatttca

SEQ ID NO: 702845 - DNA, 1464 bp, Homo sapiens
gtgaacagattggcataggagaaggttcagcagcctgactaaaatttggctatgcaaataatctttgtgactaggcacatgtagctattttaatgtaaattaatttaattaagtaaaactttaaattcagttttcagtctcactagagacatttcaagtactcacaagacagatggctagtggctaccatattatacaaggcagatataaaacatttttaccattgcagaaagttttattgggcagcattgatagcaatgagtcccaatgcagggtacacattagaattccctgggtagccatgaaaaaattttgatgccaagatctgattayaatcaaagatttgatcttgaaatctctgtttaagatctccacttacagtttcttacggaattctaatatgtaactagggttaaaaaccactgacttaggatgtgaaggactctacatcattctgttttccttaatgatatttctctcaatcaaactcttgctgaatttagcaggttattatttatttatttttctttacaagtacttggggcatgcacctattttatgatgcaagttaataaaagaaatgcatgtttaagttttctgccaacctctggatagtattgagaccttaggaaagttgaggtgacttacaatgaaaagttcctaaaaggaagacatgtttgtatgctgagagaaagatgctgaagataaaatgactgtgtggcaaggtccttgtggaataaataaactactggaattatgatcattcttttttcacatgccacaattaagagccattaatattgtggaatatttgcttccagtcttttatacgaaattaatttttaaaataaacctgatagatactatatataaataagtcatatgttgcaaatactgaactttaaaaatcacctctaatccagtcacccagagatactgttaatatttgggtaggcattactgccaagtaatgtacatcacttctatgtgtatgtacatatagaaggatggatggatggttagaaggagggagtgacagaatgaaagataatacttattcaccacaagaggttaattcctaaggggtgtgtctaaatttaagcaaattctaaaaaaaaaaaaaagaaaaaaaattacagatactgttattacaatcttgtttcagttttaggtgggatatatttaaccatgctttggtatgacattagcagtttcatttctcatttttctcctcctcacatcctaatatttactcattttactatttttacattgtccatgtttgtaacattcatacttagtttttcaaccacttttttataacttattattgttctatattctctagtaaccttttagaatgtcctccttgattctggagtttttgatacaattggcataatttcagtcttatagcactgagtaatgtttcagtagagaagtctcatgcaagccagccagatt

SEQ ID NO: 702846 - DNA, 1150 bp, Homo sapiens
ttttttttttaagacggagtctctctctgttgccaggctagagtgcagtggcatgatctcagctcactgcaacctccgcctcctgggtttaagcaattctcttgcatcagcctcccaagtagctgggactagaggcacaagccaccacgcccagctaatttttgtatttttagtagagacggggtttcaccatgttggccaggatggtgtcaatctcttgaccttgtgatccacctgcctcagtctcccaaagtgctgggattacagacatgagccatggagcctggccgaaaactgctttttaagggagctgaagcagtgtgtgaaaaatgaatgaaggtcaaaaaattatgttgcatttcgtgcatatgagtttctaggacattaaacccaaatgtgtctattgaattagcttcactaaaaatataggtaagcactgctaaagtctatgtccatgtttgtatcaggtttgttcacctaaaagaatctgttgaagcatctgttggttacaatccaaagtgtgaaaatatgcacattatcttcattttatagacagttaggtggagctgcagaggaaatgatttgtgcatgtcatggaggaaattgattgcataaatggaattggaatttaagtcctgcatctttttttttttttttttttcttgagacagagtctcgttctgttgcccaggctggagtgcagtggcgtgatctcagctcactgcaatctctgcctcccgggttcacgccattctcctgcctcagcctcctgagtagctgggagtacaggcacccaccaccacacccagctgattttctgtatttttagtagagacagggtttcactatgttagtcaaggtggtctcaatctcctgaccttgtgatccgcctgccttggcctcccaaagtgttgggattacaggcgtgagccactgcacgtggccaaagtcctgcatcttgattcatgcctgtattctcacaacatcatgagctatttgctrtttggcaaaggacaaattaaggcggaggatggacatttctcagggaaaatttcagctcttgtgtcttttttctgggtctacccctcccaacctgccaatcaataaaccatccattgtttctctttgacagaaactttggagacttgta

SEQ ID NO: 702847 - DNA, 571 bp, Homo sapiens
  misc_feature 471, 472, 473, 474, 475, 476, 477, 478, 479, 480, 481, 482,483, 484, 485, 486, 487, 488, 489, 490, 491, 492, 493, 494,495, 496, 497, 498, 499, 500, 501, 502, 503, 504, 505, 506,507, 508, 509, 510, 511, 512, 513, 514, 515, 516, 517: n = A,T,C or G
  misc_feature 518, 519, 520, 521, 522, 523, 524, 525, 526, 527, 528, 529,530, 531, 532, 533, 534, 535, 536, 537, 538, 539, 540, 541,542, 543, 544, 545, 546, 547, 548, 549, 550, 551, 552, 553,554, 555, 556, 557, 558, 559, 560, 561, 562, 563, 564: n = A,T,C or G
  misc_feature 565, 566, 567, 568, 569, 570: n = A,T,C or G
ccagacctcagcagatgggaacatacctcacaggtggttcacacatgttcactccacaaggaacattcatctttatgccaaaagggagtggccaaaatagttaagatgagaaactggttgggggttaggagttgggggtagtgtgatggagatgcaggagcttaggctgagatgggaattgctaggatcagcaagacaagaagaagatgagggagacagacatgaaatttaagactgtttcaaatggctgttttcactctattgttcccttatcctatgaaaggggagctctgaggctgggtgttcatcrtttcatttattcattcagtgttttttcagtggcatattgaaaacaggccccatccatatattggagtaaagtccctactctcaaagagctgaatatttagtggtaattgcagtaaccaaactctattgaagattttacactcaattgtcaaagtccaaggnnnnnnnnnnnnnnnnnnnnnnnnnnnnnnnnnnnnnnnnnnnnnnnnnnnnnnnnnnnnnnnnnnnnnnnnnnnnnnnnnnnnnnnnnnnnnnnnnnnnc

SEQ ID NO: 702848 - DNA, 571 bp, Homo sapiens
  misc_feature 471, 472, 473, 474, 475, 476, 477, 478, 479, 480, 481, 482,483, 484, 485, 486, 487, 488, 489, 490, 491, 492, 493, 494,495, 496, 497, 498, 499, 500, 501, 502, 503, 504, 505, 506,507, 508, 509, 510, 511, 512, 513, 514, 515, 516, 517: n = A,T,C or G
  misc_feature 518, 519, 520, 521, 522, 523, 524, 525, 526, 527, 528, 529,530, 531, 532, 533, 534, 535, 536, 537, 538, 539, 540, 541,542, 543, 544, 545, 546, 547, 548, 549, 550, 551, 552, 553,554, 555, 556, 557, 558, 559, 560, 561, 562, 563, 564: n = A,T,C or G
  misc_feature 565, 566, 567, 568, 569, 570: n = A,T,C or G
ccagacctcagcagatgggaacatacctcacaggtggttcacacatgttcactccacaaggaacattcatctttatgccaaaagggagtggccaaaatagttaagatgagaaactggttgggggttaggagttgggggtagtgtgatggagatgcaggagcttaggctgagatgggaattgctaggatcagcaagacaagaagaagatgagggagacagacatgaaatttaagactgtttcaaatggctgttttcactctattgttcccttatcctatgaaaggggagctctgaggctgggtgttcatcgtttcatttattcattcagtgttttttcagtggcatattgaaaacaggccccatccatatattggagtaaagtccctactctcaragagctgaatatttagtggtaattgcagtaaccaaactctattgaagattttacactcaattgtcaaagtccaaggnnnnnnnnnnnnnnnnnnnnnnnnnnnnnnnnnnnnnnnnnnnnnnnnnnnnnnnnnnnnnnnnnnnnnnnnnnnnnnnnnnnnnnnnnnnnnnnnnnnnc

SEQ ID NO: 702849 - DNA, 584 bp, Homo sapiens
caatgcctgtctttcagacactccaatatgtaaacaaagtgaagaatattgactacattcagttgtgaataaaatgtycccttgcattatggtgagtgtttctggacactcctgtttaaatggaaccatctcaactacaaagaagacctagcaacatccctgattttttccacaatcaaaacaaaacagtatggcatagtatttaaggcagataagagaattgttaaacaactattttaactcactccctctatcacctcctatgggaaaagtgctcttttgcccccattcatcttgggcgtggggcatgattctgtactggtagaagaaacagtgtctaagttctgagcctaggatttgagtaacattatacgtttccacttactcctctaagagcttcaaacctcctccatgagaagaacattccccagaaaactgctactggatagcctgggctcacagtaagatgtgtgggacagagctgaacttgacttcaggcctgaaacacccatcccagccccttgtgaatgcatgtgctagacatcaatgctagctttttttgtgtcctgaaatcctgtggttgt

SEQ ID NO: 702850 - DNA, 584 bp, Homo sapiens
caatgcctgtctttcagacactccaatatgtaaacaaagtgaagaatattgactacattcagttgtgaataaaatgttcccttgcattatggtgagtgtttctggacactcctgtttaaatggaaccatctcaactacaaagaagacctagcaacatccctgattttttccacaatcaaaacaaaacagtatggyatagtatttaaggcagataagagaattgttaaacaactattttaactcactccctctatcacctcctatgggaaaagtgctcttttgcccccattcatcttgggcgtggggcatgattctgtactggtagaagaaacagtgtctaagttctgagcctaggatttgagtaacattatacgtttccacttactcctctaagagcttcaaacctcctccatgagaagaacattccccagaaaactgctactggatagcctgggctcacagtaagatgtgtgggacagagctgaacttgacttcaggcctgaaacacccatcccagccccttgtgaatgcatgtgctagacatcaatgctagctttttttgtgtcctgaaatcctgtggttgt

SEQ ID NO: 702851 - DNA, 584 bp, Homo sapiens
caatgcctgtctttcagacactccaatatgtaaacaaagtgaagaatattgactacattcagttgtgaataaaatgttcccttgcattatggtgagtgtttctggacactcctgtttaaatggaaccatctcaactacaaagaagacctagcaacatccctgattttttccacaatcaaaacaaaacagtatggcatagtatttaaggcagataagagaattgttaaacaactattttaactcactccctctatcacctcctatgggaaaagtgctcttttgcccccattcatcttgggcgtggggcatgattctgtactggtagaagaaacagtgtctaagttctgagcctaggatttgagtaacattatacrtttccacttactcctctaagagcttcaaacctcctccatgagaagaacattccccagaaaactgctactggatagcctgggctcacagtaagatgtgtgggacagagctgaacttgacttcaggcctgaaacacccatcccagccccttgtgaatgcatgtgctagacatcaatgctagctttttttgtgtcctgaaatcctgtggttgt

SEQ ID NO: 702852 - DNA, 590 bp, Homo sapiens
tttcttttttctttttttttagagataggagtcttgtgatgttgcctaggctggtctcaaactcctgggcacaagcgatcctcccaccttagcctccccaaagtgctgggattacaggcgagagccaccatgccagcctgattaaagggtgatcacagagtaaaagaagggctttgtaatgggaagatgggaaacagaaaattatttcagaattccagtttgttttggtttttgttttgtttttttgtgacaaagtctcactctgttgcccaggctagaatgcagctgcaacctccacctcccaagttcaagcrattctcgtgcctcagcctgccgagtagttgggattacaggcatgtgccaccatgcccagctaatttttgtatttttagtagagatggggttttgccatgttggccaggttggtctcgaactcctgacctcaagtgattcgcccacctcggcctcccaaagtgctgggattacaggcgcgagccactgtgcctggtccagaaccccaatttgaagagaattagcatgactgagtaaaacaaagaaggcctgagcctcccagaaggcaaggcagaaaa

SEQ ID NO: 702853 - DNA, 590 bp, Homo sapiens
tttcttttttctttttttttagagataggagtcttgtgatgttgcctaggctggtctcaaactcctgggcacaagcgatcctcccaccttagcctccccaaagtgctgggattacaggcgagagccaccatgccagcctgattaaagggtgatcacagagtaaaagaagggctttgtaatgggaagatgggaaacagaaaattatttcagaattccagtttgttttggtttttgttttgtttttttgtgacaaagtctcactctgttgcccaggctagaatgcagctgcaacctccacctcccaagttcaagcaattctcgtgcctcagcctgccgagtagttgggattacaggcatgtgccacyatgcccagctaatttttgtatttttagtagagatggggttttgccatgttggccaggttggtctcgaactcctgacctcaagtgattcgcccacctcggcctcccaaagtgctgggattacaggcgcgagccactgtgcctggtccagaaccccaatttgaagagaattagcatgactgagtaaaacaaagaaggcctgagcctcccagaaggcaaggcagaaaa

SEQ ID NO: 702854 - DNA, 625 bp, Homo sapiens
tcactcctttatgcagatataagtctcatctggcatcatttttcttccacctaaaggaatttcttttacatgtcctatagtgaaagtctgctgacaacatatttcctcactttttgctattctgaaaaaaaaaaaaaaaaaaaaaaaaacctcatttttgactccagttttgaaagattttttttgccatgcaaagaattctaggttaacaggtttgctctctttttttgttaraaatttaggccgagcgtggtggtttacacctataatcccagcactttgggaggctgaggcgggcagctcacttgaggccaggagctcgagaccagcatggccaacatgatgaaaccctgtctctgctgaaaataccaaattagccagtcacagtggcgggcacctgttatcccaggtactccgagaggctgaggcaggagaatcgcttgaacctgggaggcggaggttgcagtaagcaaagatcgtgccactgcactccagcctgggtgacagggcaagacatcatctcaaaaaaaaagagaaagaaaaaaagaaatttaaacatgttgttacatttttgggaataggataacttcacacttacttactggtcaaaaatattaaagttctt

SEQ ID NO: 702855 - DNA, 625 bp, Homo sapiens
tcactcctttatgcagatataagtctcatctggcatcatttttcttccacctaaaggaatttcttttacatgtcctatagtgaaagtctgctgacaacatatttcctcactttttgctattctgaaaaaaaaaaaaaaaaaaaaaaaaacctcatttttgactccagttttgaaagattttttttgccatgcaaagaattctaggttaacaggtttgctctctttttttgttagaaatttaggccgagcgtggtggtttacacctataatcccagcactttgggaggctgaggcgggcagctcacttgaggccaggagctcgagaccagcatggccaacatgatgaaaccctgtctctgctgaaaataccaaattagccagtcacagtggcgggcacctgttatcccaggtactccgagaggctgaggcaggaraatcgcttgaacctgggaggcggaggttgcagtaagcaaagatcgtgccactgcactccagcctgggtgacagggcaagacatcatctcaaaaaaaaagagaaagaaaaaaagaaatttaaacatgttgttacatttttgggaataggataacttcacacttacttactggtcaaaaatattaaagttctt

SEQ ID NO: 702856 - DNA, 664 bp, Homo sapiens
gttgctcccattaggacgctggttctcaaacctggctgctcattaaaatcacctggggacatttacactactgatgaacagcccccttcaccccacccctgagttttgtggtctggagtacggtcttgccactgagagttttaaaagctgcacaagtgattctagttgcagacaagtttgagaaccactactttcaaacatgcaacagtggagggtctcgagctggtgtgtttcagaatcatctggggaattcgtgaaaaacagagactcaggctgttgtagccttcattcttttgagaagcagtgtattctgaaatgatgacatgctaaacttaacaatagttaaaaaaaataatcagtactgaatctgatacaaggccaggtgtggtggctcacacctgtaatcccagcacttcgggaggccaaggtgggaggatcgcttgaagccaggagttcaagaccagcctggtcaacatagcaagatcccatctccacaaaagaaaaattaaaaaattagctgggcatggtggcacatgcctgtagtcccagctactcggaaggytgagatgggaggatggcttgagtccagcaggtcaaggctgcagtgagctgagattatgccactgcaccgagcgtgggtgacagagtgagaccctgtctcaat

SEQ ID NO: 702857 - DNA, 664 bp, Homo sapiens
gttgctcccattaggacgctggttctcaaacctggctgctcattaaaatcacctggggacatttacactactgatgaacagcccccttcaccccacccctgagttttgtggtctggagtacggtcttgccactgagagttttaaaagctgcacaagtgattctagttgcagacaagtttgagaaccactactttcaaacatgcaacagtggagggtctcgagctggtgtgtttcagaatcatctggggaattcgtgaaaaacagagactcaggctgttgtagccttcattcttttgagaagcagtgtattctgaaatgatgacatgctaaacttaacaatagttaaaaaaaataatcagtactgaatctgatacaaggccaggtgtggtggctcacacctgtaatcccagcacttcgggaggccaaggtgggaggatcgcttgaagccaggagttcaagaccagcctggtcaacatagcaagatcccatctccacaaaagaaaaattaaaaaattagctgggcatggtggcacatgcctgtagtcccagctactcggaaggttgagaygggaggatggcttgagtccagcaggtcaaggctgcagtgagctgagattatgccactgcaccgagcgtgggtgacagagtgagaccctgtctcaat

SEQ ID NO: 702858 - DNA, 664 bp, Homo sapiens
gttgctcccattaggacgctggttctcaaacctggctgctcattaaaatcacctggggacatttacactactgatgaacagcccccttcaccccacccctgagttttgtggtctggagtacggtcttgccactgagagttttaaaagctgcacaagtgattctagttgcagacaagtttgagaaccactactttcaaacatgcaacagtggagggtctcgagctggtgtgtttcagaatcatctggggaattcgtgaaaaacagagactcaggctgttgtagccttcattcttttgagaagcagtgtattctgaaatgatgacatgctaaacttaacaatagttaaaaaaaataatcagtactgaatctgatacaaggccaggtgtggtggctcacacctgtaatcccagcacttcgggaggccaaggtgggaggatcgcttgaagccaggagttcaagaccagcctggtcaacatagcaagatcccatctccacaaaagaaaaattaaaaaattagctgggcatggtggcacatgcctgtagtcccagctactcggaaggttgagatgggaggatggcttgagtccagsaggtcaaggctgcagtgagctgagattatgccactgcaccgagcgtgggtgacagagtgagaccctgtctcaat

SEQ ID NO: 702859 - DNA, 1913 bp, Homo sapiens
  misc_feature 634, 644, 645, 646, 647, 648, 649, 650, 651, 652, 653, 654,655, 656, 657, 658, 659, 660, 661, 662, 663, 664, 665, 666,667, 668, 669, 670, 671, 672, 673, 674, 675, 676, 677, 678,679, 680, 681, 682, 683, 684, 685, 686, 687, 688, 689: n = A,T,C or G
  misc_feature 690, 691, 692, 693, 694, 695, 696, 697, 698, 699, 700, 701,702, 703, 704, 705, 706, 707, 708, 709, 710, 711, 712, 713,714, 715, 716, 717, 718, 719, 720, 721, 722, 723, 724, 725,726, 727, 728, 729, 730, 731, 732, 733, 734, 735, 736: n = A,T,C or G
  misc_feature 737, 738, 739, 740, 741, 742, 743: n = A,T,C or G
gggagtgatgaacttcactaggaaatcatcgttctttctggtaagtcaccacagcacaaaactgcaaccattgtttagtaacaactagactctgatagatgctgtggagaatttgactagaagtaggaggatcatttactacatggcaaaaaaacaaatcagtctatcttagaaaggttaaaatttacatggataataaagaaaggaaggtagaagaagagtgataaattastgagaaaagaacagtaggtgtaattatagcaatatgcttaaatgaaagagaaaaatatggcagaagcatttattgatttgagattgtaatttttttaaataaaaaagcttagtctggattccaacttgtatataaaattaggagcaaaggtatgattaatatgttcatggaatataattatcaagaaaccacagacatttgtgtatggaggacacagaaaggtgagaacttgctaacaggaatcccattaaagaagcttcagaatttgaagatcagcaaagagaaggaagagatgagaatgaaaggctttatgaaggaatggaatgacagtcattgcatttattaaagtatctgtattatccatcacatgggttctgtcgagcatgcaactagagggtttcnaatcttactnnnnnnnnnnnnnnnnnnnnnnnnnnnnnnnnnnnnnnnnnnnnnnnnnnnnnnnnnnnnnnnnnnnnnnnnnnnnnnnnnnnnnnnnnnnnnnnnnnnnttgagttaacatggacatgtagatggaaacagtagacaccggggcctcaaattgggggtagagaggtggggaagggttgaaaaactacctactggatcctatgctgactacgtagatgacaggatccatacccccaagctcaggattatgcaatatacctatgtaacaaacctgcacctgtatccccccatatctaaaataaacactaaaatttaattaaaaaataaattaaaaaaatgaaaaaatatatcagtcattgactttattgccctgataacgtagcaatggcaacttcacatgttgacttaaaactttgattgtcaacctttggtgtttgcaggatacttaaaaaaactggattatttaatgacactcttgaaggaattaaagtataaaaaagttatagaatattgaaaacatatttccatacttattgaattagttgtttttaatttgaggagaaccaaaaaactctttactgtcctgaccatattctctgatacagtaataatgcaaatttcttacaatttctggcatatagggcatctttctttaacactagcatgcctttacacgaagccttatcacttctttgcagcaacttgttccacaactcactgagtgtgcattgttctgccagagacatcactgtaagagtatgtcgtgtcaaatgtagcaaaaattgtttttatatggtatcagttataaagtgcttttgaggactgtttcttgcttccctgagaatgctgacaagcagagtaaactaagtgctccaatttctaggttcggaaaattacccattttagtcagcttctgcagggccttctaggacagggcacagcaaaaacaccacttctgaacaccccaatcccctggaccacatctagaggactacagaaggtaagagggagaattctcaaagttgtagttatccataatcctaccccttcttatcaagaggaggagaaaggcattgaactctctctcatccctgccttttacagatggttctggaatatggacaaaaggaaaggagaaaaatggctaaggtgccagaggaaattcccaaagcagcctgcattccctcataaatcaaatgtataacatggaactcacctgacacttatatcatcttttcagtgctccaatggtcatacccacaaagaaaag

SEQ ID NO: 702860 - DNA, 2958 bp, Homo sapiens
ccaaactgcttttcagaataaatgtatcgatttacattcccaccaccaatgcaggagagatccagttgttccacatatttaccagcacttgatattgtcagcatggttttacttttcccattctagtaagtgtatagtggcatgtcattgtagctttactttgcttttctctaatagccaatgatattgcatcaaaaaccttttaaacctttaaaaatgatattatgatataatgggtaggtaactttgggaaccatgtagagaatttaacgagatgtccaggaatgaaagactaaggaacaactgagagtagggacacaagtcaggatgttcagctataggccagacaayagataaagtttgcctgaagtaaagtattgacaaaaggcaaggagacgagaggagaggttggatttgagaagcatttggaagtcgattcaaaagttttaatgaacagtttattgtgggaatgaaaaaaggaagttgtccatgtcagttcttaggttttaagcttcaaaaaagtatgtagataatggctatagtaatcaaaattaagaataatagagggaaatggtttgaagagaggaaatgacagatatttttggccatattaaaattgaggtatctacaggacataccaaaatatctaactgagtaggaaaaatattattcagaaaggacatttggtttatgaagaataaagacctattggattaagtgcaatgttttacttaaaagtagtttcctactcttttcaggaatattattggcaattaatctctgacctctaagccagttcacattaaaaataagaccacaccaaaagacattttaggttgagaaactaatgtgaacaattcatggggagaaaattgaaatacggcaatattctattgtacagctgtcttgaaggggaatttgaaggccataactgtcgaaggattttcctaacttacagaagcctgtgtacactaccagaagaattgatgtttgcaattccacccactgtgtactttttcatgatcagagaaatcattcaggacaacgcagttagcaaaccataactcaaaatcgatagaccccccccccccggcatttttgttatttcatgataagataatggcaatatataaaataagcataatactaatagtatataaaccataaagtaaaatgtttaacatatattattttattcaaccctaaacatcctctattataacttggtgagagaagtagtaacatctccatgttaaatattaaagaaacttaaaactagaataaatgcaaagaacatgacacgcggtatggatgacctttttttctgaaaacagtttaaattcctttcccctataccagtattagactgagaaatggagtctctcctgagaaccatctaagtactggtatatctgcttgcatcacaaacacatgattataaggcaaatgtaatccatatttatgttgttaaaaaagatgaaaatccataaagtactgtgatcatatttagagaattttcaatcaaatgattctgtcaattcctaaatatgctgatagcaacaaagaaacagatgtttggttttattccattgccagtgatataggaaaagaaagctattaataagcataaattctactaaagttgaaagacatggaatattcatataaatggagtacattttaccactttttatactcaagaaaataacatgaaaaataactgtacagggtactaggcttaatacccggatagtgaaataatctgtacaacaaacccccatgacacaagtttacctctgcaacgaacctgcacatgcaccccaaacctaaaataaaaattaaaaaagaaaaaaatagttatatagtaaagaaaaagtagtaagtgtcagtgggagacttcaaaattatgaacaaagtaaaagaggaacgagggtggggtgtcagatctaaataaaagaaatacaaaaaataataaacaacaaaatttgccaaaaatatccatactagagaaactacttttttaataatcatgaaaaaagcatgattatataaataaaagaaaaaagcaatgactactaaaatagaatataaaacaataaagaaaatctgtagtaaactaagaaattgttgagaaaaatattattggtattttcaaaaggcaaaattgaagtggcagtattaaaaaagggttgttgcacattgtgtatatttaaaaggcaaattagaaaaatggcttaattacctatgtagcttattcctgcagaagaaacatacctcaaaaatagaatgagtcaactcatggctaataaatacatcaggagaaacaggacattccagcaatgaaagaaccatcattaaggaaacaattgaggacaaacatcctgactaatgaaaagcccaattctttgataccgcacacagctcaattcaggaatgatattccaaaaaataatcaaagtgcctttagaactattatccatgcttttactttcagaaggcattttgtagttacaaaagaaagaacagagatatttgtaattgtatctataaggatgcaaactgccctctgccctaaaatctttaatgacagtaccactgctgtaaatatacgtaaacatactttagacacatgcaagttttttgaggttaatatcaataacaggtttcatataacaaactaaaaataagcaaaaaaaaattggaaaaggggtatgtaacatgcatttactatagttgacatgcaaacttagagtccctgctttaaaaaatcaacaatgaggctgggcgcagtggctcactcctataatcccagcactttgggaggccgaggcaggcagatcacttgaggtcagcagttccagaccagcctggccagtatgttgaaaccatgtctccactaaaaatataaaaatcagccaggcgtggtggcaggggcctgtaatcccagctactcgggag

SEQ ID NO: 702861 - DNA, 2958 bp, Homo sapiens
ccaaactgcttttcagaataaatgtatcgatttacattcccaccaccaatgcaggagagatccagttgttccacatatttaccagcacttgatattgtcagcatggttttacttttcccattctagtaagtgtatagtggcatgtcattgtagctttactttgcttttctctaatagccaatgatattgcatcaaaaaccttttaaacctttaaaaatgatattatgatataatgggtaggtaactttgggaaccatgtagagaatttaacgagatgtccaggaatgaaagactaaggaacaactgagagtagggacacaagtcaggatgttcagctataggccagacaatagataaagtttgcctgaagtaaagtattgacaaaaggcaaggagacgagaggagaggttggatttgagaagcatttggaagtcgattcaaaagwtttaatgaacagtttattgtgggaatgaaaaaaggaagttgtccatgtcagttcttaggttttaagcttcaaaaaagtatgtagataatggctatagtaatcaaaattaagaataatagagggaaatggtttgaagagaggaaatgacagatatttttggccatattaaaattgaggtatctacaggacataccaaaatatctaactgagtaggaaaaatattattcagaaaggacatttggtttatgaagaataaagacctattggattaagtgcaatgttttacttaaaagtagtttcctactcttttcaggaatattattggcaattaatctctgacctctaagccagttcacattaaaaataagaccacaccaaaagacattttaggttgagaaactaatgtgaacaattcatggggagaaaattgaaatacggcaatattctattgtacagctgtcttgaaggggaatttgaaggccataactgtcgaaggattttcctaacttacagaagcctgtgtacactaccagaagaattgatgtttgcaattccacccactgtgtactttttcatgatcagagaaatcattcaggacaacgcagttagcaaaccataactcaaaatcgatagaccccccccccccggcatttttgttatttcatgataagataatggcaatatataaaataagcataatactaatagtatataaaccataaagtaaaatgtttaacatatattattttattcaaccctaaacatcctctattataacttggtgagagaagtagtaacatctccatgttaaatattaaagaaacttaaaactagaataaatgcaaagaacatgacacgcggtatggatgacctttttttctgaaaacagtttaaattcctttcccctataccagtattagactgagaaatggagtctctcctgagaaccatctaagtactggtatatctgcttgcatcacaaacacatgattataaggcaaatgtaatccatatttatgttgttaaaaaagatgaaaatccataaagtactgtgatcatatttagagaattttcaatcaaatgattctgtcaattcctaaatatgctgatagcaacaaagaaacagatgtttggttttattccattgccagtgatataggaaaagaaagctattaataagcataaattctactaaagttgaaagacatggaatattcatataaatggagtacattttaccactttttatactcaagaaaataacatgaaaaataactgtacagggtactaggcttaatacccggatagtgaaataatctgtacaacaaacccccatgacacaagtttacctctgcaacgaacctgcacatgcaccccaaacctaaaataaaaattaaaaaagaaaaaaatagttatatagtaaagaaaaagtagtaagtgtcagtgggagacttcaaaattatgaacaaagtaaaagaggaacgagggtggggtgtcagatctaaataaaagaaatacaaaaaataataaacaacaaaatttgccaaaaatatccatactagagaaactacttttttaataatcatgaaaaaagcatgattatataaataaaagaaaaaagcaatgactactaaaatagaatataaaacaataaagaaaatctgtagtaaactaagaaattgttgagaaaaatattattggtattttcaaaaggcaaaattgaagtggcagtattaaaaaagggttgttgcacattgtgtatatttaaaaggcaaattagaaaaatggcttaattacctatgtagcttattcctgcagaagaaacatacctcaaaaatagaatgagtcaactcatggctaataaatacatcaggagaaacaggacattccagcaatgaaagaaccatcattaaggaaacaattgaggacaaacatcctgactaatgaaaagcccaattctttgataccgcacacagctcaattcaggaatgatattccaaaaaataatcaaagtgcctttagaactattatccatgcttttactttcagaaggcattttgtagttacaaaagaaagaacagagatatttgtaattgtatctataaggatgcaaactgccctctgccctaaaatctttaatgacagtaccactgctgtaaatatacgtaaacatactttagacacatgcaagttttttgaggttaatatcaataacaggtttcatataacaaactaaaaataagcaaaaaaaaattggaaaaggggtatgtaacatgcatttactatagttgacatgcaaacttagagtccctgctttaaaaaatcaacaatgaggctgggcgcagtggctcactcctataatcccagcactttgggaggccgaggcaggcagatcacttgaggtcagcagttccagaccagcctggccagtatgttgaaaccatgtctccactaaaaatataaaaatcagccaggcgtggtggcaggggcctgtaatcccagctactcgggag

SEQ ID NO: 702862 - DNA, 958 bp, Homo sapiens
tctctcgtttcccatgcctaggaacaaaaataaaatacttacacttgaatattaaaattagagtttgcttctgagggagcccaaactaaagcattcattttttttcaaaatggagaaaaaacacctttgatgaacatttgcatttggaagacaattatagcaatgtaaaaggctttgaagagtgcaagatcaggcaattgattcatttatttatgcagtacttctgagtgcctactgtggctaagcacttcataataggctaaaaataaaatgatgagcaaaagcaaacatccaccatcataaagctaatactgtattgaaggcttcatgtaataaacaaatgtaaaaattgcaacagaaacaagtgctgcagaatacaggtgcatgtaggatgtgactatgagaatacgtaacacagaaaactgactcacataagctgggtaagaattttataaggaaatcacaatttactgagaccagaaggaagaatagaatagtaggcaaaacataaaagtatgtgaaaaactatattttagaaggaaacatatggcactcaagagatagaaggaacacttgtatcagctgaagaagagcagtgtgcttgatatggccagaaatgcaggtcttacctgacatcttaagaggtaggtttgcagcagagacaattaactgtttactaaaaaccrtgtgccaccatttacagtggaaaattttcctgagaagggactaccatttgaaggaaaatatctccagacataaatgcagatatatatggctatcaggctgattctggccaatccagagtattaaaccactatagaaaagagtatggaggttcctcaaaactacaagcagaactatcatatgatccagaaatcccactgctgggtatatatccacaagaagggaaatcagcatattgaaaagttatttgcattcccatgtttattacagcaat

SEQ ID NO: 702863 - DNA, 958 bp, Homo sapiens
tctctcgtttcccatgcctaggaacaaaaataaaatacttacacttgaatattaaaattagagtttgcttctgagggagcccaaactaaagcattcattttttttcaaaatggagaaaaaacacctttgatgaacatttgcatttggaagacaattatagcaatgtaaaaggctttgaagagtgcaagatcaggcaattgattcatttatttatgcagtacttctgagtgcctactgtggctaagcacttcataataggctaaaaataaaatgatgagcaaaagcaaacatccaccatcataaagctaatactgtattgaaggcttcatgtaataaacaaatgtaaaaattgcaacagaaacaagtgctgcagaatacaggtgcatgtaggatgtgactatgagaatacgtaacacagaaaactgactcacataagctgggtaagaattttataaggaaatcacaatttactgagaccagaaggaagaatagaatagtaggcaaaacataaaagtatgtgaaaaactatattttagaaggaaacatatggcactcaagagatagaaggaacacttgtatcagctgaagaagagcagtgtgcttgatatggccagaaatgcaggtcttacctgacatcttaagaggtaggtttgcagcagagacaattaactgtttactaaaaaccatgtgccaccatttacagtggaaaattttcctgagaagkgactaccatttgaaggaaaatatctccagacataaatgcagatatatatggctatcaggctgattctggccaatccagagtattaaaccactatagaaaagagtatggaggttcctcaaaactacaagcagaactatcatatgatccagaaatcccactgctgggtatatatccacaagaagggaaatcagcatattgaaaagttatttgcattcccatgtttattacagcaat

SEQ ID NO: 702864 - DNA, 851 bp, Homo sapiens
ctttttcttttaatataaacatttagagtgctatagtttagaaaacarcactcatggtctaaagttttctgtcttgctaggctgctttttttgtggttctttggctagaaagtgcaaatttctctagggaccattgttgcttttgtttttgtttgtctgcacccgtaggcatttccaagtcactgacttctccagtaaccaatgttccagtcgtgcccaggcccatagctgctctgctgtcttctttccagtttgctgtgtcttcttagtttgtttcgtagatacaatgtcgacacttttcagttgtactttgaagacaatagagaagtaactctccttcacttccaggaagcagaagtcaaaatttggctaatcttttaacactatacatatattttttttcatgttgctcacctgctaaaagtcccaggaaccatcaaattagccaattagctaaaggatataatcaaattttttatcctggtttctaaactcacaataatctggtcccatccccaataatcatgcatcagatttgtccattcttctttagataactactcaaaatttcctacatagacattttattggacctcattttcctctttcagttttttttttaaatcttgggtttgttttagaaaacaaaataagatgttatagataatactgctttgaaaactgccttgcacagtgctaaggaactatgcaataaaaagtgtttttttttttttgagacggagtttcgctcttgttgcccgggttggagtgcaatggtgcaatggcactatgtcagctcaccacaacctctgcctcctgagttcaagcgattctcctgcctcagcctcctg

SEQ ID NO: 702865 - DNA, 562 bp, Homo sapiens
tcaactcccacttatgagtgagaacatatagtgtttggttttctgttcctgtgttagtatgccaagaatgatggcttccagcttcatccatgtccttgcaaaagacatgaactcattcttttttatggctgcataatattccatgtgtatatgtgccacattttctttatgcagtctatcattgatgggattttgggttggtcccaagtctttgttattgtgttctctgggatttatgttgaagagtggtgttgattattgaacgaatgaaacattagaaccattatattcctgttgaaaatacctttgaattcttaagcatgtaaacatatggggaaagttctcttcctctcaaatcctttctaccctctacctttaaccttctagtccctcaggatatccattatatagtctgtagtttattgaattttactasaagccttttcagtgtttttaaattgtgatgggtgtatatgtgtacatacaagtatatggatatacctataaaacttatttcctgtagtataatatgcttcgtcttagtataattgagacatgaaaa

SEQ ID NO: 702866 - DNA, 485 bp, Homo sapiens
tgcagcttctaaaatttctatcaatttttccattgtttcaagtacaggattaattattaccagctttctaaagaaaaagactacctgacttcaaactatactacaaggctacagtaaccaaaacagcatggtactggtaccaaaacagagatatggatcaatggaacagaacagagccctcagaaataacgccrcatatctacaactatctgatctttgacacacctgagaaaaacaagcaatggggaaaagattccctatttaataaatggtgctgggaaaactggctagccatatgtagaaagctgaaactggatcccttccttacaccttatacaaaaatcaattcaagatagattaaagacttaaacgttaggcctaaaaccataaaaaccctagaagaaaacctaggcattaccattcaggacataggcatgggcaaggacttcatgtctaaaacaccaaaagcaatggcaacaaaagcc

SEQ ID NO: 702867 - DNA, 643 bp, Homo sapiens
aattaccaaaaaaaaaaaggtttttgaaaatgtaaatagattacctataacaaacacacacgtttccccataacagagtttcaatagaataaaattccctcttaatagcctggttgtcttttcctgtaattgcttgtgtttcctgaggagttcattacaaagaccagctgacttgtcgagttgcatcgcagtgcagagagcgccggaaggagagagaagctcacactttagatccagctctgttgctcacaaagggccttgtttgtccatgagtaaaatgaggttggacaagaattccaaagttgattccagcaataagaacttagagttctattctgaaatatgtatcatcaaagagataggagggcaggcataccactcatttaggacagagaggttaaggtcctcagcctgcagccatgggccacagatgggaggaagagttgcaaccccaaatttcacaggcttaaagaagtttatgtgcattaaaggaygcaatcaacagagggataagacaaaccatgagacgggagaaaacatttgtgaatcacacatctgataaggagttaatatccagaatatataaagaacttttataactcaacaacaacaaaaacaacctcatttaaaaatgggcaaaggg

SEQ ID NO: 702868 - DNA, 1399 bp, Homo sapiens
cactgcactccagcctgggtgacagtgagaccttgtctcaaaaaaaaaaaaagaaaagaaaaaaaattaaataaatacctgtatacctaccattcaactatagtttttttcttgaaagacttagaaaattaaaactgtcatatttctgtagcatacatgttgattttctttccctgcccctttctgcatctgaaaacaaatgattgaaaggtttgttgttctttctggatttttaaaaccaaaatcccaacacttacagaccaggatggtagagaagsctcttttgtttgtttgtttttgagacagggtctttgtcatccaggctggagtgcagtggtacaattagagctcaccgcagcctcgcactccctcaggtgatcctcccacctcatcctcctgcatagctgggactacaggcacaagccgacacacccagctaattttttttatttttgctgcagaggagggctggctccctgtgttccccaggctggtctcgaactcctgggctcaagcagtcctgccatggcctcccaaagtgctgggattataggcatgagccactgcacctggcctgaagaggctctttatcttgaagacgagtcttttatgtggaaagaaatgtttttgtaaaaggggaatttgttttgaaaggtcactttgttatgattacattcacttctgaacatttgctggttccccactttttctcccttcgatgttttgcagaaccataagccccaaactctttattcttttctttcagtatctctagctctcttgattaggatgagaactgcttgaacagctggttgagaaattaagtgtgaaacaccttggagtctttagcattttagaaaagtcaagaagcataaagggaatgtccagacaggaacagtctggaatcctcaatacgtggaaatgattctagacttggtagaatctgggatggctgttaacacatttagatgatttaagtcaaatacaaaaggtgtttcagctgctgaaacactctgggtgcagtgcatgtttgaatgtctttggaggacagaaaatacagtccattcataagggctgtatgagaaagaactgggtctatctgccaatacagtgaagctagcagattctagaatgtccattttctgtgtgtgtgtgtgtgtattttcttttttttttttttaaagacggagtcttgctctgttgcccaggctggagtgcaatggtgtgatctcggctcactgcaagctctgcctcccaggttcacgccattctcctgcctcagcctcccgagtagctgggactacaggcgcccaccaccatgcctagctaattttttgtatttttagtagagatgcagtttcactgtgttagccaggatggtctcgatctcctgacatcg

SEQ ID NO: 702869 - DNA, 1399 bp, Homo sapiens
cactgcactccagcctgggtgacagtgagaccttgtctcaaaaaaaaaaaaagaaaagaaaaaaaattaaataaatacctgtatacctaccattcaactatagtttttttcttgaaagacttagaaaattaaaactgtcatatttctgtagcatacatgttgattttctttccctgcccctttctgcatctgaaaacaaatgattgaaaggtttgttgttctttctggatttttaaaaccaaaatcccaacacttacagaccaggatggtagagaaggctcttttgtttgtttgtttttgagacagggtctttgtcatccaggctggagtgcagtggtacaattasagctcaccgcagcctcgcactccctcaggtgatcctcccacctcatcctcctgcatagctgggactacaggcacaagccgacacacccagctaattttttttatttttgctgcagaggagggctggctccctgtgttccccaggctggtctcgaactcctgggctcaagcagtcctgccatggcctcccaaagtgctgggattataggcatgagccactgcacctggcctgaagaggctctttatcttgaagacgagtcttttatgtggaaagaaatgtttttgtaaaaggggaatttgttttgaaaggtcactttgttatgattacattcacttctgaacatttgctggttccccactttttctcccttcgatgttttgcagaaccataagccccaaactctttattcttttctttcagtatctctagctctcttgattaggatgagaactgcttgaacagctggttgagaaattaagtgtgaaacaccttggagtctttagcattttagaaaagtcaagaagcataaagggaatgtccagacaggaacagtctggaatcctcaatacgtggaaatgattctagacttggtagaatctgggatggctgttaacacatttagatgatttaagtcaaatacaaaaggtgtttcagctgctgaaacactctgggtgcagtgcatgtttgaatgtctttggaggacagaaaatacagtccattcataagggctgtatgagaaagaactgggtctatctgccaatacagtgaagctagcagattctagaatgtccattttctgtgtgtgtgtgtgtgtattttcttttttttttttttaaagacggagtcttgctctgttgcccaggctggagtgcaatggtgtgatctcggctcactgcaagctctgcctcccaggttcacgccattctcctgcctcagcctcccgagtagctgggactacaggcgcccaccaccatgcctagctaattttttgtatttttagtagagatgcagtttcactgtgttagccaggatggtctcgatctcctgacatcg

SEQ ID NO: 702870 - DNA, 1399 bp, Homo sapiens
cactgcactccagcctgggtgacagtgagaccttgtctcaaaaaaaaaaaaagaaaagaaaaaaaattaaataaatacctgtatacctaccattcaactatagtttttttcttgaaagacttagaaaattaaaactgtcatatttctgtagcatacatgttgattttctttccctgcccctttctgcatctgaaaacaaatgattgaaaggtttgttgttctttctggatttttaaaaccaaaatcccaacacttacagaccaggatggtagagaaggctcttttgtttgtttgtttttgagacagggtctttgtcatccaggctggagtgcagtggtacaattagagctcaccgcagcctcgcactccctcaggtgatcctcccacctcatcctcctgcatagctgggactacaggcacaagccgacacacccagctaattttttttatttttgctgcagaggagggctggctccctgtgttccccaggctggtctcgaactcctgggctcaagcagtcctgccatggcctcccaaagtgctgggattataggcatgagccactgcacctggcctgaagaggctctttatcttgaagacgagtcttttatgtggaaagaaatgtttttgtaaaaggggaatttgttttgaaaggtcactttgttatgattacattcacttctgaacatttgctggttccccactttttctcccttcgatgttttgcagaaccataagccccaaactctttattcttttctttcagtatctctagctctcttgattaggatgagaactgcttgaacagctggttgagaaattaagtgtgaaacaccttggagtctttagcattttagaaaagtcaagaagcataaagggaatgtccagacaggaacagtctggaatcctcaatacgtggaaatgattctagacttggtagaatctgggatggctgttaacacatttagatgatttaagtcaaatacaaaaggtgtttcagctgctgaaacactctgggtgcagtgcatgtttgaatgtctttggaggacagaaaatacagtccattcataagggctgtatgagaaagaactgggtctatctgccaatacagtgaagctagcagattctagaatgtccattttctgtgtgtgtgtgtgtgtattttcttttttttttttttaaagacggagtcttgctctgttgcccaggctggagtgcaatggtgtgatckcggctcactgcaagctctgcctcccaggttcacgccattctcctgcctcagcctcccgagtagctgggactacaggcgcccaccaccatgcctagctaattttttgtatttttagtagagatgcagtttcactgtgttagccaggatggtctcgatctcctgacatcg

SEQ ID NO: 702871 - DNA, 1399 bp, Homo sapiens
cactgcactccagcctgggtgacagtgagaccttgtctcaaaaaaaaaaaaagaaaagaaaaaaaattaaataaatacctgtatacctaccattcaactatagtttttttcttgaaagacttagaaaattaaaactgtcatatttctgtagcatacatgttgattttctttccctgcccctttctgcatctgaaaacaaatgattgaaaggtttgttgttctttctggatttttaaaaccaaaatcccaacacttacagaccaggatggtagagaaggctcttttgtttgtttgtttttgagacagggtctttgtcatccaggctggagtgcagtggtacaattagagctcaccgcagcctcgcactccctcaggtgatcctcccacctcatcctcctgcatagctgggactacaggcacaagccgacacacccagctaattttttttatttttgctgcagaggagggctggctccctgtgttccccaggctggtctcgaactcctgggctcaagcagtcctgccatggcctcccaaagtgctgggattataggcatgagccactgcacctggcctgaagaggctctttatcttgaagacgagtcttttatgtggaaagaaatgtttttgtaaaaggggaatttgttttgaaaggtcactttgttatgattacattcacttctgaacatttgctggttccccactttttctcccttcgatgttttgcagaaccataagccccaaactctttattcttttctttcagtatctctagctctcttgattaggatgagaactgcttgaacagctggttgagaaattaagtgtgaaacaccttggagtctttagcattttagaaaagtcaagaagcataaagggaatgtccagacaggaacagtctggaatcctcaatacgtggaaatgattctagacttggtagaatctgggatggctgttaacacatttagatgatttaagtcaaatacaaaaggtgtttcagctgctgaaacactctgggtgcagtgcatgtttgaatgtctttggaggacagaaaatacagtccattcataagggctgtatgagaaagaactgggtctatctgccaatacagtgaagctagcagattctagaatgtccattttctgtgtgtgtgtgtgtgtattttcttttttttttttttaaagacggagtcttgctctgttgcccaggctggagtgcaatggtgtgatctcggctcactgcaagctctgcctcccaggttcaygccattctcctgcctcagcctcccgagtagctgggactacaggcgcccaccaccatgcctagctaattttttgtatttttagtagagatgcagtttcactgtgttagccaggatggtctcgatctcctgacatcg

SEQ ID NO: 702872 - DNA, 1399 bp, Homo sapiens
cactgcactccagcctgggtgacagtgagaccttgtctcaaaaaaaaaaaaagaaaagaaaaaaaattaaataaatacctgtatacctaccattcaactatagtttttttcttgaaagacttagaaaattaaaactgtcatatttctgtagcatacatgttgattttctttccctgcccctttctgcatctgaaaacaaatgattgaaaggtttgttgttctttctggatttttaaaaccaaaatcccaacacttacagaccaggatggtagagaaggctcttttgtttgtttgtttttgagacagggtctttgtcatccaggctggagtgcagtggtacaattagagctcaccgcagcctcgcactccctcaggtgatcctcccacctcatcctcctgcatagctgggactacaggcacaagccgacacacccagctaattttttttatttttgctgcagaggagggctggctccctgtgttccccaggctggtctcgaactcctgggctcaagcagtcctgccatggcctcccaaagtgctgggattataggcatgagccactgcacctggcctgaagaggctctttatcttgaagacgagtcttttatgtggaaagaaatgtttttgtaaaaggggaatttgttttgaaaggtcactttgttatgattacattcacttctgaacatttgctggttccccactttttctcccttcgatgttttgcagaaccataagccccaaactctttattcttttctttcagtatctctagctctcttgattaggatgagaactgcttgaacagctggttgagaaattaagtgtgaaacaccttggagtctttagcattttagaaaagtcaagaagcataaagggaatgtccagacaggaacagtctggaatcctcaatacgtggaaatgattctagacttggtagaatctgggatggctgttaacacatttagatgatttaagtcaaatacaaaaggtgtttcagctgctgaaacactctgggtgcagtgcatgtttgaatgtctttggaggacagaaaatacagtccattcataagggctgtatgagaaagaactgggtctatctgccaatacagtgaagctagcagattctagaatgtccattttctgtgtgtgtgtgtgtgtattttcttttttttttttttaaagacggagtcttgctctgttgcccaggctggagtgcaatggtgtgatctcggctcactgcaagctctgcctcccaggttcacgccattctcctgcctcagcctcccgagtagctgggactacaggcgcccaccaccatgcctagctaattttttgtatttttagtagagatgsagtttcactgtgttagccaggatggtctcgatctcctgacatcg

SEQ ID NO: 702873 - DNA, 678 bp, Homo sapiens
gcggtggagaacagccaaggaaatctgtaaaggtgccatgcctgtcatggtccagtaagaaacagaaaccatgataggtgcttcatatggagggcattcaatacaaggacttgttgacacagttgttggaaggctggatgaacagaaaggggccactgaacaatccagagaataataagaactcacagcagctgccacccacccccagaatcagggacagaggggcagcgatgctgatgctcaaacatatagatgaagctgtccctgccttgccagcgctcagaccagtgtgggggtgctgggagacagtggtcaccctaaagaaagggcactgggaccctcatttccagctgctgctgctgattctggaaagacaatggcaaggcctggaaaaggcagcaggaagcccccacttctctcctaacatcccagcctccctccaagtcttcccctgccagaacctagcaagcacccagccgccaagggagcccacaccacatagcagagagatgctgggaaccacctggcctggccctgcatccctggccactcyggcccctgtctgaacttccagccctggtctttccctggccgtccagcaggaccatgagcagccgtccctgaaccagtggcctctctcaactcggccaagacaaacaaccaagcacactttcagaa

SEQ ID NO: 702874 - DNA, 1003 bp, Homo sapiens
ttgaactgcagagtgtggaactttcatgcaatgctacttgttttcagggtcctcttggggtactggagacaggcctgccaygcccctgctgggtaactgaggatgcccctctgccttttagagccagcatcctcctgtattcaaagcacaaaggagataaggatggctgctcacaaggcttcatgaggctgcagggccagtgacacgcgggtgggagctgccttatgggctgtaagcagcacccaggtgggctctgggtctctgagccacccacagggagacttgcagtcaggtgagccctgcccaggagcacccagcacagcctggctgggtccctgacctccagctgtggcacttggggtagtagcatgcgtgtggaagaccctagctcggatacagggagttccagccccacagaggtagggcactccagggctcctcccactctccctgacagcgggcctgtcatctcaccatatttcccttcaccttcctcagcggttcccactcccacccagacccccgcatggcccctcaggccctgggatggggctcctgctgcagccgccaggctggggcctgtgctgggctgtggcctacccatgggacagtgctgtgaagggaaggaatggtccaggggtgggcaggaaggagggcatgctggagcaagggcttccacaaactcatccacagaaagagagagatttccatcgcaacctggtacactactggcgggtgtgggtgtgtgcgtaagtgaaacaaaagatccaggaaacagtatttcccgttcctgtacacaatacgctcctatactttatatcctagtctgcttaagttctttttgttttgttttgtttttagagacaaagagtcttgccctgtcacccaggctgacaagtatagttcactgctgcctcgaactcctgggctcaaaggatcctcccactcagcctcccaagtagctagggctacaagtgtgcgtcaccatgctgttaattttttg

SEQ ID NO: 702875 - DNA, 616 bp, Homo sapiens
attaaagatttggttattaattaaacttgaccaaggttaaacagctggtaggcagcagagctaaatttagatcccaggtctcctcactcccaatgcaatgatttttcttctgatttgccatgtcagagaacacctggtccctccattttatcctctcccagaaagataggttatcaggagcctagcatggaacagcagcctgcagtctccagaagggtgatgaaggaaggctacaggagaggaaatgcactgccttttccaggtacatttatctttgcaggatccatgagaccactacatgaaaatctgttttcggggtattgagttccataytgaaataacacatttcccactgacaacaaacagaaactccaagtaactattcaagtccagactttaataaaaaccataacccatccagctggaggcggggaggtgatgaggaagtatcaagttgggggaaggagaaacagccccttttaatcactcccaccagggaaccctcatctctcctgggctatttgaaatccttactcctttatgctaaaaagttacctcctccaaaaattcctttctaattattccatccctcccctcctctcccctgccccaatct

SEQ ID NO: 702876 - DNA, 1323 bp, Homo sapiens
taaatttaaaccttaaaaacctgcacctgaaatgcagaaaaacatgcccaggatttaaggctgtgaaagatttttaactgcagcatttggaaacaatgccaaacccaggacaatgagccgtgctgatatgatttgcctgtgtgcccacacaaatctcaccttgaattgtaataatcctcgcatgtcaagggtggggccaggtggagataattgaatcacgagggcagtttcccccatactattctcagggtagtgagtaagtttcacaagatctgctgattttataaatgagagttcccctgaacaaaccctctgttacctgccaccatgtaatatgtatcttgcccctccttgccttccaccatgattgtgaggcctcctcagctatgtggaactgtgagttcattaaacctcttttctttataattacccagtctcaggtattcctttataggcagcctgagaacagactaatacacacacctatccacatctcctgctacaactttgcatttgctttcagataatcaccccacacaacctcacaataactcacaagctgcaatccttctgaaacctacttccacaaggtaaagtgccatattatagcatttatgtgaaattgtgctaccacatatattagatttctattatttattttttatgtgtcactgaaaaagtgtttgaatattgtgcccaaacctcatttttctcatgagccctcaggtttttcttatacaattttggaaaaaaaaaatatggtgttttttagaatactataagttgtgttatagaagaactaactaaacattaaaatctatcatmaggggaagccagtcaatgagagagctgtatgatggggccaaatcatttttatttccccaaaattgctttccctatactggccatggcattaggaaatcaacctacagtgaaggacattataagaaactatcctctgaaattcattattctattcactgtaagaatgttgttgaatatgatgcttaccacattacacaaatcaaattttcaattttgatgaaatgggtgtctattataaatttaaaccttaaaaacctacacccgaaatgcagaaaaacatgcccaggatttagggtggtgaaatagtcttcttttttttttttgaactagaaataccatttgacccagccatcgcattactgggtatatacccaaaggattataaatcatgctgctataaagacacatgcacatgtatgtttattgcagcactattcacaatagcaaagacttgaaaccaacccaaatgtccaataatgataggctggattaagaaaa

SEQ ID NO: 702877 - DNA, 1323 bp, Homo sapiens
taaatttaaaccttaaaaacctgcacctgaaatgcagaaaaacatgcccaggatttaaggctgtgaaagatttttaactgcagcatttggaaacaatgccaaacccaggacaatgagccgtgctgatatgatttgcctgtgtgcccacacaaatctcaccttgaattgtaataatcctcgcatgtcaagggtggggccaggtggagataattgaatcacgagggcagtttcccccatactattctcagggtagtgagtaagtttcacaagatctgctgattttataaatgagagttcccctgaacaaaccctctgttacctgccaccatgtaatatgtatcttgcccctccttgccttccaccatgattgtgaggcctcctcagctatgtggaactgtgagttcattaaacctcttttctttataattacccagtctcaggtattcctttataggcagcctgagaacagactaatacacacacctatccacatctcctgctacaactttgcatttgctttcagataatcaccccacacaacctcacaataactcacaagctgcaatccttctgaaacctacttccacaaggtaaagtgccatattatagcatttatgtgaaattgtgctaccacatatattagatttctattatttattttttatgtgtcactgaaaaagtgtttgaatattgtgcccaaacctcatttttctcatgagccctcaggtttttcttatacaattttggaaaaaaaaaatatggtgttttttagaatactataagttgtgttatagaagaactaactaaacattaaaatctatcatcaggggaagccagtcaatgagagagctgtatgatggggccaaatcatttttatttccccaaaattgctttccctatactggccatggcattaggaaatcaacctacagtgaaggacattataagaaactatcctctgaaattcattattctattcactgtaagaatgttgttgaatatgatgcttaccacattacacaaatcaaattttcaattttgatgaaatgggtgtctattataaatttaaaccttaaaaacctacacccraaatgcagaaaaacatgcccaggatttagggtggtgaaatagtcttcttttttttttttgaactagaaataccatttgacccagccatcgcattactgggtatatacccaaaggattataaatcatgctgctataaagacacatgcacatgtatgtttattgcagcactattcacaatagcaaagacttgaaaccaacccaaatgtccaataatgataggctggattaagaaaa

SEQ ID NO: 702878 - DNA, 1323 bp, Homo sapiens
taaatttaaaccttaaaaacctgcacctgaaatgcagaaaaacatgcccaggatttaaggctgtgaaagatttttaactgcagcatttggaaacaatgccaaacccaggacaatgagccgtgctgatatgatttgcctgtgtgcccacacaaatctcaccttgaattgtaataatcctcgcatgtcaagggtggggccaggtggagataattgaatcacgagggcagtttcccccatactattctcagggtagtgagtaagtttcacaagatctgctgattttataaatgagagttcccctgaacaaaccctctgttacctgccaccatgtaatatgtatcttgcccctccttgccttccaccatgattgtgaggcctcctcagctatgtggaactgtgagttcattaaacctcttttctttataattacccagtctcaggtattcctttataggcagcctgagaacagactaatacacacacctatccacatctcctgctacaactttgcatttgctttcagataatcaccccacacaacctcacaataactcacaagctgcaatccttctgaaacctacttccacaaggtaaagtgccatattatagcatttatgtgaaattgtgctaccacatatattagatttctattatttattttttatgtgtcactgaaaaagtgtttgaatattgtgcccaaacctcatttttctcatgagccctcaggtttttcttatacaattttggaaaaaaaaaatatggtgttttttagaatactataagttgtgttatagaagaactaactaaacattaaaatctatcatcaggggaagccagtcaatgagagagctgtatgatggggccaaatcatttttatttccccaaaattgctttccctatactggccatggcattaggaaatcaacctacagtgaaggacattataagaaactatcctctgaaattcattattctattcactgtaagaatgttgttgaatatgatgcttaccacattacacaaatcaaattttcaattttgatgaaatgggtgtctattataaatttaaaccttaaaaacctacacccgaaatgcagaaaaacatgcccaggrtttagggtggtgaaatagtcttcttttttttttttgaactagaaataccatttgacccagccatcgcattactgggtatatacccaaaggattataaatcatgctgctataaagacacatgcacatgtatgtttattgcagcactattcacaatagcaaagacttgaaaccaacccaaatgtccaataatgataggctggattaagaaaa

SEQ ID NO: 702879 - DNA, 1323 bp, Homo sapiens
taaatttaaaccttaaaaacctgcacctgaaatgcagaaaaacatgcccaggatttaaggctgtgaaagatttttaactgcagcatttggaaacaatgccaaacccaggacaatgagccgtgctgatatgatttgcctgtgtgcccacacaaatctcaccttgaattgtaataatcctcgcatgtcaagggtggggccaggtggagataattgaatcacgagggcagtttcccccatactattctcagggtagtgagtaagtttcacaagatctgctgattttataaatgagagttcccctgaacaaaccctctgttacctgccaccatgtaatatgtatcttgcccctccttgccttccaccatgattgtgaggcctcctcagctatgtggaactgtgagttcattaaacctcttttctttataattacccagtctcaggtattcctttataggcagcctgagaacagactaatacacacacctatccacatctcctgctacaactttgcatttgctttcagataatcaccccacacaacctcacaataactcacaagctgcaatccttctgaaacctacttccacaaggtaaagtgccatattatagcatttatgtgaaattgtgctaccacatatattagatttctattatttattttttatgtgtcactgaaaaagtgtttgaatattgtgcccaaacctcatttttctcatgagccctcaggtttttcttatacaattttggaaaaaaaaaatatggtgttttttagaatactataagttgtgttatagaagaactaactaaacattaaaatctatcatcaggggaagccagtcaatgagagagctgtatgatggggccaaatcatttttatttccccaaaattgctttccctatactggccatggcattaggaaatcaacctacagtgaaggacattataagaaactatcctctgaaattcattattctattcactgtaagaatgttgttgaatatgatgcttaccacattacacaaatcaaattttcaattttgatgaaatgggtgtctattataaatttaaaccttaaaaacctacacccgaaatgcagaaaaacatgcccaggatttagggtggtgaaataktcttcttttttttttttgaactagaaataccatttgacccagccatcgcattactgggtatatacccaaaggattataaatcatgctgctataaagacacatgcacatgtatgtttattgcagcactattcacaatagcaaagacttgaaaccaacccaaatgtccaataatgataggctggattaagaaaa

SEQ ID NO: 702880 - DNA, 1323 bp, Homo sapiens
taaatttaaaccttaaaaacctgcacctgaaatgcagaaaaacatgcccaggatttaaggctgtgaaagatttttaactgcagcatttggaaacaatgccaaacccaggacaatgagccgtgctgatatgatttgcctgtgtgcccacacaaatctcaccttgaattgtaataatcctcgcatgtcaagggtggggccaggtggagataattgaatcacgagggcagtttcccccatactattctcagggtagtgagtaagtttcacaagatctgctgattttataaatgagagttcccctgaacaaaccctctgttacctgccaccatgtaatatgtatcttgcccctccttgccttccaccatgattgtgaggcctcctcagctatgtggaactgtgagttcattaaacctcttttctttataattacccagtctcaggtattcctttataggcagcctgagaacagactaatacacacacctatccacatctcctgctacaactttgcatttgctttcagataatcaccccacacaacctcacaataactcacaagctgcaatccttctgaaacctacttccacaaggtaaagtgccatattatagcatttatgtgaaattgtgctaccacatatattagatttctattatttattttttatgtgtcactgaaaaagtgtttgaatattgtgcccaaacctcatttttctcatgagccctcaggtttttcttatacaattttggaaaaaaaaaatatggtgttttttagaatactataagttgtgttatagaagaactaactaaacattaaaatctatcatcaggggaagccagtcaatgagagagctgtatgatggggccaaatcatttttatttccccaaaattgctttccctatactggccatggcattaggaaatcaacctacagtgaaggacattataagaaactatcctctgaaattcattattctattcactgtaagaatgttgttgaatatgatgcttaccacattacacaaatcaaattttcaattttgatgaaatgggtgtctattataaatttaaaccttaaaaacctacacccgaaatgcagaaaaacatgcccaggatttagggtggtgaaatagtcttcttttttttttttgaactagaaataccatttgacccagccatcgcattactgggtatatacccaaaggattataaatcatgctgctataaagacacatgcacatgtatgtttattgcagcactattcacaatagcaaagacttgaaaccaacccaaatgtccaayaatgataggctggattaagaaaa

SEQ ID NO: 702881 - DNA, 1138 bp, Homo sapiens
ccatagctgaaaactaaggtttagtaggtgaagatttcagatcccgctttctgtaataaacgcataagtggttaagcaaaccagatagctagctatccaaacaattggcacatggccctcatattttcaaataaacttgagacrtatagaaaattcagtgaacaaaaaggatctctattctggagattaaactaagcccttattattatttatttatttatttatttatttgagacaaaatctcactctgtcacccaggctagagtgcagtggtgccatctcagctcactgcaacccctgcctcccgggttcaagcaattcttgtgcctcagcctcccgagtagctaggattacaggcgcccaccaccatgcccagctaatttttgtatttttagtggagacaaggtttcaccatgttggtcaggctggtttcaaactcctgacctcaggtgatccacccgcctcggtctcccaaagtgctgggattacaggcatgagccaccgcacccagccaactgagcctttttttaaagtgataaaagatatatacaaatactaaaactaaaaagacaacaaaaagtggaggaattttagctaaaaaaaaatcccacttatttggaaaggtatccaatcttattttactacaaagaaagtgctaaaaatatattaagtcctacctccaattctgatatcagccacaacagaaagtgtctcctaaaatgcaatttttaaataatgttctaagaaaataacacaaagtttcttcctcatgcaaatgaattttgccctcaaaaagaggagactgtgataccagagcctcatctacttgagggcgggcaactttgagcctagacaaatttggacattttccagaagttttcgctcctaaagtacatgcagttccaatcaacaactcaaagagattttttttttaacttgaaagttaacccaatctttatctggaagagtaaacacattaaaataacacgaacattcaagagcgaaataaagtagggagctagctctaccaggcactaaaacatattataaagcaagcttgtctaacccatggcctgcgggccgcatgtggctcaggatggctttgaatgcagcccagcacaaatttgtaaactttctt

SEQ ID NO: 702882 - DNA, 1340 bp, Homo sapiens
ttctcagtttttatttatttggaccctattcctgtatcactagaatggtgttttaattactacaccactacagtatagcaagcaatacagtacaatataacaatactggtctttatttttaaattttacactggatagtttcattaacatactctacaacatatatttgacaatcagattgtcaaacttcccgaacttctcaaaagataaaacagctattttgactagaattgctattaattttacagactagaactttgaatagagtctacatkcaacactatttggtttttcattctgaaaaatagctctctcttcatttgtttgatcctagaatgaagtgttgttattttcttcatacaaatcctattcattttttaaaatttattactacttattttatggttttacagccttatgattgggttccaacatccattctacataaatttctaacaactatgtatagaggatttttttttcttaaaatgataaatatcaaatatacaaaatgaaaaatcaagattcttattaaagaaaaagtaaccatcagcctttgcctttaaaagagattatagataaagcaagaatatgaccctttttgcagttcaaatgcacagtatctacttgaggggaaaaagagaagctcagatatggcaaagtgcaccattttttataattacttggctacacatacaaggggaaaaagggacaagtaaacatactaacaatattgtaaaagctccacaaaaagggaaaatcaactgcagaacaacttacatgtggcacattattcatataaaataaatccactcacatggtaattttttaaattattaaatgctcagacacaaattttcctcagaacacaacatttatgcaaaggaatatatagaatgggtacggtagctcatgcctgtaatcccagcactttgggaggccaaggtgggtggatcacctgaggtcaggagttcgagaccagcctggccaacatggcgaaaccctgtctctactaaaaatacaaaaattaaccagccatggtggcaagcacctgtaatcccagctacttgggaagctgaggcaggagaatcacttgaacctgggagacagaagctgcagtgagctgagatcgcgccactgcactctagtgtgggtgacagagcgagactctgtctcaaaaaaaaaaaaaaaaagtataaagcccaattaaatggatgaagaaaagaaaacatgaattctagttaacaaaattaaacatagtaatgacaacaaaaataccaaaaagactgggaaactataagagctaagaccaacattctaaatatctagagaaaggaaga

SEQ ID NO: 702883 - DNA, 2259 bp, Homo sapiens
tcttatcaagtgaggaaataaaagtgaaaacatctctggtatttggaaagcagtcgtaatcatcaggatgctaaggtgagaargaagctacctgtaagcataccttctttaaaacacaatggtttcagttacagacagctgacaggtgctgagagcagttgctcaagggcaaagagcccagcaaagaaaatatggatgcaaacccttggcttaatctcactatcaattatctcttatcagctcctttctcactcataggtgaagccctgaaggaggctgcatccagcctcgttcaaggcccccccccaacccaatatatggattgacatttttatagctcaaaaacagccgaatatcaggaacaccaatctgtacctttcctccccatgataggaggtgggatgtgcacttttgtattttactaggtctcgcctccgtcgctttgcctcattcacactgcacactgcatgtctgcatgtggattgtccgtttgcagtgccaacccccacatccagacatcatcttagctcagattgacccctgagcttcagcctgtgcagatactccgctctttggcccctgtccttgtgcaatctgcttgggagagagttttaactttagaaggatcctatccagataaaagtagggacaggatgttctttagggaattcccagcactgaacagggcccagagggtcacttagtatacatatacacgccaaagcgcagatgccctcacccctattacatactgcacactgacattttcttttcttttctttttggagacagagtctgtctctgtcgcccaggctggagtgtggtggtgcaatctgtcactgcaacctctgcctcccaggctcaaacgattttccttcctcagcctcgtaagtagctgagattacaggcatgtgccaccacaccaggctaatttttatatttttagtagagacgaattttcaccatgttggccaggctggtctcagactcctgatctcaggtgatctgcctgcctgagcctcccaaagtgccgggattacaggtgtgagccaccgtgcctggccacactgacattttctagtttattttttttctattttattttactttttaaatgcatgtgggtactcactaaatttatgtcatgatctgtggatgggccatgacctacagcttgaaaattactgctccatggggaaaatgtagaagaacgggataaattatttgtacaaatgaaaacttattaaagtgagctgctttattaaagtgagctcgctttcctgcatgccatgacctggtcctctggtcttatctcactccttttgtcaggaccatgacttgacaaagcgttctgtgacagagggggctggatggtggctttccgaccttatccttgccgtccttaggcctctgctccccggctttaccccaggctttcttgccctgtggaaatgtatgtgtgctgtgatatgaaattgtagcttcagagactcaacagtttgccattttaatgagtccatgttttaatccaattttgaacattcaagatgtatttggcacagtttatcttaaccaataacaccacacacaacaaggggacccaagtactaacaccatatcaattatgaaaaagattgagattgagaaatggcaaaattacacttccctagtataatatttttcaatgtctattctattatctgagattaaaaccaagtcagaatttgtcttcatagcttttattatagattgtgttatttacttgtggtatttgattagtcacagtgtcctctgctagaggagttcaatgagaacagagattatttcattcactccccatcaactagcacactgcttggtacacagtagttttcaataattatttgtggaatgaataaagaattccctttaagaagacatctgtaagctattttttttccccacaaaggctttaaactttcatgcctcataagctagaataatgaatgtggatttgacattgtatctaaaaatgcacgtaagggcctgcaagtttgggttatctttagaatcccaattggacccaagcttcaattgtcactttctaattatgatagctgccatctattgcaaacctcacaataactccaggaagtgggtcctattattatcctccatttcgcagaagaggaaattgaggcccagaaaggtttaatctctatctcttaaggcaatgccattttgactttatactgccctttttgaaatatcttgttatcc

SEQ ID NO: 702884 - DNA, 2259 bp, Homo sapiens
tcttatcaagtgaggaaataaaagtgaaaacatctctggtatttggaaagcagtcgtaatcatcaggatgctaaggtgagaaagaagctacctgtaagcataccttctttaaaacacaatggtttcagttacagacagctgacaggtgctgagagcagttgctcaagggcaaagagcccagcaaagaaaatatggatgcaaacccttggcttaatctcactatcaattatctcttatcagctcctttctcactcataggtgaagccctgaaggaggctgcatccagcctcgttcaaggcccccccccaacccaatatatggattgacatttttatagctcaaaaacagccgaatatcaggaacaccaatctgtacctttcctccccatgataggaggtgggatgtgcacttttgtattttactaggtctcgcctccgtcgctttgcctcattcacactgcacactgcatgtctgcatgtggattgtccgtttgcagtgccaacccccacatccagacatcatcttagctcagattgacccctgagcttcagcctgtgcagatactccgctctttggcccctgtccttgtgcaatctgcttgggagagagttttaactttagaaggatcctatccagataaaagtagggacaggatgttctttagggaattcccagcactgaacagggcccagagggtcacttagtatacatatacacgccaaagcgcagatgccctcacccctattacatactgcacactgacattttcttttcttttctttttggagacagagtctgtctctgtcgcccaggctggagtgtggtggtgcaatctgtcactgcaacctctgcctcccaggctcaaacgattttccttcctcagcctcgtaagtagctgagattacaggcatgtgccaccacaccaggctaatttttatatttttagtagagacgaattttcaccatgttggccaggctggtctcaractcctgatctcaggtgatctgcctgcctgagcctcccaaagtgccgggattacaggtgtgagccaccgtgcctggccacactgacattttctagtttattttttttctattttattttactttttaaatgcatgtgggtactcactaaatttatgtcatgatctgtggatgggccatgacctacagcttgaaaattactgctccatggggaaaatgtagaagaacgggataaattatttgtacaaatgaaaacttattaaagtgagctgctttattaaagtgagctcgctttcctgcatgccatgacctggtcctctggtcttatctcactccttttgtcaggaccatgacttgacaaagcgttctgtgacagagggggctggatggtggctttccgaccttatccttgccgtccttaggcctctgctccccggctttaccccaggctttcttgccctgtggaaatgtatgtgtgctgtgatatgaaattgtagcttcagagactcaacagtttgccattttaatgagtccatgttttaatccaattttgaacattcaagatgtatttggcacagtttatcttaaccaataacaccacacacaacaaggggacccaagtactaacaccatatcaattatgaaaaagattgagattgagaaatggcaaaattacacttccctagtataatatttttcaatgtctattctattatctgagattaaaaccaagtcagaatttgtcttcatagcttttattatagattgtgttatttacttgtggtatttgattagtcacagtgtcctctgctagaggagttcaatgagaacagagattatttcattcactccccatcaactagcacactgcttggtacacagtagttttcaataattatttgtggaatgaataaagaattccctttaagaagacatctgtaagctattttttttccccacaaaggctttaaactttcatgcctcataagctagaataatgaatgtggatttgacattgtatctaaaaatgcacgtaagggcctgcaagtttgggttatctttagaatcccaattggacccaagcttcaattgtcactttctaattatgatagctgccatctattgcaaacctcacaataactccaggaagtgggtcctattattatcctccatttcgcagaagaggaaattgaggcccagaaaggtttaatctctatctcttaaggcaatgccattttgactttatactgccctttttgaaatatcttgttatcc

SEQ ID NO: 702885 - DNA, 1725 bp, Homo sapiens
tcattttataaagcttggtctagttaatctctaaaagtctggggctgctaagtataagatatacagtcttcttcaaagtctcttctttcccctttctcttcttccaaacagcttgatgttaagaaccaaagttcactgggcgcggtggctcacgcctgtaatcccagcactttgggaggtcgaggtgggcggatcatgaggtcaggagatcaagactatcccggccaayatggtgaaaccccatctctactaaaaatacaaaaaattagcttggcgtggtggcgggcgcctatagtcctagctacttgggaggctgaggcaggagaatggcgtgaacctggggggtggaggttgcagtgagccaagatcgtgccactgcactccagcctgggcgacagagagagactctgtctcaaaaaaaaaaaaaaaaagaagataaagaaacaaagttcacctgctttgctgattcagcatgaaagtttcaggattctttggctgtaactttcacacaagttaaccttattgcagttcagtggattagagtaaatgtcaaaatgcaaattaatgctttttgtctccctactaaattaaatgctaagtaggtgttaattctttagaaaactaattctgcaagacttgccccacatcttattggtgaataaaattaactatgattttaacttctcttcatgttcctttatggtttaatctcatcataacccctgagttggatccatggggctctcaagtcattccctggatgaaaaagatccttctctgggcataaagtgttgacttgttcaggacaggctgcactgtctctctttgtataaccttagttacatctcaacatgtatctatttgaagacctatttttagaaactaacatatgtagtgttaaaacaaacaagcaaactaaacctctccattttcaaatgctagacagggcatgcaacttttaggacaaaatttaagagtagtttctactgcaacaccagtgtttcaatttggactaacttgagattgtcttgtttcataatcagtcaatccttagaattctttcctttcccccataggacattgtgtaatttcactttttccccaaataaatgatattctgttttagaataacatacactttctgccccagtattttgtccatagtaggcatatgaataacatttaattatttttgttgttatcaatgaatagtaatgaaggcgtgttaactttctcagaaaacatatgtctattccaaaagaggcttgtcttatttaaccataaatgaatggccttgataaatattccagacagcctgcaggtttcttgaacaaatattattagacagagaatgattttgtacatctgaaatcaaaacatagagagtgactattttcaaaattaaatatgattataaggcatgtttaaataaattgggatttaaacgtagggttacttgtactggtactgtaacaggtaaagaactgtacatataacccagtatttgtatcaatatagacagattatttgaataattaatctcaacaattgctttactcgtagtatgagggattatattattctctattctctccttacttttgcttttataaacaccaggcctttactcaataagccccacaatattattgaaattacttggaaaaaattctagactcattgcttaattattcctgtcctgattgtggtaggtataaagatagt

SEQ ID NO: 702886 - DNA, 647 bp, Homo sapiens
cactctggaatttgaacactgatgactttcttagaagaaattttgttattttcatcttttaaaaaggatatatttagtttagctatgaaaagttaaataaactgtcattaagaacatttaaaaacacaaatcagtgtcctaaatgagagatgtagaaatgaaatatccatggcggataggttattttaaaatttttgtgagaatgattaatttgatatccagccataccctgggcatccaaggaggtgatatacttattttctattttgaaaaaaaaattgaatttgactcatttttctttgatttttttaaaaaagtacaatagtcagaaacaaagcaatattgaaaagctcatggaataatacaattttttttccatgagcctttcatctctcaaaaagccttccccagctcctttaaatttctttatcatcatggtaaaggtacttttttgagtactttatcatcatggtactttatcatcatggtactttatcatcatagtaaaggtactatatcatcatggtaaaggtactttatcatcacggtacaggtacttttttgagtaacattgaactacacttgtttgttcwgctaaactcttaaacccacatagggaatcaaatctaaaatattagcaagaaaat

SEQ ID NO: 702887 - DNA, 735 bp, Homo sapiens
ctattataattctgatttcacttgctatgtggactctgagcctgctccagaaacacttgtctctttcctgttccttgatcttcccagaaatctccacttcaatgcccttttacttattgttctttctcctgccattttgcccccagatatctatctggttccctcccttgttttctacagttctctgtttaaatgtcacctcaatgaggtcctgcttgatgatccttataaagtggcccaatgactacctgaccctgaacctggaacttccttttcttatttcactttagtttttcccattggatttattaaaatccacccaaccaaccaagtatatatttatgatttgttgttgtttattgcctmtctagccattccagaagttaaattcatgatgtcaataactatctgttttgtttatgtccccagcagttaaaatagtggttggcatatgagaaacacagtaaatatttttatttaatagaaataaataaataagctaaaaaaatatatagataacattatgtttctttaacaaaaacaacagaacaaaccctcttctaagttctgagtaagcgtttgatttatgcacattaatgattcaaatcaaaagatatcaaaaagtatttgaattcaaatctttcatacagtttatagtctacctttttcttttattagttgactaggacttgggtttatagcaatgtacagaaacagaatctgtatctattaata

SEQ ID NO: 702888 - DNA, 1971 bp, Homo sapiens
atctaaaattcctgaaattgctcaagaaaatcacagtccaaatatgaaattaaaataaatagtgtatttagtaactagaagagggagtaaagtagaatccactggccttgctataaacatactcaaatggtgagggggagagtcactgaattgggattgtgatgaagcaaatataattacagtatattacttggctccacagtcaataaaatttacacattcataatcatgtattttgttttgaagcttcataatcagtctatacataaaagacttcattgtgttatagaacagaatgtattattaactatgacaaaaaaattgttgagaattctcaattctcaactaaccaaacaataaaaaagagagacacaggtaaagagaaagaaaaggggcactaatcttgtactgcaaatcagaggtggagcacacaaaatagatttaattacttaaagttattaaaacaacaaaccaaaaactaaagcacagaaaatagtagtcaacatctcaaaaactgaaaagagaagaaggatcaaggcatgttatgagtgaattaaatcttcatctggcacagaaaaaaattcaagagataaagtccaaagttggttattctaaaaatagtaatatgaaaatattatttagagatatggtaataatcacctgaaaacactaaaataaaagcagaaagctgagtagttgcctctggaaatttcaactattgtttttcatacattatacattttgattaaattttaaataatttctaaaagcctatttcctttatgattaaaaaattatgttataattgttttctttaataaaaggaaaaattctatctaaaattccagtgaattatatttaggaactttacaaactgaaatgtacaatgagctaaaatagctaaaactattttgaaaatgaatgacatctgaracttaccctatcagatgataaaggtgattaaaaatatataataatgtaaattgaatatggctatgaatatgagtacaagaagagaaaaatcaatggaacagactagatagccagaaaactgaccttaacagacagaagcatgcaacagatgataaaacagtaagaaacaaaccagtaagaaaaaaaacaaaaaaaatgcttaataaattatgctggaaaatcagttacatatctgagaagaaaaagaaaatttagttttcatcccacatcacagaccaaaaataaagatcaattaaacagttaagtgtaaaaactaaagcatgaaaaagaaaaaaagacaagcacacaacagattattaatctaattctggaatgggaagagactttacatacaaaagtagaaaaaaaaaaatcacaaagcaaaaagatcgagtaaactgacttcagaaaaactgtctacagaaaagattcaaaaatcaagttaaagaactaagaaacgtgagcttaaaattgatttaaaaaattaatgttcttaatatgtatataaaggctcgaaaagaacaagaaaagcataagtatcagaaaaaaataagccaaaataatgaattttaaaattcatagaattagaaatatgaatgcataatcaacatgaaaaagtttttcaacttgatagttaagctaagaaatatatatcaaaacaagttatcattttacccttccaacaggcaaggactaagtaaagcctatttcacactggatgggtgtgcagcacttaacggagatggggatgcaaaatgatatcatctttttgaatagcttataaatgtgtcatgagttttaaaaataaattcacattctttaacacagtaattaaaatttttttacttctatcctaagaaaataatcagaaacaactacttacatacatacgttgcatatttataccaaatatatagattatctatatatgacagaaaaaaatgaaaataatttaaatatccaaaagggttaaatttttgcaaaactatataaaggaat

SEQ ID NO: 702889 - DNA, 630 bp, Homo sapiens
gtgagtattatgtctatttgttagtaagaaatgagggagttttctagtcaaaagaaacagcttaggggtataaaaatatacatgatgaaccatcaccaaataattgggaatagggccactagcatcaaatgatataaaatgcacacagctatattcataactcaactcacaaatgatttgccttagttataatgtgtgtcatatctaaacctaaaacataataaaatacacggtacacttacttaacctttcattagtgcacttgtatttttttttacctagtctattgatcaaaaaatttgacatatctgtggtgttatggttgggtgattaattatgaccctgaggaactgacagtctaataatcacacttgtgctgtgccatttgcagcatgagtgctgcagaatcctaggtaggaaagtagtgacataccaagggctattatgtgcaataacgaaaggcagtagggtcgtaggycagccttatctgcattactttggatcttgttagatttcaaattcttggatctgactcaagacctactaaatcagaaactctagaagtgggacccagcagtctgttttaacaagttctccacataatttcaatatatgtttatgtttgaaaaa

SEQ ID NO: 702890 - DNA, 571 bp, Homo sapiens
tataagctcagattatagatttttcataaatgcatattaaattaatgaacaaaaatggctataaactgttggccctttttttttaaattttattattatactttaagttttagggtacatgtgcacaacgtgcaggtttgttacatatgtatacatgtgccatgttggtgtgctgcactcattaactcgtcatttagcattaggtatgtctcctaatgctatcccgccccgctcctctcaccccacaacagtccccagagtgtgatgttccccttcctgtgtccatgtgttctcattgttcaattcccacctatgagtgagaacatgcggtgtttggttttttgtccttgcaatagtttgctaagaatgatggtttccagtttcatccatgtccctacaaaggacatgaactcatcattttttatggctgcatagtattccatggtgtatatgtgccacattttcttaatccagtctatcattrttggacatttaggttggttccaagtctttgctattgtgaatagtgccacaataaacatacgtgtgcatgtgtctttatagcagcatg

SEQ ID NO: 702891 - DNA, 665 bp, Homo sapiens
tcagggatactaaagcctcggaaacggatgcccttgagagaggagagagagaattacaactcaagtttatagcctagaagtcacacgactggtcttactcatcagaccttacaacaagttagagtagaactttttatgttaattattatttctgtagaggtggggtcttgctatgttgctcagactggtcccgatcttctggcctcacgcaatgctccaccttggcctccaaaagtgctaggattacaggggcaagccatcatgcctagcccagaatacaatttttaattttctttttttttgagayggagtctcacactgtcgcccaggctggagtgcagtggtgcgatctcggctcactgcaaactccgcctcctgggttcacgccattctcctgcctcagcctcccgagtagctgggactacaggtgcctgccaccatgcccggctaattttgtgtgtttttagtacagacagggtttcgccgtgttagccaggacggtctcaacctcctgaccgcatgatctgcccgcctcagcctcccaaagtgctgggattacaggtgtgagccactgcgcccagtccagaacagaactttaaattaagcttaaatcttcacataacttacctctggttttgtacttttatttttactagttgatatat

SEQ ID NO: 702892 - DNA, 964 bp, Homo sapiens
attttatgtttttttgtttgtttgtttgtttttgagaaggagtctcacactgtcacccaggctggagtgcaatggcacaatcttagctcattgcaacctccctctcccaggttcacactattctcctgcctcagcctcctgagtagctaagattacaggtgcacaccaacacacccggctaattttttgtatttttagtagagatggggtttcactatgttggccagactggtctcgaacttctgacctcgtgatccaccacctcggcctcccaaagtgctgggattacaggcgtgagccaccgcgctcagcctgatagccactttctagcaccgttcggtgtcaggttcagtcatgttttttgctaaacctgaagcttaaaaaaaaaaagttatcagaggaattttaaaggcagcaattcattggtaagattgctcaaaagggtagagtagaaaaaattcaacttaggacaactttatctaatgatgtagagtacagagcacttaatttggagttaggaagtctgggttctagtcctagctccattactaattaagacaaccaaaggaaaacaatgaactactatttctcttcccatttccataattaagataacacttaaactacttaactcagagtctgattctcaggttccaataaggacgtatatgcaaaagtagtcaagtcttgttacttaaaatgtgacctcctcgccagaagtatttacatttcttgggcctcagacttactgaatccaaacagtttagatatggagttaccaaggaccaagtcctaaatgaacgttctgccaccttcccactgtgttatcttggctatgtaacctaatttctaagtctcagtttttacatttctaaaatggtaataataaaagccaatttcagagtagttaagtaaactaaataaaayaattttcataaaagcatctagaacagtgctttgtgca

SEQ ID NO: 702893 - DNA, 2130 bp, Homo sapiens
gttttgttctcaaggctcagtaataacaactactactacttatgggatatctactaggtaggtaccaatcaatttatataatactttcaatcctccaaacactaataatattataataatataagatatgggctggctgggcatggtggctcatgcctgtaatcccagcactttgggaggccgaggcgggtggatcacgaggtcaggagatcgagaccatcctggctaacatggtgaaaccccgtctctactaaaaatacaaaaattacctgggtgtggtgatgggcacctctagtcccagctactcgggaggctgaggcaggaaaatggcatgaacctgggaggcggagcttgcagtgagctgagatcgcgcctctgcactccagcctgggcaacagagtgagattccgtgtctaaaaaaaaaggtacaggctgggtacagtgagtggctcacacctgtaattctagcattttggaaggccaaggtgggtggatcacttgagtccaggaatttgagaccagcctggccaacatagtgagacccccatctctacaaataaaaaaaatgagccggccatggtggtgcacacttgtagtcccagctactcaggaggctaaggcagagaattgctcgagcccaaggagtcaaggcttcagtgagccatgatcacaccacagcactcagcttgagtaacaaaatgagaccctgtctcaaaaaattaaaataaaataaatatatctcatttcacaaatgagaacactaagacacaaaactgttaacttgcccaaagatagttgctgaactgagattcaaaataggcctgttgaatcccaaaacacatgttctttcttttcctttttgaattaatttttaattatacaagtaacacatggctrcatctcctggtgaagcagcatcactgtctagggtaaatatccagggttcgtcatctcatgctaagaaaattaagggcacagacgtgggtggattaaggaatggaaagtttaataggcagaagaaaggagagaggagagcagctccttgcaagagagaggtgtccgaaaaagagaaaagcagtggagtgcagcagattttataggcaggcttgaggaagcagtgtctgatttatgtagggcccatggactggctcaatcaggtttgacatttacgtagcactcaaggaaggcttgtcaccccaccctaatcttattatgcaaaagggctttccacttggccagcaccatcttgtctgctccttactgtacatgtggctgacaaagagaagggaagatgaagccaccattttgaacatccctagtcccatgtagtatttttctattggcacaactgctggcattcacttgtgcaagcttccagcttgcttgttcatgtctgcaactcaattttacagactgttattttttagaaaagaaaatgattttggggctgctttttattaaaatgaaaaccttaccaaggactcccgtgcccacaatatctgcgtaagtaatttgttcttaactcctgtatcattctgcccctcaggagtggtaagcctaactgctgttaggatgtgttggacgacaactctttctggctacttcctgctgaaaagtggtgtcatgtggggaacagcagctagggctcttcctggggttggtctaaggttccacagaagaaaggcatgtccatatgtgtttctatgtgcagcagcattggaggttgattgcagtcacctattctgatggattgtgatactggtttgcctccaccagatgctgctgaaacattaatataaaagtaacattcttttaggataagcgacattggatttgggtgactagaataactttagtgttaacctgaaatctttcctgcaattattgatcccttcatgactttcacagaccatttatgacatgcttagactttctggcttgtcctaaacatccctctttttaaacaaccagtaattctctttaggacaagaatttaatatacaagatcccttcttatgtaaagtttattttctttataaccctctttgcatagctagggtgtgacacattaccgaagccagtaaaaaatcttggcagactcagtgatagtaaaaccttcatgtttacttc

SEQ ID NO: 702894 - DNA, 1729 bp, Homo sapiens
atttaaattaatgaattgtctggtgggtgaattatatctcaattaaaatgtaaaagaaagaagaatgatggactgccagatcctgaaacagaactgcctgctctgtttgattgagaagatcacgaggctcagggtgcagactgtggaaggcattccaaccacatctcaatgatagagacagtgacctaagtgaccttctcaggtcatttagcattattctcttcttgggtagaaaagtggcattagcacctaacyttgccaattaataccttactactctccatgggcatggccgtgctttgtggtctttgacaaagggtaccagcccctcaaagattatccagcctcgacctcaattcttggagaatcaatgggatctgaggcttcttacagtcattcgtgaatttaagtcccaaaccagcctgcctctcaaacaaaaagtttagctcacttcattgaaatctctttttggttctataacccacagtgcatactaaacacagggtagaaagccctcatattaaataattttaatttcttgacttcaaaggttgctatttctcatgcatctgagttttggaatagcagactcagacttgctacaagaatatccataatacttaaaaaataaaaaagacagggaaaaagaatacccatagaagaagaacaggatatggtaatactgaaaatgaaaccaaaatccagtccaacactcacttccatacttgggtcatcattcatcctgatgcagcctgagagattcgttcctgggctggggccacttgtggggcctgggcacctggcagtaggaagtagagttatttactacaggtgaaaaaactgcaaatcttagcagatactaaactataacatggttctcactcccctacgcccagtcctaattttatcaaatttctaattaagttcatggtttaagtaacacataatgaaagagagttcccacctccatcagagagaggttacaaacaacagagaatccagtcaaaaatgaaaatgaagcatttgcaattcaaagccatccttcctcaccctcaatatagaagggaaattttattgaggtagattaggccctcacaaaatgcactgacattttttaatgtttcctaaggaagatgagtctgtatacttaaaaaggcaggtgcaaatgagcaccgaaggaggatgagggcagggacaggtataggttcccaaaggcttgttaaccttgagtgtgaaagaaacagaaataggatcaaaacctgtctaagttaacttaggaggatgtcgttgatattgtgatcaatgcccccagttcctgagacagacctcctaaaatccttgtagacagaggtgctaggggaatctttactctaatatttggtctctgatcctggttcctgatacggagtgtctaagaccttgtaatttcccgagtgataggagtgtttgacgcgaagctcctgaatctcttgaaatttcctgagtattacgagcatcttctgttctaacgcggtatctcttggtgggcttctggatagcctcaggatgaggggctggttgccaggggaaccaatctgtggtttgagcgttggaactttcaactccaccctgccaagctcctgggaggggagggggctgaggtgatcaccaatggccaatgatttaatcaatcgtgcctagtaaagcctccataaaaacctgaaaggacagcacttggaaagcttctgat

SEQ ID NO: 702895 - DNA, 1542 bp, Homo sapiens
taagcaatgaggtctcaggcaaaggccccacaattaattgcctgttgaaaatgaaaattataacattattagagccgttatcatgttagctatcaatgatggatgacatttatagagtacggggcttgtataatactatctatactggaaaaaacctcatgttctgtaaaattgtatattaaaaatatcagggttcattaaagaaccccagactaagatcaactattcatagcacatatctgtcaaaggacttatatccaagaataaaaggacagaaaacttaattttaaaatgggtgaaagacttagacacttcacaaagaagatatacaatggccaatcagcacaagaaaaaggtcccaacatcattacatctgaaaaatatatattaaaatcacaatgaaatacccatttagtagagtggctaaaatgacaaagattaacactaccaaatactgaagatgtggaacactaaaaccacccacactgctggtgggagcgtgaaatgctataaaaactaccgaaaaccrtttgacagtttcttaaaaagtgacagtcacagctatgctatgtcctaacagttctactcctagatatttattctaggtgaaataaaaacatatgtgcacacaaagacttgtacacagacgttcatagcagctttgtccgtcgtaaccccaaactgcatatactgcagatatccaataacagcaggaaaaacaatcaaattttggaatattcatacaaggaaatacaactcaataataaaaaactactactaagaaacacaacataatcccatcatgctgacagaaaaaagacaaacacacaaaaaagtacatactgtgtaactgagttctagaacaggctaagctaacctatcagaccagtggttgttccttagggtgctagaggtggaggcggggcattgactgggaagttgcacaagggaagtttctggggtgatagaaattccgtgttttgatgtgtatttatctacctggttgaatagtatactcgagatctgaacattttatgacatgttaaatacattaataaaaaagaagttaaaagtataagaacaaaataatgcagggattatgagagaaatagggttaagaagaaaccactaaaaaaatacatgcagctgggcagagtggctcatgcctgtaatcccaaaactttgggaggctgaggcaggaggattgcttgagcccaggagtttgagaccagcctaggcaacactgcaagatcctacctctacaaaaaatttaaaaattagccaggcatagtggtgctcgcctatagtcctagctactcaggaggctgaggcaggaggatcacttgagcccaggaggttgaggctacagtgagccatgatcccaccaccatagtccagcctgggtgacagaatgagatcctgtctcaaaaaaaaaaaaaaaaaaaaaaaatctgtctacctgtctacctacctacctacctatctgtatgtatgtgcaacactgtaaccagagtactaacaaacacacttattattagtact

SEQ ID NO: 702896 - DNA, 669 bp, Homo sapiens
attttcttttatattgccatttcctcagaacattgaggtccttgaagatgctcatttatttttatttgatgacatctatttagcacttaaccagggaaaatggatttccttttcaactttcttttgagagccaggctccagtcttcgtgccttttttataccatgaagacctgctgttcttttattctgcttaagtgcataagcgttactgtgtatggtgaaaaccgtgttgcctcacagagcagccaaaagctagctgctaaaaccaggattcattctgtaacaggatgacattttgtctttttttttgagacggagtctcactctatctttttactcttccacgtgacttctgtatttcaggrgagaggaagtgcgattcctaaggggatgatttgattcttctcaaataccagctcagcctctctttaaggccacacaccgatgctgagctgaagagtggcctgatctgaattttcccctaggttttaggagatgcagagtatttttcgtatgaacgaactctggaccccttcccaggatattagtccttccaactttcactgatttttgtcacgcttttcctttggattgcctcagtaacccgatgggtgacctgcaccagtgggcaggagaaacacgagcttccttggtgactgtaaatattca

SEQ ID NO: 702897 - DNA, 669 bp, Homo sapiens
attttcttttatattgccatttcctcagaacattgaggtccttgaagatgctcatttatttttatttgatgacatctatttagcacttaaccagggaaaatggatttccttttcaactttcttttgagagccaggctccagtcttcgtgccttttttataccatgaagacctgctgttcttttattctgcttaagtgcataagcgttactgtgtatggtgaaaaccgtgttgcctcacagagcagccaaaagctagctgctaaaaccaggattcattctgtaacaggatgacattttgtctttttttttgagacggagtctcactctatctttttactcttccacgtgacttctgtatttcaggggagaggaagtgcgattcctaaggggatgatttgattcttctcaaataccagctcagcctctctttaaggccacacaccgatgctgagctgaagagtggcctgatctgaattttcccctaggttttaggagatgcagagtatttttcgtatgaacgaactctggaccccttcccaggatattagtccttccaactttcactsatttttgtcacgcttttcctttggattgcctcagtaacccgatgggtgacctgcaccagtgggcaggagaaacacgagcttccttggtgactgtaaatattca

SEQ ID NO: 702898 - DNA, 343 bp, Homo sapiens
acactgagaacacatggatacaggaaggggaacatcacacactggggcctgtcatggggtagggggaggggggagggatagcattaggagatatacctaatgtaaatgatgagttaatgggtgcagcccaccaacatggcwcatgtatacatatgtaacaaacctgcacgttgtgcacaagtaccctaaaacttaaagtataataataaaacaaaaaacaaaaaacaaaaacacctgtccagttcattgcaacctatctggaaacctatagcacttattattgccttccttattcagcaattatcatttgccagtttgtattcttaggttaacaagccctcga

SEQ ID NO: 702899 - DNA, 1549 bp, Homo sapiens
tgagaataaatggattccaattcagaagtatagagaaaggggaaaggagtgacctcactacagtccccatggctgtaatcttcctttcctcattccattcaactattcacttttccacaaaaagtttttttttttttaaattgtatcatcagtaacccagaagattggaaggatatttaaacgaacctccaaktagcagagctcaaggatgtgaaagaagagacaaagtatcaaggtgaatcacatgagaccaaatcagtcaaagcggggggtgagttgtagaaggatagagggatggtagtagaagaaactggatagtattaaaaggttaggggacatgcagagaggacgttttgagaatagagtgggtgctagcaaagaggaaaggtgtagaaacaggaaactgaatcaagaagggtaaataaagctgttgcctgatggctaaatgtctggaataacatactgcctgtacacacatgcatatacagacatattggtatttggataccttaaaatggcacattttgttagaatattgaaagctactaatgcaaacactagctacaatatattggggcagaaaactcaaacatgccaaagattatctgaggttttaggttttaaggacacgtgagaatgtaatatttgatgatctggagcctggagaagacaatgcttcggcccagtgtgcatctgacaatttttcttccaatcaaaagatagcttcaaataacagtgaatcattccatgtgatagtgatttgaaaaacaatttctctataacgaaagacagacacacacacgcgcgcgcgtgcgcgcgcgagacagagattgactgtacaagaccaggagcacatggttaattgacatattcctgagcaaacttgtaaatagtactgttctcacaggaattaaatcagtagcactgtgggtaactttagaattcaaaggtgtcacagttcctcactctgtgttgatggaaccgaacggcattaaccttttcacttgcactaacaaagacaagtgaagacaagatgcgctatgtttcctgcacatctatgttttgttttttgcccaaggccctctacaattatcccacacttcagaactaatttctctactcgtttacctgcattgtttttgcactactcctgtaacatcacaatctcattaaccatgatttttgtcaaaaggaggatttataagggcatagaagaaataattatttagtgatataatattgagcaaatctttgtagtttctgcaaatatgttggccctcttccaaagtaaacattttttcctgcttcagtcttattttataaataacactctactgcttaaagcaaagcaacgctgacaattgttcatctagtcctgaatttaaaaattagacttcttatttttaggtgatggcaagagggaaagaaaaacccaactgaaatacagaaattgattatttttttcaataatacaaatcttatcaattaaacgtttattacttctttttaaatttaaaaatatatttgtatatatgtatgcccacaaaat

SEQ ID NO: 702900 - DNA, 1549 bp, Homo sapiens
tgagaataaatggattccaattcagaagtatagagaaaggggaaaggagtgacctcactacagtccccatggctgtaatcttcctttcctcattccattcaactattcacttttccacaaaaagtttttttttttttaaattgtatcatcagtaacccagaagattggaaggatatttaaacgaacctccaattagcagagctcaaggatgtgaaagaagagacaaagtatcaaggtgaatcasatgagaccaaatcagtcaaagcggggggtgagttgtagaaggatagagggatggtagtagaagaaactggatagtattaaaaggttaggggacatgcagagaggacgttttgagaatagagtgggtgctagcaaagaggaaaggtgtagaaacaggaaactgaatcaagaagggtaaataaagctgttgcctgatggctaaatgtctggaataacatactgcctgtacacacatgcatatacagacatattggtatttggataccttaaaatggcacattttgttagaatattgaaagctactaatgcaaacactagctacaatatattggggcagaaaactcaaacatgccaaagattatctgaggttttaggttttaaggacacgtgagaatgtaatatttgatgatctggagcctggagaagacaatgcttcggcccagtgtgcatctgacaatttttcttccaatcaaaagatagcttcaaataacagtgaatcattccatgtgatagtgatttgaaaaacaatttctctataacgaaagacagacacacacacgcgcgcgcgtgcgcgcgcgagacagagattgactgtacaagaccaggagcacatggttaattgacatattcctgagcaaacttgtaaatagtactgttctcacaggaattaaatcagtagcactgtgggtaactttagaattcaaaggtgtcacagttcctcactctgtgttgatggaaccgaacggcattaaccttttcacttgcactaacaaagacaagtgaagacaagatgcgctatgtttcctgcacatctatgttttgttttttgcccaaggccctctacaattatcccacacttcagaactaatttctctactcgtttacctgcattgtttttgcactactcctgtaacatcacaatctcattaaccatgatttttgtcaaaaggaggatttataagggcatagaagaaataattatttagtgatataatattgagcaaatctttgtagtttctgcaaatatgttggccctcttccaaagtaaacattttttcctgcttcagtcttattttataaataacactctactgcttaaagcaaagcaacgctgacaattgttcatctagtcctgaatttaaaaattagacttcttatttttaggtgatggcaagagggaaagaaaaacccaactgaaatacagaaattgattatttttttcaataatacaaatcttatcaattaaacgtttattacttctttttaaatttaaaaatatatttgtatatatgtatgcccacaaaat

SEQ ID NO: 702901 - DNA, 1040 bp, Homo sapiens
atgttacatttgcagagctccttctcacacgtttgaccattacaactctctaagacaggctggacaaggaaaactggctctggctttcagaggagaagaggtgtctaagtaacctgcggctttgctgctgagcagctgtacagytatgtcaccagctccttcagaagtcagctaggacaggtggttgatagtgatggccagatcccacttctcattttgtattcaacctggttattgctgtcctgagacctctaaggagacagttgatgagaaaaaggaaatagagagaggaatgagagagaaggagaaaacatgatgtctttactttttcctcgttttcaagttcagcgagcccagtgatcagaaaatgactgcgaaattggcctgattttactaagttaaacgatctgttttccctgcattactttatattattactttattgcattattatattctttccttatcatattactttgtattagcatgcacagtttattactgttttcccaaattagaagagagagctgaaatgaggcatagtgtttgtcagcggattattttttatttaggttcattagggtctcaaatatcaaaagtaccagagagatcattgaacacggtactgcagtgaatcacttagcaccatgttttcaaacttgtgtgattataagaatcacctggggcccttgctgaacgttaaaggctccagtcctattccagatgctcggaatcaggaacagaatctctaggagaggagccagggaatttatgctttcaacaagcgcctcagatgatttctgttattcacatcaacttatattacttggatctgttggggaaaaaaaagctaactgaaaacacagataaagcatctataatgtcctatttatgtggagacgtaaggcaagcccaagacatggtcctgagatgatgtttctgttaataaaaacgactgaaatagttatggagcaagacaagcacacactgaagcactgcacggtaggcacggaccaaaatcatgagaaaccccattgttc

SEQ ID NO: 702902 - DNA, 1643 bp, Homo sapiens
aatacaattggctccaacttcagcgttacatgtttagaggatgagagttaatattacagaaagataacattttctggggagaggctatacaatgaaagtttatgaagcaccagaacctgggatttgcaaaactgtctctctataaagcaagagcaagaaggagagccaggaaaggaaaggaggaaaattaaatggtctaacttttagagtctcttaatggtaaaattcttgctttttacacagatctgcattcatttcctcaatttatttcaataacgttttttgtaacctactcaatgttaggtaccacactaggtgcagaggccacaaagatcaatgatagaattgcaaagaggcacacatgtttgctattagctaggagcccatatgaacatcttgcacatatttatctatctagttttcacaaccactctttgagattgaaacacagagtggtgaagtcacttgcccaaaatcactcagctagttaatggtagacaaggattcagatctaagcagtctgtctctagaatatgctaattactagctcctaattgctacactatgttgcctctgaagacatagttcctgtcccaagaaaacttgggacaaaatatcccaaaatagggaagcacatgtattaatttaaataaaattaaaccagtggggtaataaatgcttggagtgcaaacaaagaattgtggcatgagggatcaaatactttcaatgtttctagtgtttgtactgggttactatgattttccttacaacactgacattctggtgtaagtagtcaaggaattcactgaggtttctttgaatctacacctcccaatgactttctatgatagtcaatcacggcaccaaaagtcatttcatagtcagtgaatagtcagtgtgaagctgatccagagcccaagatgtatgcctgtaaaagcaaggagaaaaatacctaagagtcagacagaactgggactagaataaagaaagacaaagaaaaagagagtgcccaaaacaaaaattacatttccctagcttttcatctggcaacatttagcacatcatacagttagttgctcactttgcagtctttacaaaagagcagcattgggtattgagcacttcgttatatattggctacactttcctgtcatgttgcctttattctagaagggagtaagagaggagtaggaattctccataagagaagatctgaccaaataatagtcgattcaatgggttttcccctttgggtttgcaagtaagggtttgcagggccttcatgttattttaccctctcttctccattcaccctsactaaaaaacatgtccttgtattaaactctgagagaaagaaatcaaacatgatttaatgctctgtgtttgacaacaatattcaatgaagtaatttgtatgatttacagagatataatttcctctgaaagaaattacacatgcttaaaaataattttatgatatagcatagttgtttaaaatttggcatagatacatgcttaaacaaattatctttgctttcagaaaggaacagaatagtttaaagatcataaatattaaaagaacaaaatgattttttttaaatcaggggcaaatttacttaggcctgagtacaaatagagaccgtc

SEQ ID NO: 702903 - DNA, 1376 bp, Homo sapiens
aaaacaaaatatgcactggtatttaagtcaatgtaatgtgatttttttttttaaaggcaaaagacttctagggtagacccagggatagcttttaacacattcctttctgccaatacatgctgctgagtcctttcgtaatttagtacaaaacacacgactgttggaaaagtttccttaatctttccttactgaatcaacacaaatttgtttactcttatttataacaccctcattgtatgtgtacttgattcatattattttgagctttctaagactcaaaggatttgtgaagttgtggtggaagacagacatcttctcttcgaactttgaaagaacaggagtactgattgcctaaacttgttagaaaataatacatatttattttatttttacttatactttgtttttacttatggtttgatcaggaatatcagcagtaattcatacattgagaaaatggtttaagtgttaaataacacattcacattgtaaggcacagactaatgaaataaaaaaayttaaacaagcaaacaaaacttaccttcccatctgctagagcatcaagtaatattcacataaaatgaaacaaaaacctcctgtcttgcttgacacatgtcacaaatatattctgatgcatatgtaatggacagcatttctgaggcttaggttcaagatagagaatactcttattctccccttaatgagaaaccacagaatgcagttctgaagccctcagaattgtcatgacagggcgtagaacaacagatggtccctcaggcaaactaatcctatgttatttaataccaaaagcaaaactgtcaactgtttcagggaaaacatagagcccggaaccaaagaattgatgagtaaacatgaaagaaattgattttgaaatatttggtttgaaatgtattttaatttttcagtctaaacacatattgttgctgatttggaatcctaaaccactgtttggattttaaaaataagtgctttggaaattgctatgaagaaaactctttcaagaaggctttcactgacaactttaaaatgattccagaaaaaattaattataataaattagtttgaagttattgtttgagtgttggtgtgtgtgagcagcaggttaaaagaagcaactccttcagaaatttaataaatacatttgaaacctatggcattttcttagaattttacatatagtaggttcatcttagaccctctttaagaaagttttcttatttaggaggagaatctcattagattcataatgttatggtgaaattccactctgaaatacctttgttctttacaaacagaagttctgctttttattaagatttattttaaaaaattataagaagtactcacaagcttta

SEQ ID NO: 702904 - DNA, 1376 bp, Homo sapiens
aaaacaaaatatgcactggtatttaagtcaatgtaatgtgatttttttttttaaaggcaaaagacttctagggtagacccagggatagcttttaacacattcctttctgccaatacatgctgctgagtcctttcgtaatttagtacaaaacacacgactgttggaaaagtttccttaatctttccttactgaatcaacacaaatttgtttactcttatttataacaccctcattgtatgtgtacttgattcatattattttgagctttctaagactcaaaggatttgtgaagttgtggtggaagacagacatcttctcttcgaactttgaaagaacaggagtactgattgcctaaacttgttagaaaataatacatatttattttatttttacttatactttgtttttacttatggtttgatcaggaatatcagcagtaattcatacattgagaaaatggtttaagtgttaaataacacattcacattgtaaggcacagactaatgaaataaaaaaacttaaacaagcaaacaaaacttaccttcccatctgctagagcatcaagtaatattcacataaaatgaaacaaaaacctcctgtcttgcttgacacatgtcacaaatatattctgatgcatatgtaatggacagcatttctgaggcttaggttcaagatagagaatactcttattctccccttaatgagaaaccacagaatgcagttctgaagccctcagaattgtcatgacagggcgtagaacaacagatggtccctcaggcaaactaatcctatgttatttaataccaaaagcaaaactgtcaactgtttcagggaaaacatagagcccggaaccaaagaattgatgagtaaacatgaaagaaattgattttgaaatatttggtttgaaatgtattttaatttttcagtctaaacacatattgttgctgatttggaatcctaaaccactgtttggattttaaaaataagtgctttggaaattgctatgaagaaaactctttcaagaaggctttcactgacaactttaaaatgattccagawaaaattaattataataaattagtttgaagttattgtttgagtgttggtgtgtgtgagcagcaggttaaaagaagcaactccttcagaaatttaataaatacatttgaaacctatggcattttcttagaattttacatatagtaggttcatcttagaccctctttaagaaagttttcttatttaggaggagaatctcattagattcataatgttatggtgaaattccactctgaaatacctttgttctttacaaacagaagttctgctttttattaagatttattttaaaaaattataagaagtactcacaagcttta

SEQ ID NO: 702905 - DNA, 1376 bp, Homo sapiens
aaaacaaaatatgcactggtatttaagtcaatgtaatgtgatttttttttttaaaggcaaaagacttctagggtagacccagggatagcttttaacacattcctttctgccaatacatgctgctgagtcctttcgtaatttagtacaaaacacacgactgttggaaaagtttccttaatctttccttactgaatcaacacaaatttgtttactcttatttataacaccctcattgtatgtgtacttgattcatattattttgagctttctaagactcaaaggatttgtgaagttgtggtggaagacagacatcttctcttcgaactttgaaagaacaggagtactgattgcctaaacttgttagaaaataatacatatttattttatttttacttatactttgtttttacttatggtttgatcaggaatatcagcagtaattcatacattgagaaaatggtttaagtgttaaataacacattcacattgtaaggcacagactaatgaaataaaaaaacttaaacaagcaaacaaaacttaccttcccatctgctagagcatcaagtaatattcacataaaatgaaacaaaaacctcctgtcttgcttgacacatgtcacaaatatattctgatgcatatgtaatggacagcatttctgaggcttaggttcaagatagagaatactcttattctccccttaatgagaaaccacagaatgcagttctgaagccctcagaattgtcatgacagggcgtagaacaacagatggtccctcaggcaaactaatcctatgttatttaataccaaaagcaaaactgtcaactgtttcagggaaaacatagagcccggaaccaaagaattgatgagtaaacatgaaagaaattgattttgaaatatttggtttgaaatgtattttaatttttcagtctaaacacatattgttgctgatttggaatcctaaaccactgtttggattttaaaaataagtgctttggaaattgctatgaagaaaactctttcaagaaggctttcactgacaactttaaaatgattccagaaaaaattaattataataaattastttgaagttattgtttgagtgttggtgtgtgtgagcagcaggttaaaagaagcaactccttcagaaatttaataaatacatttgaaacctatggcattttcttagaattttacatatagtaggttcatcttagaccctctttaagaaagttttcttatttaggaggagaatctcattagattcataatgttatggtgaaattccactctgaaatacctttgttctttacaaacagaagttctgctttttattaagatttattttaaaaaattataagaagtactcacaagcttta

SEQ ID NO: 702906 - DNA, 1376 bp, Homo sapiens
aaaacaaaatatgcactggtatttaagtcaatgtaatgtgatttttttttttaaaggcaaaagacttctagggtagacccagggatagcttttaacacattcctttctgccaatacatgctgctgagtcctttcgtaatttagtacaaaacacacgactgttggaaaagtttccttaatctttccttactgaatcaacacaaatttgtttactcttatttataacaccctcattgtatgtgtacttgattcatattattttgagctttctaagactcaaaggatttgtgaagttgtggtggaagacagacatcttctcttcgaactttgaaagaacaggagtactgattgcctaaacttgttagaaaataatacatatttattttatttttacttatactttgtttttacttatggtttgatcaggaatatcagcagtaattcatacattgagaaaatggtttaagtgttaaataacacattcacattgtaaggcacagactaatgaaataaaaaaacttaaacaagcaaacaaaacttaccttcccatctgctagagcatcaagtaatattcacataaaatgaaacaaaaacctcctgtcttgcttgacacatgtcacaaatatattctgatgcatatgtaatggacagcatttctgaggcttaggttcaagatagagaatactcttattctccccttaatgagaaaccacagaatgcagttctgaagccctcagaattgtcatgacagggcgtagaacaacagatggtccctcaggcaaactaatcctatgttatttaataccaaaagcaaaactgtcaactgtttcagggaaaacatagagcccggaaccaaagaattgatgagtaaacatgaaagaaattgattttgaaatatttggtttgaaatgtattttaatttttcagtctaaacacatattgttgctgatttggaatcctaaaccactgtttggattttaaaaataagtgctttggaaattgctatgaagaaaactctttcaagaaggctttcactgacaactttaaaatgattccagaaaaaattaattataataaattagtttgaagttattgtttgagtgttggtgtgtgtgagcagcaggttaaaagaagcaactccttcagaaatttaataaatacatttgaaacctatggcattttcttagaattttacatatagtaggttcatcttagaccctctttaagaaagttttcttatttaggaggagaatctcattagattcataatgttatkgtgaaattccactctgaaatacctttgttctttacaaacagaagttctgctttttattaagatttattttaaaaaattataagaagtactcacaagcttta

SEQ ID NO: 702907 - DNA, 1059 bp, Homo sapiens
ataaggtgaggtaagtaaaggagagcagagtggtgtggaatgagtttatgtgtgagaatgattattccattcacaatagaagaagtgtaaatacgagaatcttttaaaaaggacaaatatttgtttaacaaaaaaatgttaaatgttttaattcagttttaaatttgctgcctgtggggtatcatgaaaaaatgaaaaaattcagagactggagccaaagatactatttgttaatcattcctacagaaataaagacagagttcacctggaaagattaaggctagagtatcaaggaatattcatcttccagggacaagaagagaaggtaaacttgtgtattttgctaaaataaaatttttccagtacctttattaagaataggccttagattttatttaaaagcctatttctggcattgcrttctactacaaaagatattttaaaaaacaccaattacttttattttcataaaacattttattagttatctaaaaattatctttcagaaagcctttatgcatataggaaagagtcccaaaatagccctagataagttttccagtttacataactccaaaaatcctatgtttattttctttgtgctccttctttttgccatccacatgggttattgtaaaaggaatgattcacagtgattgaattttggtttgcaatagaattctagacatcagagatagaaagccactggcataatctactatgaaaacagatcctgtttttttttttttttttttttttttgagacagagtctcgctttgtcgcccaggccagactgcgcagtgcaatggcgtgatctcggctcactgcaagctctgctttctgggttcatgccattctcctgcctcagcctcttgagtagctgggattacaggggcccaccaccacgcccggctaattttttttgtttgtgtgtgtgtgtttttagtagagacggggtttcaccttgttagccaggatgggctcgatctcccgacctcgtgatccacccgcctcggcctcccaaagtgctgggattacaggcgtgagccaccgcgccc

SEQ ID NO: 702908 - DNA, 957 bp, Homo sapiens
caagtgtcaagactattctacgtgtaggcatctgcaataataaaacatttattctaggtgaggagatagatggtgagtgaatgtcaaggactgggttgcaaataggtgatttttaaaaattcctctcagtgcaatgctgaaacatctattatttcccttttgttttctcctgagcatattttggcaaaagctcagccatattgccatcttttgccatttatttacttgaatttcatatatttagattgattgatgacttttatctgcctagaacttggagaaacattttgcagtatttttttttgtgtgtgatgtaacccaaaatttaggatgaacagcggtgattattaaacaaattcacctttaaatgcagttaccctttactccctttttaaaaggcttctgagtcaaaaatctctagtaggaggtggttaccagaggcttggtggttagggaaaagggggagagggggatgtgttggtcaaaggatacataattacagttaggaggaataaattcaagagctctattgtacaccaaggtgactatattcratgactgtattcttcaaaaactgaaaagaaaagataagtgttctcatcacaaaataataaatatttgaggtaatacatttgttaattagctatatttaactattccataatgtatatatacattgaaacatcatgttgtacatgataaaaacatacatggtatatgtcaattaaaaaaattaaaaagtctgtagtggcaaagttactttttccgtaaaggataatggagatgttgaactgaaagaaatagtcaccttttctgaatgaaatagaatttttagaatccatatgattttgaaaattaaaaatgggtgaaatggagactggatattctacatttcttggcttgagctaatgacccatatttttacttctgaaattgaatatgaagagatttcaacac

SEQ ID NO: 702909 - DNA, 1745 bp, Homo sapiens
gcccctgtcatgtaaagtgactgcctagacccttgctgagtgtttaactttaatttgggggaaggattgaatgtgatttggagggtctaggcatcatttatcttccttcccttgggtcattttggtttcattcagcttagacaatcgaatgcctcattaattgttaagattcccagggataagggtgacaaggcatcctctgttcagtatgttttagaatcaacacaatcatttttacttctttttttccttgtrctctctcaatcccacccccacataagtaagtggagtcaccaagtaaatatatgggataggaattatttccctgtcatcttgagtgttttaggctatttccttgtctaagtggcttccatactctagggatgtgtgaggcaaaagtaaataaaactgaatggcagaggtacaggaaacccctaggagtctcttgtctcactgcctgtattaatctgtgggaagaaaaaacacacacacacaggttgaactcacacttcctcttcttaacctgtagttttcttggtctaaatattgcttttgaaagatctgagttttctcaagagataccagggctgggggcagttagcaggtgatgtaaactcactgagcctccaggaggaaagccagctgaggaagaagaagtggcccttagtctccaaggtccagccactgacttggctgccagcttgcacctgggctcctgccagcctgccccatttccctccacagtcataccaggacctggtgcagcggctggagcctgtcatcatggagctggaacgtcagggcaatgtcctcgtcatctcccaccaggctgtcatgcgctgcctcctggcctacttcttggataagggcgcaggtgcctttgagggaggggctgggagacacatccagtgggagagggctggacttgcagtggcaccaggattcctgggaaacagacctccctgtctccactcaaattagagtactttctccagacagcagtgtggggctcccagcagccactgagtcaatgacttgctgagttcactctgctgctacgaaagcttccaatggagagtggctgctgctggtgctccttgatcctgcctggctcaagggccagtgtcatgctgacactcctggcagcatcaggacagtggttgaatattcccagcctgccacgctgcctactaggagggtggtatcttaggagcagcagttgtttctgggtaagggcagtaagaaggtgccgttgccttcttccatacttcgcttcccgatcttcgggagctcctgggaagcctgcattgtggatgctgagctcagcatcctgagctgcttggaagctgttgtggtcagaccttattggcctttgctgtacccaggtgacccccttccattgggctctctggctacaatacttcctgtttttgcctgcgtggaaggatctaagatggccttatttccttccttagccactcagaaggttgggtggctttgtggtctggggtttaagggaggagttgtacaactctaagaggtggtcaaagtaagggaaactcattatgagctctgtagattctttcttccactaacttgaccttactccataatactaagagacttccctcgcctggtctttctgttttcagatgagctaccatacttgagatgccctctccataccatcttcaaacttactcctgtggcctatggtaactatgcacataggggctggcaggagc

SEQ ID NO: 702910 - DNA, 1745 bp, Homo sapiens
gcccctgtcatgtaaagtgactgcctagacccttgctgagtgtttaactttaatttgggggaaggattgaatgtgatttggagggtctaggcatcatttatcttccttcccttgggtcattttggtttcattcagcttagacaatcgaatgcctcattaattgttaagattcccagggataagggtgacaaggcatcctctgttcagtatgttttagaatcaacacaatcatttttacttctttttttccttgtactctctsaatcccacccccacataagtaagtggagtcaccaagtaaatatatgggataggaattatttccctgtcatcttgagtgttttaggctatttccttgtctaagtggcttccatactctagggatgtgtgaggcaaaagtaaataaaactgaatggcagaggtacaggaaacccctaggagtctcttgtctcactgcctgtattaatctgtgggaagaaaaaacacacacacacaggttgaactcacacttcctcttcttaacctgtagttttcttggtctaaatattgcttttgaaagatctgagttttctcaagagataccagggctgggggcagttagcaggtgatgtaaactcactgagcctccaggaggaaagccagctgaggaagaagaagtggcccttagtctccaaggtccagccactgacttggctgccagcttgcacctgggctcctgccagcctgccccatttccctccacagtcataccaggacctggtgcagcggctggagcctgtcatcatggagctggaacgtcagggcaatgtcctcgtcatctcccaccaggctgtcatgcgctgcctcctggcctacttcttggataagggcgcaggtgcctttgagggaggggctgggagacacatccagtgggagagggctggacttgcagtggcaccaggattcctgggaaacagacctccctgtctccactcaaattagagtactttctccagacagcagtgtggggctcccagcagccactgagtcaatgacttgctgagttcactctgctgctacgaaagcttccaatggagagtggctgctgctggtgctccttgatcctgcctggctcaagggccagtgtcatgctgacactcctggcagcatcaggacagtggttgaatattcccagcctgccacgctgcctactaggagggtggtatcttaggagcagcagttgtttctgggtaagggcagtaagaaggtgccgttgccttcttccatacttcgcttcccgatcttcgggagctcctgggaagcctgcattgtggatgctgagctcagcatcctgagctgcttggaagctgttgtggtcagaccttattggcctttgctgtacccaggtgacccccttccattgggctctctggctacaatacttcctgtttttgcctgcgtggaaggatctaagatggccttatttccttccttagccactcagaaggttgggtggctttgtggtctggggtttaagggaggagttgtacaactctaagaggtggtcaaagtaagggaaactcattatgagctctgtagattctttcttccactaacttgaccttactccataatactaagagacttccctcgcctggtctttctgttttcagatgagctaccatacttgagatgccctctccataccatcttcaaacttactcctgtggcctatggtaactatgcacataggggctggcaggagc
